United States Patent Application Publication US 2007/0214517 A1 - sequence listing, part 51

SEQ ID NO: 67928 - protein, 456 aa, Triticum aestivum
  peptide (1)..(456): Ceres Seq. ID no. 14313539
  misc_feature (198)..(270): Pfam Name: RNA recognition motif. (a.k.a. RRM, RBD, or RNP domain) Pfam Description: RNA recognition motif. (a.k.a. RRM, RBD, or RNP
  misc_feature (16)..(439): Homolog of NCBI NO: 18416906 NR Description: RNA binding protein 45 (RBP45), putative
  misc_feature (16)..(439): Homolog of NCBI NO: 7485342 NR Description: hypothetical protein F10M23.340 - Arabidopsis
  misc_feature (38)..(450): Homolog of NCBI NO: 21592583 NR Description: putative DNA binding protein [Arabidopsis
  misc_feature (38)..(450): Homolog of NCBI NO: 15221071 NR Description: RNA binding protein 45 (RBP45), putative
  misc_feature (23)..(433): Homolog of NCBI NO: 9663767 NR Description: RNA Binding Protein 45 [Nicotiana plumbaginifolia]
  misc_feature (14)..(438): Homolog of NCBI NO: 40253807 NR Description: putative RNA Binding Protein 45
  misc_feature (32)..(443): Homolog of NCBI NO: 39545835 NR Description: OSJNBb0060E08.6 [Oryza sativa (japonica
  misc_feature (19)..(443): Homolog of NCBI NO: 34896988 NR Description: putative RNA binding protein [Oryza sativa]
  misc_feature (44)..(448): Homolog of NCBI NO: 34395214 NR Description: putative RNA Binding Protein
  misc_feature (7)..(448): Homolog of NCBI NO: 34901884 NR Description: putative RNA Binding Protein 45
MNGQHAPQPKASGAPPPPLQQAPPPQQYYQAPPQYYQQGPPPAMWGHPQQHMPPQYAPPPQQYAPQPPQQYAPPPQHYAPPPPQYGAQMAGGPPPGGEDIRSLWIGDLQYWMDETYLYNAFAPVGPQQVTSVKIIRNKHTGQPEGYGFIEFQSRAAAEYALGTFNGQMMPNVEQVFKLNWASCSAGDKRGDDGSDHTIFVGDLAADVTDAMLEEIFKATYPSVKGANVVTDRATGRSKGYGFVRFGDLNEQTRAMTEMNGVLLSTRQMRIGPAANKKNMGTQQTYSTNAGYQSSQVNEAANDPNNTTIFVGGLDSNIDENYLRQVFTPYGEVGYVKIPVGKRCGFVQFTSRACAEQAISALNGSQIGSSNVRLSWGRSQNKQAPQQDANQGNGNSYYGYQQGPDAYYGAPNVQDPSMQNYGYSGYGSYEQQQQPSQQQQPPQQQPPQQQQQQPPQQ

SEQ ID NO: 67929 - DNA, 1358 bp, Triticum aestivum
  misc_feature (1)..(1358): Ceres Seq. ID no. 13596315
gattgattccagaagaggtagtctgctcggcgaatttcatcccctaggaatccttctccttccttccttgggacgagcagggagggccgtggacatggaggattcctcctcctacttgccggggccggcggcggatttcgtcgactacctgggccccgacacctccgccaccgtcttcaccatgctccaccaccccgccgacctcgcacgcgcatccgccgtctcccgatcctggcgacaattcgttatcgacaaccagttcagcaagctgcagtgcctgcgggcctgcccggagctctccaccttcaccaccgtccacctcaccaccaccaccaccaccaccaccagaaacccctctcaatgccaggaccaggacaccgccgagaagctccaccgggtgtacacgcacctcgcccacggcctcctctcgccctacaaccccagggactgcatcatccactgcatcggcgcctccagcaccgacaacttccccaacgagaccatcgagaacaccctcgaccccgtcgaccaccttgactccaacaggccatcctactggtccagcgccggccagagggaccccgccgtgcccgagtgcctcatatatcgcctccaggccgatctctgcctcgttcacgagatcaagctgcagccattcaaagcgtttttccagcatggcgacccgatatattcgccaaagagcatccgggtccagatgggctatccaagctcaccgctacgccctgaagcactcgtctctgatgaaaatgaaggccagttgattgatgatacaaactatgtctggacctacacatctccagaattcccaatgctgcaggaaaatgttttgcaatccttcaagttaccacacccggttctctgtattggcggggtggtcaaggttgagcttcttgggagggttcagaaacaggcaatcgatggtctctactacatatgcatatctcatgtccaaataatggggaaggcactctcacgagacctcggggtcgttcctcgcgggaacggcctcgtcctgaactactatctgcatccccatacatgcggcgttccccgcagcgagtcgtcacgggacaatgggcgcagcaggtggcagggcttggcgtcgaggatctggcattctggcacggcgcgaaggataggagggctgaaccaaacgctgctgagcagactgtttggcggtccgttgcggcttgtggtcgtagcggacgaatcggaaggggaggaggaggatgatcttccttagaaggaaggaaggagctcaagggtcttatttgatttgatttgattttctgcacatatataaaagagtgactgtccttttgtggtgctgtgctgtg

SEQ ID NO: 67930 - protein, 420 aa, Triticum aestivum
  peptide (1)..(420): Ceres Seq. ID no. 13596316
  misc_feature (270)..(348): Homolog of NCBI NO: 28850404 NR Description: hypothetical protein [Dictyostelium discoideum]
  misc_feature (132)..(241): Homolog of NCBI NO: 28850404 NR Description: hypothetical protein [Dictyostelium discoideum]
  misc_feature (82)..(261): Homolog of NCBI NO: 7452420 NR Description: hypothetical protein A_TM018A10.10 - Arabidopsis
  misc_feature (271)..(345): Homolog of NCBI NO: 18308222 NR Description: unknown protein [Oryza sativa]
  misc_feature (183)..(336): Homolog of NCBI NO: 28393062 NR Description: putative F-box protein [Arabidopsis thaliana]
  misc_feature (45)..(336): Homolog of NCBI NO: 18411435 NR Description: F-box protein family [Arabidopsis thaliana]
IDSRRGSLLGEFHPLGILLLPSLGRAGRAVDMEDSSSYLPGPAADFVDYLGPDTSATVFTMLHHPADLARASAVSRSWRQFVIDNQFSKLQCLRACPELSTFTTVHLTTTTTTTTRNPSQCQDQDTAEKLHRVYTHLAHGLLSPYNPRDCIIHCIGASSTDNFPNETIENTLDPVDHLDSNRPSYWSSAGQRDPAVPECLIYRLQADLCLVHEIKLQPFKAFFQHGDPIYSPKSIRVQMGYPSSPLRPEALVSDENEGQLIDDTNYVWTYTSPEFPMLQENVLQSFKLPHPVLCIGGVVKVELLGRVQKQAIDGLYYICISHVQIMGKALSRDLGVVPRGNGLVLNYYLHPHTCGVPRSESSRDNGRSRWQGLASRIWHSGTARRIGGLNQTLLSRLFGGPLRLVVVADESEGEEEDDLP

SEQ ID NO: 67931 - protein, 389 aa, Triticum aestivum
  peptide (1)..(389): Ceres Seq. ID no. 13596317
  misc_feature (239)..(317): Homolog of NCBI NO: 28850404 NR Description: hypothetical protein [Dictyostelium discoideum]
  misc_feature (101)..(210): Homolog of NCBI NO: 28850404 NR Description: hypothetical protein [Dictyostelium discoideum]
  misc_feature (51)..(230): Homolog of NCBI NO: 7452420 NR Description: hypothetical protein A_TM018A10.10 - Arabidopsis
  misc_feature (240)..(314): Homolog of NCBI NO: 18308222 NR Description: unknown protein [Oryza sativa]
  misc_feature (152)..(305): Homolog of NCBI NO: 28393062 NR Description: putative F-box protein [Arabidopsis thaliana]
  misc_feature (14)..(305): Homolog of NCBI NO: 18411435 NR Description: F-box protein family [Arabidopsis thaliana]
MEDSSSYLPGPAADFVDYLGPDTSATVFTMLHHPADLARASAVSRSWRQFVIDNQFSKLQCLRACPELSTFTTVHLTTTTTTTTRNPSQCQDQDTAEKLHRVYTHLAHGLLSPYNPRDCIIHCIGASSTDNFPNETIENTLDPVDHLDSNRPSYWSSAGQRDPAVPECLIYRLQADLCLVHEIKLQPFKAFFQHGDPIYSPKSIRVQMGYPSSPLRPEALVSDENEGQLIDDTNYVWTYTSPEFPMLQENVLQSFKLPHPVLCIGGVVKVELLGRVQKQAIDGLYYICISHVQIMGKALSRDLGVVPRGNGLVLNYYLHPHTCGVPRSESSRDNGRSRWQGLASRIWHSGTARRIGGLNQTLLSRLFGGPLRLVVVADESEGEEEDDLP

SEQ ID NO: 67932 - protein, 360 aa, Triticum aestivum
  peptide (1)..(360): Ceres Seq. ID no. 13596318
  misc_feature (210)..(288): Homolog of NCBI NO: 28850404 NR Description: hypothetical protein [Dictyostelium discoideum]
  misc_feature (72)..(181): Homolog of NCBI NO: 28850404 NR Description: hypothetical protein [Dictyostelium discoideum]
  misc_feature (22)..(201): Homolog of NCBI NO: 7452420 NR Description: hypothetical protein A_TM018A10.10 - Arabidopsis
  misc_feature (211)..(285): Homolog of NCBI NO: 18308222 NR Description: unknown protein [Oryza sativa]
  misc_feature (123)..(276): Homolog of NCBI NO: 28393062 NR Description: putative F-box protein [Arabidopsis thaliana]
  misc_feature (1)..(276): Homolog of NCBI NO: 18411435 NR Description: F-box protein family [Arabidopsis thaliana]
MLHHPADLARASAVSRSWRQFVIDNQFSKLQCLRACPELSTFTTVHLTTTTTTTTRNPSQCQDQDTAEKLHRVYTHLAHGLLSPYNPRDCIIHCIGASSTDNFPNETIENTLDPVDHLDSNRPSYWSSAGQRDPAVPECLIYRLQADLCLVHEIKLQPFKAFFQHGDPIYSPKSIRVQMGYPSSPLRPEALVSDENEGQLIDDTNYVWTYTSPEFPMLQENVLQSFKLPHPVLCIGGVVKVELLGRVQKQAIDGLYYICISHVQIMGKALSRDLGVVPRGNGLVLNYYLHPHTCGVPRSESSRDNGRSRWQGLASRIWHSGTARRIGGLNQTLLSRLFGGPLRLVVVADESEGEEEDDLP

SEQ ID NO: 67933 - DNA, 2259 bp, Triticum aestivum
  misc_feature (1)..(2259): Ceres Seq. ID no. 13596319
ctagcagcgcccattaaaaaaatgaataccacgctgagggaggcctcttcctcgctcgatcccgaccgatccccgcgcagtgggggccacgcctctccatgacgcaagggccgacgtcactcctcccggtctgggcgcggacgactgcgcgaaggcccagtagtcgacgccagtcgctccacgccaccaccgcagaggccatggatggagaagacgcgcaccacaggccctcttcctcctcctcgtccggcggcccctttctctccggcctctgcgccgccgcgctccgccgcaagcccatctccgcgcgcgcctctgccgccgcctccggcgagggcctcgtgcggcagctcggcgtcctcgagctcgtgctcctcgggatcggcgcgtccatcggtgccggcatcttcgtcatcaccggaaccggcgcccgcgacgccggcccaggtgttacaatcagttttgctctcgctggagctgcgtgtgtgctcaatgcattgtgctatgctgaactggcatctcgttttcctgccgtggtcgggggagcatacttgtacacatatgcagcgtttaatgaactcacggccttcttggttttcacccagttgatgcttgattaccatattggggctgcaagcattgctcgtagcctagcaagctattttatccaattcttggagctgattccttctgtgaaaggcaatgttccgagttggattgggcatggagaagagttttttggtggtgtcgtttcagttaacatattggctccaatccttcttgtcatcctgactgtgatcctatgccgcggtgtcaaagaatcatctgcagtgaatacctttatgactacattgaagataatcatcgtcatagtcgttntatttgctggtgtgtttgaggtggatgtatcaaactggtcaccatttatgccgaatggtttcaaagctgttgtaaccggatctacagtagtcttctttgcatatgttggattcgatgcagttgctaattctgccgaggaagctaaaaacccacagcgggacttgcctattggcatcctaggaagccttctggcatgtgtcatcctatatgttgctgtatgcttggtgattactggaatgttgccatatacattactgggtgaagatgctcccttggctgaggctttttctgcaaaggggctgaaatttgtaactgttttgatcagcattggagctgttgctggtcttactacaacacttcttgttggtctgtatgttcagtcacgtttgtatcttggacttggaagggatggcctactaccttcaatattttctaaagttcatccaacactgcatactcctctgcactctcagatctgggttggttgtgttgcagcagtcttagctggcctctttaatgtgcatgcactctctcatattctctcagttggcacactgacaggctactcggttgtatcagcttgtgtgatcacacttcgatggagcgacaaagcaactaattctcgctcccttggaaaattttcaatctggcaggagggtgttttttgtcttgtcatagtggctctctgtggtttcatagcaggaatatcctaccggtttagctattctattgccttcatcatcatagcttttctgatagctacagtcggcagtttttctctgctgtttcgacaggtgtatgttcctgtggacccacctcgcttttcttgtcctggagttcctatggttccgattgtctctgttttcttcaatatgtttttgtttgctcagctacatgaagaagcttggtacagatttgtcatccttagtctcatcgcggtgggggtatatgctggatatggtcagtacaacgctgttccgtctacttcggaccactcgtctgttgcgtatcatggagtgccttcggaagccccatgatctattgcaagcctccaagtttatctgaaaatccatgtaccattggatcgtcaggggaggccatggccgtaagcctacctgtattgctcgaagccgtatgtgtagtatgttctccatagttccatatgtacatctgtatgatattttggaggtcagccaccatatcatttaccaatgaaatgacagcgaaagttttgttgagcaggatacacacacacagacacaccaaagattcacttggaaaggctttgaaagtcacgattgaaagctttatgtacttgtagtattacagttcataacttcatacatgtacttaattcatctgaaaaaaaacttagttcgc

SEQ ID NO: 67934 - protein, 605 aa, Triticum aestivum
  peptide (1)..(605): Ceres Seq. ID no. 15221835
  misc_feature (225)..(390): Pfam Name: Spore germination protein Pfam Description: Spore germination protein
  misc_feature (508)..(586): Homolog of NCBI NO: 20808968 NR Description: Amino acid transporters [Thermoanaerobacter
  misc_feature (81)..(462): Homolog of NCBI NO: 20808968 NR Description: Amino acid transporters [Thermoanaerobacter
  misc_feature (508)..(585): Homolog of NCBI NO: 37521235 NR Description: probable amino acid transporter [Gloeobacter
  misc_feature (80)..(461): Homolog of NCBI NO: 37521235 NR Description: probable amino acid transporter [Gloeobacter
  misc_feature (500)..(595): Homolog of NCBI NO: 17546307 NR Description: PROBABLE AMINO-ACID TRANSPORTER TRANSMEMBRANE
  misc_feature (64)..(460): Homolog of NCBI NO: 17546307 NR Description: PROBABLE AMINO-ACID TRANSPORTER TRANSMEMBRANE
  misc_feature (219)..(592): Homolog of NCBI NO: 14140148 NR Description: putative protein [Oryza sativa]
  misc_feature (35)..(383): Homolog of NCBI NO: 14140148 NR Description: putative protein [Oryza sativa]
  misc_feature (117)..(592): Homolog of NCBI NO: 25406885 NR Description: hypothetical protein [imported] - Arabidopsis
  misc_feature (41)..(592): Homolog of NCBI NO: 18390592 NR Description: expressed protein [Arabidopsis thaliana]
  misc_feature (261)..(261): Xaa is any aa, unknown or other
MTQGPTSLLPVWARTTARRPSSRRQSLHATTAEAMDGEDAHHRPSSSSSSGGPFLSGLCAAALRRKPISARASAAASGEGLVRQLGVLELVLLGIGASIGAGIFVITGTGARDAGPGVTISFALAGAACVLNALCYAELASRFPAVVGGAYLYTYAAFNELTAFLVFTQLMLDYHIGAASIARSLASYFIQFLELIPSVKGNVPSWIGHGEEFFGGVVSVNILAPILLVILTVILCRGVKESSAVNTFMTTLKIIIVIVVXFAGVFEVDVSNWSPFMPNGFKAVVTGSTVVFFAYVGFDAVANSAEEAKNPQRDLPIGILGSLLACVILYVAVCLVITGMLPYTLLGEDAPLAEAFSAKGLKFVTVLISIGAVAGLTTTLLVGLYVQSRLYLGLGRDGLLPSIFSKVHPTLHTPLHSQIWVGCVAAVLAGLFNVHALSHILSVGTLTGYSVVSACVITLRWSDKATNSRSLGKFSIWQEGVFCLVIVALCGFIAGISYRFSYSIAFIIIAFLIATVGSFSLLFRQVYVPVDPPRFSCPGVPMVPIVSVFFNMFLFAQLHEEAWYRFVILSLIAVGVYAGYGQYNAVPSTSDHSSVAYHGVPSEAP

SEQ ID NO: 67935 - protein, 571 aa, Triticum aestivum
  peptide (1)..(571): Ceres Seq. ID no. 15221836
  misc_feature (191)..(356): Pfam Name: Spore germination protein Pfam Description: Spore germination protein
  misc_feature (474)..(552): Homolog of NCBI NO: 20808968 NR Description: Amino acid transporters [Thermoanaerobacter
  misc_feature (47)..(428): Homolog of NCBI NO: 20808968 NR Description: Amino acid transporters [Thermoanaerobacter
  misc_feature (474)..(551): Homolog of NCBI NO: 37521235 NR Description: probable amino acid transporter [Gloeobacter
  misc_feature (46)..(427): Homolog of NCBI NO: 37521235 NR Description: probable amino acid transporter [Gloeobacter
  misc_feature (466)..(561): Homolog of NCBI NO: 17546307 NR Description: PROBABLE AMINO-ACID TRANSPORTER TRANSMEMBRANE
  misc_feature (30)..(426): Homolog of NCBI NO: 17546307 NR Description: PROBABLE AMINO-ACID TRANSPORTER TRANSMEMBRANE
  misc_feature (185)..(558): Homolog of NCBI NO: 14140148 NR Description: putative protein [Oryza sativa]
  misc_feature (1)..(349): Homolog of NCBI NO: 14140148 NR Description: putative protein [Oryza sativa]
  misc_feature (83)..(558): Homolog of NCBI NO: 25406885 NR Description: hypothetical protein [imported] - Arabidopsis
  misc_feature (7)..(558): Homolog of NCBI NO: 18390592 NR Description: expressed protein [Arabidopsis thaliana]
  misc_feature (227)..(227): Xaa is any aa, unknown or other
MDGEDAHHRPSSSSSSGGPFLSGLCAAALRRKPISARASAAASGEGLVRQLGVLELVLLGIGASIGAGIFVITGTGARDAGPGVTISFALAGAACVLNALCYAELASRFPAVVGGAYLYTYAAFNELTAFLVFTQLMLDYHIGAASIARSLASYFIQFLELIPSVKGNVPSWIGHGEEFFGGVVSVNILAPILLVILTVILCRGVKESSAVNTFMTTLKIIIVIVVXFAGVFEVDVSNWSPFMPNGFKAVVTGSTVVFFAYVGFDAVANSAEEAKNPQRDLPIGILGSLLACVILYVAVCLVITGMLPYTLLGEDAPLAEAFSAKGLKFVTVLISIGAVAGLTTTLLVGLYVQSRLYLGLGRDGLLPSIFSKVHPTLHTPLHSQIWVGCVAAVLAGLFNVHALSHILSVGTLTGYSVVSACVITLRWSDKATNSRSLGKFSIWQEGVFCLVIVALCGFIAGISYRFSYSIAFIIIAFLIATVGSFSLLFRQVYVPVDPPRFSCPGVPMVPIVSVFFNMFLFAQLHEEAWYRFVILSLIAVGVYAGYGQYNAVPSTSDHSSVAYHGVPSEAP

SEQ ID NO: 67936 - protein, 435 aa, Triticum aestivum
  peptide (1)..(435): Ceres Seq. ID no. 15221837
  misc_feature (55)..(220): Pfam Name: Spore germination protein Pfam Description: Spore germination protein
  misc_feature (338)..(416): Homolog of NCBI NO: 20808968 NR Description: Amino acid transporters [Thermoanaerobacter
  misc_feature (1)..(292): Homolog of NCBI NO: 20808968 NR Description: Amino acid transporters [Thermoanaerobacter
  misc_feature (338)..(415): Homolog of NCBI NO: 37521235 NR Description: probable amino acid transporter [Gloeobacter
  misc_feature (1)..(291): Homolog of NCBI NO: 37521235 NR Description: probable amino acid transporter [Gloeobacter
  misc_feature (330)..(425): Homolog of NCBI NO: 17546307 NR Description: PROBABLE AMINO-ACID TRANSPORTER TRANSMEMBRANE
  misc_feature (1)..(290): Homolog of NCBI NO: 17546307 NR Description: PROBABLE AMINO-ACID TRANSPORTER TRANSMEMBRANE
  misc_feature (49)..(422): Homolog of NCBI NO: 14140148 NR Description: putative protein [Oryza sativa]
  misc_feature (1)..(213): Homolog of NCBI NO: 14140148 NR Description: putative protein [Oryza sativa]
  misc_feature (1)..(422): Homolog of NCBI NO: 25406885 NR Description: hypothetical protein [imported] - Arabidopsis
  misc_feature (1)..(422): Homolog of NCBI NO: 18390592 NR Description: expressed protein [Arabidopsis thaliana]
  misc_feature (91)..(91): Xaa is any aa, unknown or other
MLDYHIGAASIARSLASYFIQFLELIPSVKGNVPSWIGHGEEFFGGVVSVNILAPILLVILTVILCRGVKESSAVNTFMTTLKIIIVIVVXFAGVFEVDVSNWSPFMPNGFKAVVTGSTVVFFAYVGFDAVANSAEEAKNPQRDLPIGILGSLLACVILYVAVCLVITGMLPYTLLGEDAPLAEAFSAKGLKFVTVLISIGAVAGLTTTLLVGLYVQSRLYLGLGRDGLLPSIFSKVHPTLHTPLHSQIWVGCVAAVLAGLFNVHALSHILSVGTLTGYSVVSACVITLRWSDKATNSRSLGKFSIWQEGVFCLVIVALCGFIAGISYRFSYSIAFIIIAFLIATVGSFSLLFRQVYVPVDPPRFSCPGVPMVPIVSVFFNMFLFAQLHEEAWYRFVILSLIAVGVYAGYGQYNAVPSTSDHSSVAYHGVPSEAP

SEQ ID NO: 67937 - DNA, 1154 bp, Triticum aestivum
  misc_feature (1)..(1154): Ceres Seq. ID no. 12614145
atcccctcccccattcccttctcccccctcccactccgccatggcctccttcgtttccgcctcctccaccaccacagcactcctctgctccgcccctcccgcctcccgcggcgggctcgtggtggcgtgggcggccccggcccggcgcgcgctcgcggctcctctgcgcgcggcagcggcgcaggggtcggccaactccgcgccggtcatgatggagagcaaggtcaagaagaggaacaagaagggcgccggcgccgggggcctccccgccgccatcgacgtcgagatccgggaggccgagcagtacctcgccaccgacgggcaggaacctactccagaagacttcccctttgaaatggttgatgaagatgggatgagcgtggttattctgaaaagggactacaaggatgagaagattgaggtcattgtcagcatgcctaacgtggaaggggatcctgagtttgatgaagatgacgagggcgatgatgaggatgctgccaaggacgatgacgatgaagatgaggacggccaagaaagtagcctttctatgaaggtgatagtctccaaggaatctggcccgaacctcgagttcacctgcacagccttccacgaggagatcaccattgacgacatgatgatagcagagaaaacagagtctgattcagagaaattcccctttgagggccctgagttcaccgagcttcctccgaacgtgcagaagggcctgttcaagttcctggaggtacgaggtgtgacgctgacgaccaccaacttcatgcacgattacatgattaccaagcagaccaaggagtacgtccggtggatgaccaagctcaagggtttggttcagtagtgacgttgaacagatggccttgccccgtgactcgacagcaaaatttggtagtgtagccttctagcacgcgtagcaagagcactaagaaccctgcaaaaccagtagtttgaagtgtatctgtagtcctgtatcagcagctagctaggcagagtgagttccatttgtgttcttctggagctggccggtgaaaatcctgtaggaaggtggttactagtagcgatgaaacaagacttcctgagcttaatacaagctgtgtttctgatacttttatgcttaaatatatccggtaatgactgttgtt

SEQ ID NO: 67938 - protein, 283 aa, Triticum aestivum
  peptide (1)..(283): Ceres Seq. ID no. 12614146
  misc_feature (92)..(282): Pfam Name: Mitochondrial glycoprotein Pfam Description: Mitochondrial glycoprotein
  misc_feature (61)..(283): Homolog of NCBI NO: 21592321 NR Description: unknown [Arabidopsis thaliana]
  misc_feature (61)..(283): Homolog of NCBI NO: 15241669 NR Description: putative protein
  misc_feature (92)..(283): Homolog of NCBI NO: 21593469 NR Description: unknown [Arabidopsis thaliana]
  misc_feature (92)..(283): Homolog of NCBI NO: 18405164 NR Description: Expressed protein
  misc_feature (92)..(283): Homolog of NCBI NO: 7487698 NR Description: hypothetical protein At2g39790 [imported] -
  misc_feature (80)..(283): Homolog of NCBI NO: 15239320 NR Description: putative protein
  misc_feature (92)..(283): Homolog of NCBI NO: 18410318 NR Description: Expressed protein
  misc_feature (29)..(283): Homolog of NCBI NO: 11357566 NR Description: hypothetical protein F1I16.10 - Arabidopsis
  misc_feature (14)..(283): Homolog of NCBI NO: 34895730 NR Description: P0019D06.23 [Oryza sativa (japonica
  misc_feature (16)..(283): Homolog of NCBI NO: 34895742 NR Description: P0019D06.29 [Oryza sativa (japonica
SPPPFPSPPSHSAMASFVSASSTTTALLCSAPPASRGGLVVAWAAPARRALAAPLRAAAAQGSANSAPVMMESKVKKRNKKGAGAGGLPAAIDVEIREAEQYLATDGQEPTPEDFPFEMVDEDGMSVVILKRDYKDEKIEVIVSMPNVEGDPEFDEDDEGDDEDAAKDDDDEDEDGQESSLSMKVIVSKESGPNLEFTCTAFHEEITIDDMMIAEKTESDSEKFPFEGPEFTELPPNVQKGLFKFLEVRGVTLTTTNFMHDYMITKQTKEYVRWMTKLKGLVQ

SEQ ID NO: 67939 - protein, 270 aa, Triticum aestivum
  peptide (1)..(270): Ceres Seq. ID no. 12614147
  misc_feature (79)..(269): Pfam Name: Mitochondrial glycoprotein Pfam Description: Mitochondrial glycoprotein
  misc_feature (48)..(270): Homolog of NCBI NO: 21592321 NR Description: unknown [Arabidopsis thaliana]
  misc_feature (48)..(270): Homolog of NCBI NO: 15241669 NR Description: putative protein
  misc_feature (79)..(270): Homolog of NCBI NO: 21593469 NR Description: unknown [Arabidopsis thaliana]
  misc_feature (79)..(270): Homolog of NCBI NO: 18405164 NR Description: Expressed protein
  misc_feature (79)..(270): Homolog of NCBI NO: 7487698 NR Description: hypothetical protein At2g39790 [imported] -
  misc_feature (67)..(270): Homolog of NCBI NO: 15239320 NR Description: putative protein
  misc_feature (79)..(270): Homolog of NCBI NO: 18410318 NR Description: Expressed protein
  misc_feature (16)..(270): Homolog of NCBI NO: 11357566 NR Description: hypothetical protein F1I16.10 - Arabidopsis
  misc_feature (1)..(270): Homolog of NCBI NO: 34895730 NR Description: P0019D06.23 [Oryza sativa (japonica
  misc_feature (3)..(270): Homolog of NCBI NO: 34895742 NR Description: P0019D06.29 [Oryza sativa (japonica
MASFVSASSTTTALLCSAPPASRGGLVVAWAAPARRALAAPLRAAAAQGSANSAPVMMESKVKKRNKKGAGAGGLPAAIDVEIREAEQYLATDGQEPTPEDFPFEMVDEDGMSVVILKRDYKDEKIEVIVSMPNVEGDPEFDEDDEGDDEDAAKDDDDEDEDGQESSLSMKVIVSKESGPNLEFTCTAFHEEITIDDMMIAEKTESDSEKFPFEGPEFTELPPNVQKGLFKFLEVRGVTLTTTNFMHDYMITKQTKEYVRWMTKLKGLVQ

SEQ ID NO: 67940 - protein, 214 aa, Triticum aestivum
  peptide (1)..(214): Ceres Seq. ID no. 12614148
  misc_feature (23)..(213): Pfam Name: Mitochondrial glycoprotein Pfam Description: Mitochondrial glycoprotein
  misc_feature (1)..(214): Homolog of NCBI NO: 21592321 NR Description: unknown [Arabidopsis thaliana]
  misc_feature (1)..(214): Homolog of NCBI NO: 15241669 NR Description: putative protein
  misc_feature (23)..(214): Homolog of NCBI NO: 21593469 NR Description: unknown [Arabidopsis thaliana]
  misc_feature (23)..(214): Homolog of NCBI NO: 18405164 NR Description: Expressed protein
  misc_feature (23)..(214): Homolog of NCBI NO: 7487698 NR Description: hypothetical protein At2g39790 [imported] -
  misc_feature (11)..(214): Homolog of NCBI NO: 15239320 NR Description: putative protein
  misc_feature (23)..(214): Homolog of NCBI NO: 18410318 NR Description: Expressed protein
  misc_feature (1)..(214): Homolog of NCBI NO: 11357566 NR Description: hypothetical protein F1I16.10 - Arabidopsis
  misc_feature (1)..(214): Homolog of NCBI NO: 34895730 NR Description: P0019D06.23 [Oryza sativa (japonica
  misc_feature (1)..(214): Homolog of NCBI NO: 34895742 NR Description: P0019D06.29 [Oryza sativa (japonica
MMESKVKKRNKKGAGAGGLPAAIDVEIREAEQYLATDGQEPTPEDFPFEMVDEDGMSVVILKRDYKDEKIEVIVSMPNVEGDPEFDEDDEGDDEDAAKDDDDEDEDGQESSLSMKVIVSKESGPNLEFTCTAFHEEITIDDMMIAEKTESDSEKFPFEGPEFTELPPNVQKGLFKFLEVRGVTLTTTNFMHDYMITKQTKEYVRWMTKLKGLVQ

SEQ ID NO: 67941 - DNA, 1486 bp, Triticum aestivum
  misc_feature (1)..(1486): Ceres Seq. ID no. 13596180
agagttcagaacactgccactgaaacacagaagcaaatatgcagagcaccgtcgtgctttacacatggatggtcaggggccacctccaccccatgacacagttcgcccaccatctcgccgcacatggcgttcctgtcaccgtcgccgtcgccgacgtcccgtctataggcaagtcctctgagaccattgccggcctcgccgcatcctatccttccgtctccttccacctactcccgccgtcggcgacccgttccgcccagacggctgaccccgatgccgatccattcatcgcccttgtcgccgacctccgcgccaccaactctgccctcctcgccttcctgaggcccctcccgtccctcaaggctctagtcaccgacttcttctgcgcctacgggtttgatgccgccgcagagctcggcgtcccggcctaccttttcttcacctccgctgcgtcggtccttgctgcctacctgcacatccccgtcatgcgctccactgtctccttccgggacatggggcgctccctgctgcacttccccggagtccacccaattccggcgtctgacttgccggaagtgctgctcgaccgcggcgacagccagtacaagacaatccttagccttatggagcagctgccaagatctaagggcattctgtcgaacacgttcgagtggctggagccccgcgccgtcaaggcgataaaagacgggactccctgtcccggcgagtcagtaccgaaactgttctgcgtcggtccattggtcggcgaggagaggggaagcgccgtgaagcacgaatgcctgagatggctagacaagcagccagcgcggagcgtggtattcctctgcttcgggagcgcgagctcggtgcccgcagagcagttaaaggagatcgccgtgggactggagaagagcgggcacgcgttcttatgggccgtgcgagcgcccgttgcgccggacgccgacgcgacgaagcggttcgaggggcgggccgaggcggcggtggagccgctgctgccggagggattcttggacaggacgaggggacgcgggatggtggtttcctcctgggcgccgcaagtggaggtgctccggcacccggcgaccggcgcgttcgtgacgcattgcggatggaactcgacgctagagggtgttgtagccggggtgccgatgctgtgctggcccatgtacgcggagcagaggatgaacaaggtgttcgtcgtggaggagatgaaactcggggtggccatgagcggctacgacgaggggatagttaaagcggatgaggtagaggggaaggtgagactgatcatggagtccgagcaaggggaggagatcagggaacggatgacgatggcacaagtgattgctgccaatgcgctggaaagcggtggatcttcggcggcagcatttgttgacttcgtggataatctgaagatttcgatattcgattgaatcgttgactctgtagtggaattttcaaactg

SEQ ID NO: 67942 - protein, 471 aa, Triticum aestivum
  peptide (1)..(471): Ceres Seq. ID no. 15221792
  misc_feature (5)..(469): Pfam Name: UDP-glucoronosyl and UDP-glucosyl transferase Pfam Description: UDP-glucoronosyl and UDP-glucosyl transferase
  misc_feature (1)..(454): Homolog of NCBI NO: 2501494 NR Description: Flavonol 3-O-glucosyltransferase 5 (UDP-glucose
  misc_feature (15)..(462): Homolog of NCBI NO: 19911209 NR Description: glucosyltransferase-13 [Vigna angularis]
  misc_feature (2)..(464): Homolog of NCBI NO: 18401158 NR Description: glycosyltransferase family [Arabidopsis thaliana]
  misc_feature (2)..(464): Homolog of NCBI NO: 21593785 NR Description: putative glucosyltransferase [Arabidopsis
  misc_feature (5)..(464): Homolog of NCBI NO: 22535568 NR Description: putative glucosyltransferase
  misc_feature (1)..(466): Homolog of NCBI NO: 34910206 NR Description: putative flavonol glucosyltransferase
  misc_feature (1)..(465): Homolog of NCBI NO: 34910222 NR Description: putative flavonol glucosyltransferase
  misc_feature (1)..(469): Homolog of NCBI NO: 34910204 NR Description: putative flavonol glucosyltransferase
  misc_feature (1)..(468): Homolog of NCBI NO: 34910228 NR Description: putative flavonol glucosyltransferase
  misc_feature (1)..(469): Homolog of NCBI NO: 34910218 NR Description: putative flavonol glucosyltransferase
MQSTVVLYTWMVRGHLHPMTQFAHHLAAHGVPVTVAVADVPSIGKSSETIAGLAASYPSVSFHLLPPSATRSAQTADPDADPFIALVADLRATNSALLAFLRPLPSLKALVTDFFCAYGFDAAAELGVPAYLFFTSAASVLAAYLHIPVMRSTVSFRDMGRSLLHFPGVHPIPASDLPEVLLDRGDSQYKTILSLMEQLPRSKGILSNTFEWLEPRAVKAIKDGTPCPGESVPKLFCVGPLVGEERGSAVKHECLRWLDKQPARSVVFLCFGSASSVPAEQLKEIAVGLEKSGHAFLWAVRAPVAPDADATKRFEGRAEAAVEPLLPEGFLDRTRGRGMVVSSWAPQVEVLRHPATGAFVTHCGWNSTLEGVVAGVPMLCWPMYAEQRMNKVFVVEEMKLGVAMSGYDEGIVKADEVEGKVRLIMESEQGEEIRERMTMAQVIAANALESGGSSAAAFVDFVDNLKISIFD

SEQ ID NO: 67943 - protein, 461 aa, Triticum aestivum
  peptide (1)..(461): Ceres Seq. ID no. 15221793
  misc_feature (1)..(459): Pfam Name: UDP-glucoronosyl and UDP-glucosyl transferase Pfam Description: UDP-glucoronosyl and UDP-glucosyl transferase
  misc_feature (1)..(444): Homolog of NCBI NO: 2501494 NR Description: Flavonol 3-O-glucosyltransferase 5 (UDP-glucose
  misc_feature (5)..(452): Homolog of NCBI NO: 19911209 NR Description: glucosyltransferase-13 [Vigna angularis]
  misc_feature (1)..(454): Homolog of NCBI NO: 18401158 NR Description: glycosyltransferase family [Arabidopsis thaliana]
  misc_feature (1)..(454): Homolog of NCBI NO: 21593785 NR Description: putative glucosyltransferase [Arabidopsis
  misc_feature (1)..(454): Homolog of NCBI NO: 22535568 NR Description: putative glucosyltransferase
  misc_feature (1)..(456): Homolog of NCBI NO: 34910206 NR Description: putative flavonol glucosyltransferase
  misc_feature (1)..(455): Homolog of NCBI NO: 34910222 NR Description: putative flavonol glucosyltransferase
  misc_feature (1)..(459): Homolog of NCBI NO: 34910204 NR Description: putative flavonol glucosyltransferase
  misc_feature (1)..(458): Homolog of NCBI NO: 34910228 NR Description: putative flavonol glucosyltransferase
  misc_feature (1)..(459): Homolog of NCBI NO: 34910218 NR Description: putative flavonol glucosyltransferase
MVRGHLHPMTQFAHHLAAHGVPVTVAVADVPSIGKSSETIAGLAASYPSVSFHLLPPSATRSAQTADPDADPFIALVADLRATNSALLAFLRPLPSLKALVTDFFCAYGFDAAAELGVPAYLFFTSAASVLAAYLHIPVMRSTVSFRDMGRSLLHFPGVHPIPASDLPEVLLDRGDSQYKTILSLMEQLPRSKGILSNTFEWLEPRAVKAIKDGTPCPGESVPKLFCVGPLVGEERGSAVKHECLRWLDKQPARSVVFLCFGSASSVPAEQLKEIAVGLEKSGHAFLWAVRAPVAPDADATKRFEGRAEAAVEPLLPEGFLDRTRGRGMVVSSWAPQVEVLRHPATGAFVTHCGWNSTLEGVVAGVPMLCWPMYAEQRMNKVFVVEEMKLGVAMSGYDEGIVKADEVEGKVRLIMESEQGEEIRERMTMAQVIAANALESGGSSAAAFVDFVDNLKISIFD

SEQ ID NO: 67944 - protein, 453 aa, Triticum aestivum
  peptide (1)..(453): Ceres Seq. ID no. 15221794
  misc_feature (1)..(451): Pfam Name: UDP-glucoronosyl and UDP-glucosyl transferase Pfam Description: UDP-glucoronosyl and UDP-glucosyl transferase
  misc_feature (1)..(436): Homolog of NCBI NO: 2501494 NR Description: Flavonol 3-O-glucosyltransferase 5 (UDP-glucose
  misc_feature (1)..(444): Homolog of NCBI NO: 19911209 NR Description: glucosyltransferase-13 [Vigna angularis]
  misc_feature (1)..(446): Homolog of NCBI NO: 18401158 NR Description: glycosyltransferase family [Arabidopsis thaliana]
  misc_feature (1)..(446): Homolog of NCBI NO: 21593785 NR Description: putative glucosyltransferase [Arabidopsis
  misc_feature (1)..(446): Homolog of NCBI NO: 22535568 NR Description: putative glucosyltransferase
  misc_feature (1)..(448): Homolog of NCBI NO: 34910206 NR Description: putative flavonol glucosyltransferase
  misc_feature (1)..(447): Homolog of NCBI NO: 34910222 NR Description: putative flavonol glucosyltransferase
  misc_feature (1)..(451): Homolog of NCBI NO: 34910204 NR Description: putative flavonol glucosyltransferase
  misc_feature (1)..(450): Homolog of NCBI NO: 34910228 NR Description: putative flavonol glucosyltransferase
  misc_feature (1)..(451): Homolog of NCBI NO: 34910218 NR Description: putative flavonol glucosyltransferase
MTQFAHHLAAHGVPVTVAVADVPSIGKSSETIAGLAASYPSVSFHLLPPSATRSAQTADPDADPFIALVADLRATNSALLAFLRPLPSLKALVTDFFCAYGFDAAAELGVPAYLFFTSAASVLAAYLHIPVMRSTVSFRDMGRSLLHFPGVHPIPASDLPEVLLDRGDSQYKTILSLMEQLPRSKGILSNTFEWLEPRAVKAIKDGTPCPGESVPKLFCVGPLVGEERGSAVKHECLRWLDKQPARSVVFLCFGSASSVPAEQLKEIAVGLEKSGHAFLWAVRAPVAPDADATKRFEGRAEAAVEPLLPEGFLDRTRGRGMVVSSWAPQVEVLRHPATGAFVTHCGWNSTLEGVVAGVPMLCWPMYAEQRMNKVFVVEEMKLGVAMSGYDEGIVKADEVEGKVRLIMESEQGEEIRERMTMAQVIAANALESGGSSAAAFVDFVDNLKISIFD

SEQ ID NO: 67945 - DNA, 523 bp, Triticum aestivum
  misc_feature (1)..(523): Ceres Seq. ID no. 12584310
atcggacctgcccagaccagccaacagtgagctagctagctagcgagatgagagttgcggtggtgggcggcggggtgagcgggctgacggcggcacaggagctcgcggcgagcggtggcgcacgtgtcaccgtgtacgagaaggaggactggcttggagggggtgccaggaccgtggccgtcggtgacggcccctgcctcgtccgcctcgacctttgccccatggtcttcaagcaggcaacatgccccaacatgatgcaatggttagagttgcttggggtggagattgaaagatcggagttatctttctcagtgagcacaaaattggataacggcagacaatgcgaatggagcactagcaatggtatctcgagcctttttgcacaaaagagcaatgcattgaggcctagcttttggtgcactatccgtgagatactcaagttcaagagtgatgtgcttaggtacctgnagtatcatgaaaaataaccatcatcttggccgaaatgaaactttggggcagtttg

SEQ ID NO: 67946 - protein, 145 aa, Triticum aestivum
  peptide (1)..(145): Ceres Seq. ID no. 12584311
  misc_feature (10)..(140): Pfam Name: Flavin containing amine oxidoreductase Pfam Description: Flavin containing amine oxidoreductase
  misc_feature (1)..(144): Homolog of NCBI NO: 39997425 NR Description: conserved hypothetical protein [Geobacter
  misc_feature (1)..(132): Homolog of NCBI NO: 28868333 NR Description: amine oxidase, flavin-containing
  misc_feature (1)..(132): Homolog of NCBI NO: 23470137 NR Description: hypothetical protein [Pseudomonas syringae pv.
  misc_feature (1)..(145): Homolog of NCBI NO: 21069167 NR Description: cyclopropane synthase [Sterculia foetida]
  misc_feature (63)..(145): Homolog of NCBI NO: 34393848 NR Description: putative cyclopropane synthase
  misc_feature (1)..(140): Homolog of NCBI NO: 30687094 NR Description: cyclopropane-fatty-acyl-phospholipid synthase
  misc_feature (1)..(140): Homolog of NCBI NO: 11994312 NR Description: contains similarity to cyclopropane fatty acid
  misc_feature (1)..(140): Homolog of NCBI NO: 22331288 NR Description: unknown protein
  misc_feature (1)..(140): Homolog of NCBI NO: 18086398 NR Description: AT3g23510/MEE5_5 [Arabidopsis thaliana]
  misc_feature (1)..(140): Homolog of NCBI NO: 9294509 NR Description: mycolic acid methyl transferase-like protein
  misc_feature (141)..(141): Xaa is any aa, unknown or other
MRVAVVGGGVSGLTAAQELAASGGARVTVYEKEDWLGGGARTVAVGDGPCLVRLDLCPMVFKQATCPNMMQWLELLGVEIERSELSFSVSTKLDNGRQCEWSTSNGISSLFAQKSNALRPSFWCTIREILKFKSDVLRYLXYHEK

SEQ ID NO: 67947 - protein, 87 aa, Triticum aestivum
  peptide (1)..(87): Ceres Seq. ID no. 12584312
  misc_feature (1)..(82): Pfam Name: Flavin containing amine oxidoreductase Pfam Description: Flavin containing amine oxidoreductase
  misc_feature (1)..(86): Homolog of NCBI NO: 39997425 NR Description: conserved hypothetical protein [Geobacter
  misc_feature (1)..(74): Homolog of NCBI NO: 28868333 NR Description: amine oxidase, flavin-containing
  misc_feature (1)..(74): Homolog of NCBI NO: 23470137 NR Description: hypothetical protein [Pseudomonas syringae pv.
  misc_feature (1)..(87): Homolog of NCBI NO: 21069167 NR Description: cyclopropane synthase [Sterculia foetida]
  misc_feature (5)..(87): Homolog of NCBI NO: 34393848 NR Description: putative cyclopropane synthase
  misc_feature (1)..(82): Homolog of NCBI NO: 30687094 NR Description: cyclopropane-fatty-acyl-phospholipid synthase
  misc_feature (1)..(82): Homolog of NCBI NO: 11994312 NR Description: contains similarity to cyclopropane fatty acid
  misc_feature (1)..(82): Homolog of NCBI NO: 22331288 NR Description: unknown protein
  misc_feature (1)..(82): Homolog of NCBI NO: 18086398 NR Description: AT3g23510/MEE5_5 [Arabidopsis thaliana]
  misc_feature (1)..(82): Homolog of NCBI NO: 9294509 NR Description: mycolic acid methyl transferase-like protein
  misc_feature (83)..(83): Xaa is any aa, unknown or other
MVFKQATCPNMMQWLELLGVEIERSELSFSVSTKLDNGRQCEWSTSNGISSLFAQKSNALRPSFWCTIREILKFKSDVLRYLXYHEK

SEQ ID NO: 67948 - protein, 77 aa, Triticum aestivum
  peptide (1)..(77): Ceres Seq. ID no. 12584313
  misc_feature (1)..(72): Pfam Name: Flavin containing amine oxidoreductase Pfam Description: Flavin containing amine oxidoreductase
  misc_feature (1)..(76): Homolog of NCBI NO: 39997425 NR Description: conserved hypothetical protein [Geobacter
  misc_feature (1)..(64): Homolog of NCBI NO: 28868333 NR Description: amine oxidase, flavin-containing
  misc_feature (1)..(64): Homolog of NCBI NO: 23470137 NR Description: hypothetical protein [Pseudomonas syringae pv.
  misc_feature (1)..(77): Homolog of NCBI NO: 21069167 NR Description: cyclopropane synthase [Sterculia foetida]
  misc_feature (1)..(77): Homolog of NCBI NO: 34393848 NR Description: putative cyclopropane synthase
  misc_feature (1)..(72): Homolog of NCBI NO: 30687094 NR Description: cyclopropane-fatty-acyl-phospholipid synthase
  misc_feature (1)..(72): Homolog of NCBI NO: 11994312 NR Description: contains similarity to cyclopropane fatty acid
  misc_feature (1)..(72): Homolog of NCBI NO: 22331288 NR Description: unknown protein
  misc_feature (1)..(72): Homolog of NCBI NO: 18086398 NR Description: AT3g23510/MEE5_5 [Arabidopsis thaliana]
  misc_feature (1)..(72): Homolog of NCBI NO: 9294509 NR Description: mycolic acid methyl transferase-like protein
  misc_feature (73)..(73): Xaa is any aa, unknown or other
MMQWLELLGVEIERSELSFSVSTKLDNGRQCEWSTSNGISSLFAQKSNALRPSFWCTIREILKFKSDVLRYLXYHEK

SEQ ID NO: 67949 - DNA, 720 bp, Triticum aestivum
  misc_feature (1)..(720): Ceres Seq. ID no. 12584327
cgaaaagcaacaagggcagctcgcatttcgccgctcaccgagccctcgaggcgcgctatccatggccacgtactacccttccggcgcctccgcgctcctgctccccgtcccgcgaacccgcgccgcctttccgcagatgtttcccggtccggcttccgggaggagctctccctgtgcagctgttcggccgcagcggaggggaagggaagcggtgggcgtcgtgcgagcatgcttcaatcctttcggggacgaacgcatcctccgggaggccttgaaggagccagttgcattcatgggtggcgtgtttgctggtctcttgaggcttgacctgaatgaggatcctctcaaggagtgggtaactcgaacggtagaggcttctggaatagctgaagagaatagtgctgaggaatcaaatgagggagctcaaaatgatggaccccaacaaattgagattgagtgagtgtcatggaatattgttaccaggagaaagctatggatactgccattttgctaggtcaatgagcaatgaagtcttgccaccaatattttcaaactgggagaaacataggcttgcgtgtcttgacatgacagtgcagacaatggtgttattttacaagccttgacaattcatgcttgttcagcactgtacctttatcaagattgtcttcagcactgtacttttttcactgttcgattccagtttcctcagttggttcgggt

SEQ ID NO: 67950 - protein, 152 aa, Triticum aestivum
  peptide (1)..(152): Ceres Seq. ID no. 12584328
  misc_feature (86)..(152): Homolog of NCBI NO: 16331273 NR Description: unknown protein [Synechocystis sp. PCC 6803]
  misc_feature (86)..(152): Homolog of NCBI NO: 23040751 NR Description: hypothetical protein [Trichodesmium erythraeum
  misc_feature (76)..(152): Homolog of NCBI NO: 21553386 NR Description: unknown [Arabidopsis thaliana]
  misc_feature (76)..(152): Homolog of NCBI NO: 18396668 NR Description: expressed protein
  misc_feature (27)..(152): Homolog of NCBI NO: 21742078 NR Description: OSJNBa0074L08.1 [Oryza sativa (japonica
EKQQGQLAFRRSPSPRGALSMATYYPSGASALLLPVPRTRAAFPQMFPGPASGRSSPCAAVRPQRRGREAVGVVRACFNPFGDERILREALKEPVAFMGGVFAGLLRLDLNEDPLKEWVTRTVEASGIAEENSAEESNEGAQNDGPQQIEIE

SEQ ID NO: 67951 - protein, 132 aa, Triticum aestivum
  peptide (1)..(132): Ceres Seq. ID no. 12584329
  misc_feature (66)..(132): Homolog of NCBI NO: 16331273 NR Description: unknown protein [Synechocystis sp. PCC 6803]
  misc_feature (66)..(132): Homolog of NCBI NO: 23040751 NR Description: hypothetical protein [Trichodesmium erythraeum
  misc_feature (56)..(132): Homolog of NCBI NO: 21553386 NR Description: unknown [Arabidopsis thaliana]
  misc_feature (56)..(132): Homolog of NCBI NO: 18396668 NR Description: expressed protein
  misc_feature (7)..(132): Homolog of NCBI NO: 21742078 NR Description: OSJNBa0074L08.1 [Oryza sativa (japonica
MATYYPSGASALLLPVPRTRAAFPQMFPGPASGRSSPCAAVRPQRRGREAVGVVRACFNPFGDERILREALKEPVAFMGGVFAGLLRLDLNEDPLKEWVTRTVEASGIAEENSAEESNEGAQNDGPQQIEIE

SEQ ID NO: 67952 - protein, 108 aa, Triticum aestivum
  peptide (1)..(108): Ceres Seq. ID no. 12584330
RKATRAARISPLTEPSRRAIHGHVLPFRRLRAPAPRPANPRRLSADVSRSGFREELSLCSCSAAAEGKGSGGRRASMLQSFRGRTHPPGGLEGASCIHGWRVCWSLEA

SEQ ID NO: 67953 - DNA, 980 bp, Triticum aestivum
  misc_feature (1)..(980): Ceres Seq. ID no. 13583037
cccgattacttcagccgccggccgccgccactgccgccagcctcggccagagcttctccgtcccctacccctacagaccgcgatctcgtcctgaaccaccggccgcgactgctgctccgcttgctctcccccgtcggagatccgcccggagcgactttcgtctttctgggtagtgccgacgctacagaaagcccaaacccggaaacagagaagacgacgccacatctacatttgcactcccacgcttaaagccggaggcggcgtaggaagcagcgatagccatggcgtcgtcgttggcaacggcaccggctgctgtacgtgaaatgcagagcgaccttgagtcccaggccaacgccctcagcaagatccagaaagacatctccaagaaccacgaggtccgcaagcagttcaccatccaggtcggcgagaatgaactcgtcctcaaggagctggagctgctgaatgaaggggcaaacgtgtacaagctgattgggccagtgttggtcaagcaggacaatgcagaggcgaaggccaacatcaagaagcgcatcgagtacatcacggctgagctagagagaatggatcgggcgctcaaggacttggaggagaaacagaatagcaagaaggaatcgataatcaagctgcaacagaagatgcaggctgtacaagcgaaggctcaggcgtaaatgaagggttccctgcattagggcctttgtcctcccaaatgttgggtcgtgttatctatcccctaaaaaggtgaaagaaatctgtagtgttcagagattgagagaagttcaaggtttgtgtagtgagagattttgtttgggagtggatacttggttgaagatgtacctcttgctggtttctagtaatatgcttgaaatgacttttattttgagaaggaattggatcaatcttttcatgtaccattttatttcttctatctttgcttatgttgattaatagattcatttttagcg

SEQ ID NO: 67954 - protein, 134 aa, Triticum aestivum
  peptide (1)..(134): Ceres Seq. ID no. 13583038
  misc_feature (19)..(126): Pfam Name: KE2 family protein Pfam Description: KE2 family protein
  misc_feature (20)..(134): Homolog of NCBI NO: 17506717 NR Description: KE2 family protein (14.7 kD) [Caenorhabditis
  misc_feature (20)..(134): Homolog of NCBI NO: 39582756 NR Description: Hypothetical protein CBG21902 [Caenorhabditis
  misc_feature (10)..(130): Homolog of NCBI NO: 24667085 NR Description: CG7770-PA [Drosophila melanogaster]
  misc_feature (15)..(130): Homolog of NCBI NO: 6754128 NR Description: H2-K region expressed gene 2 [Mus musculus]
  misc_feature (15)..(132): Homolog of NCBI NO: 27704620 NR Description: similar to H2-K region expressed gene 2
  misc_feature (15)..(134): Homolog of NCBI NO: 7657162 NR Description: HLA class II region expressed gene KE2; KE2
  misc_feature (15)..(134): Homolog of NCBI NO: 33585747 NR Description: Unknown (protein for MGC:66282) [Danio rerio]
  misc_feature (10)..(97): Homolog of NCBI NO: 25403096 NR Description: probable hydrophilic protein, 29542-30030
  misc_feature (10)..(134): Homolog of NCBI NO: 26450257 NR Description: unknown protein [Arabidopsis thaliana]
  misc_feature (10)..(134): Homolog of NCBI NO: 30691134 NR Description: hydrophilic protein -related [Arabidopsis
MASSLATAPAAVREMQSDLESQANALSKIQKDISKNHEVRKQFTIQVGENELVLKELELLNEGANVYKLIGPVLVKQDNAEAKANIKKRIEYITAELERMDRALKDLEEKQNSKKESIIKLQQKMQAVQAKAQA

SEQ ID NO: 67955 - protein, 120 aa, Triticum aestivum
  peptide (1)..(120): Ceres Seq. ID no. 13583039
  misc_feature (5)..(112): Pfam Name: KE2 family protein Pfam Description: KE2 family protein
  misc_feature (6)..(120): Homolog of NCBI NO: 17506717 NR Description: KE2 family protein (14.7 kD) [Caenorhabditis
  misc_feature (6)..(120): Homolog of NCBI NO: 39582756 NR Description: Hypothetical protein CBG21902 [Caenorhabditis
  misc_feature (1)..(116): Homolog of NCBI NO: 24667085 NR Description: CG7770-PA [Drosophila melanogaster]
  misc_feature (1)..(116): Homolog of NCBI NO: 6754128 NR Description: H2-K region expressed gene 2 [Mus musculus]
  misc_feature (1)..(118): Homolog of NCBI NO: 27704620 NR Description: similar to H2-K region expressed gene 2
  misc_feature (1)..(120): Homolog of NCBI NO: 7657162 NR Description: HLA class II region expressed gene KE2; KE2
  misc_feature (1)..(120): Homolog of NCBI NO: 33585747 NR Description: Unknown (protein for MGC:66282) [Danio rerio]
  misc_feature (1)..(83): Homolog of NCBI NO: 25403096 NR Description: probable hydrophilic protein, 29542-30030
  misc_feature (1)..(120): Homolog of NCBI NO: 26450257 NR Description: unknown protein [Arabidopsis thaliana]
  misc_feature (1)..(120): Homolog of NCBI NO: 30691134 NR Description: hydrophilic protein -related [Arabidopsis
MQSDLESQANALSKIQKDISKNHEVRKQFTIQVGENELVLKELELLNEGANVYKLIGPVLVKQDNAEAKANIKKRIEYITAELERMDRALKDLEEKQNSKKESIIKLQQKMQAVQAKAQA

SEQ ID NO: 67956 - protein, 82 aa, Triticum aestivum
  peptide (1)..(82): Ceres Seq. ID no. 13583040
PDYFSRRPPPLPPASARASPSPTPTDRDLVLNHRPRLLLRLLSPVGDPPGATFVFLGSADATESPNPETEKTTPHLHLHSHA

SEQ ID NO: 67957 - DNA, 1126 bp, Triticum aestivum
  misc_feature (1)..(1126): Ceres Seq. ID no. 14302493
ccccccagctccaaccagccagaccatccaaccaacgccgcaccgcaacaacaaccgccgcgcacgcgccgagcacggtcgaacacttgccatggctcccaagaacgcgctccccgtcgccgtcgccgccgccgcggacgccggcatggagcccaggttccgcggcgtgcgcaagcggccgtggggcaggtacgcggcggagatccgcgacccggccaggaaggcccgcgtctggctcggcaccttcgacaccgccgaggccgcggcccgcgcctacgacgccgccgcgctccactaccgcgggcccaaggccaagaccaacttccccgtcggcaccgtcgccgccttcgcccacgtcccgctcccgccgcccaaggcgctggccgtcagccccagcagcagcaccgtcgagtcttcgtcccgggacacgccggccgcggcgcccgccgctcctgctgctgctgcccccgcgcccccgccggcgctcgacctgagcctggcgatgccggccatggtggcggcgcagccgttcctgttcctggaccccagggtcgcggtgaccgtggccgtggccgcgccggcgccggccccctgccggtcagcggcgatcagcggcatgaacaaggtggcgtcccgcgaggaagagcagagcgacaccgggtcgtcgtcatccgtggtggacgcctcgccggccgtgggcgtggggttcgacctgaacctgccgccgccggtggagatggcgtaggagatggaccgatctcggtcgcccgatgacgacgcggcccggaagtaaagcaaagcgctctcgtggtagaatttaaagtttagaagaatggcgtgtacttactagtaagaggttaatcggccgtttaattgccaggatcgatccatcgatgggtaagggtaagtaggtgtacatagatcgcgtgcgtgcgttttttgcatggggaggcaggtaggatgaaacacatccatctatctgctcccaatgttacttacaatttccttaaaagcaagggaaaaaaagacaaaaaggaagaagccagtagtagagcattttgttcttcagtgtacaatatttgatctctgtctctcggattaatgtgaaatttatgatttccattcc

SEQ ID NO: 67958 - protein, 257 aa, Triticum aestivum
  peptide (1)..(257): Ceres Seq. ID no. 14302494
  misc_feature (38)..(202): Pfam Name: Progesterone receptor Pfam Description: Progesterone receptor
PPSSNQPDHPTNAAPQQQPPRTRRARSNTCHGSQERAPRRRRRRRGRRHGAQVPRRAQAAVGQVRGGDPRPGQEGPRLARHLRHRRGRGPRLRRRRAPLPRAQGQDQLPRRHRRRLRPRPAPAAQGAGRQPQQQHRRVFVPGHAGRGARRSCCCCPRAPAGARPEPGDAGHGGGAAVPVPGPQGRGDRGRGRAGAGPLPVSGDQRHEQGGVPRGRAERHRVVVIRGGRLAGRGRGVRPEPAAAGGDGVGDGPISVAR

SEQ ID NO: 67959 - protein, 247 aa, Triticum aestivum
  peptide (1)..(247): Ceres Seq. ID no. 14302495
  misc_feature (50)..(109): Pfam Name: AP2 domain Pfam Description: AP2 domain
  misc_feature (42)..(204): Homolog of NCBI NO: 33519168 NR Description: AP2 domain-containing protein AP29
  misc_feature (50)..(166): Homolog of NCBI NO: 20340233 NR Description: ethylene responsive element binding factor 4-like
  misc_feature (26)..(247): Homolog of NCBI NO: 4587373 NR Description: ethylene responsive element binding factor
  misc_feature (51)..(163): Homolog of NCBI NO: 32488388 NR Description: OSJNBa0043A12.18 [Oryza sativa (japonica
  misc_feature (50)..(227): Homolog of NCBI NO: 2281635 NR Description: AP2 domain containing protein RAP2.5 [Arabidopsis
  misc_feature (31)..(233): Homolog of NCBI NO: 4099921 NR Description: EREBP-3 homolog [Stylosanthes hamata]
  misc_feature (22)..(245): Homolog of NCBI NO: 34908900 NR Description: ethylene-responsive element binding factor 3
  misc_feature (50)..(247): Homolog of NCBI NO: 15232526 NR Description: ethylene responsive element binding factor 4
  misc_feature (31)..(177): Homolog of NCBI NO: 4099914 NR Description: ethylene-responsive element binding protein
  misc_feature (31)..(247): Homolog of NCBI NO: 38345793 NR Description: OSJNBa0085I10.10 [Oryza sativa (japonica
PPAPTSQTIQPTPHRNNNRRARAEHGRTLAMAPKNALPVAVAAAADAGMEPRFRGVRKRPWGRYAAEIRDPARKARVWLGTFDTAEAAARAYDAAALHYRGPKAKTNFPVGTVAAFAHVPLPPPKALAVSPSSSTVESSSRDTPAAAPAAPAAAAPAPPPALDLSLAMPAMVAAQPFLFLDPRVAVTVAVAAPAPAPCRSAAISGMNKVASREEEQSDTGSSSSVVDASPAVGVGFDLNLPPPVEMA

SEQ ID NO: 67960 - protein, 217 aa, Triticum aestivum
  peptide (1)..(217): Ceres Seq. ID no. 14302496
  misc_feature (20)..(79): Pfam Name: AP2 domain Pfam Description: AP2 domain
  misc_feature (12)..(174): Homolog of NCBI NO: 33519168 NR Description: AP2 domain-containing protein AP29
  misc_feature (20)..(136): Homolog of NCBI NO: 20340233 NR Description: ethylene responsive element binding factor 4-like
  misc_feature (1)..(217): Homolog of NCBI NO: 4587373 NR Description: ethylene responsive element binding factor
  misc_feature (21)..(133): Homolog of NCBI NO: 32488388 NR Description: OSJNBa0043A12.18 [Oryza sativa (japonica
  misc_feature (20)..(197): Homolog of NCBI NO: 2281635 NR Description: AP2 domain containing protein RAP2.5 [Arabidopsis
  misc_feature (1)..(203): Homolog of NCBI NO: 4099921 NR Description: EREBP-3 homolog [Stylosanthes hamata]
  misc_feature (1)..(215): Homolog of NCBI NO: 34908900 NR Description: ethylene-responsive element binding factor 3
  misc_feature (20)..(217): Homolog of NCBI NO: 15232526 NR Description: ethylene responsive element binding factor 4
  misc_feature (1)..(147): Homolog of NCBI NO: 4099914 NR Description: ethylene-responsive element binding protein
  misc_feature (1)..(217): Homolog of NCBI NO: 38345793 NR Description: OSJNBa0085I10.10 [Oryza sativa (japonica
MAPKNALPVAVAAAADAGMEPRFRGVRKRPWGRYAAEIRDPARKARVWLGTFDTAEAAARAYDAAALHYRGPKAKTNFPVGTVAAFAHVPLPPPKALAVSPSSSTVESSSRDTPAAAPAAPAAAAPAPPPALDLSLAMPAMVAAQPFLFLDPRVAVTVAVAAPAPAPCRSAAISGMNKVASREEEQSDTGSSSSVVDASPAVGVGFDLNLPPPVEMA

SEQ ID NO: 67961 - DNA, 908 bp, Triticum aestivum
  misc_feature (1)..(908): Ceres Seq. ID no. 13591023
attcaaccatggaagccatggcgtcatcgtcgtcggcggctaagcctaagcccagcaccaccctccgcgtggccgccttcagcggctccctccgcaagggctcgtggcacggcggcctcatccgcgcggccgaggagctgtgcgaggagtccatcccggagctgcaaatcgaccacgtcgacatctccggcctgcccatgtccaacccggacctggagacggacgacggcgacggcttcccgccggacgtcgaggcgttccgggacagggtccgcgccgccgactgctttctcttcgcctcgcccgagtacaactactccgtgaccgccacgctgaagaacgcgctggactgggcgtcgaggggcacgcacaagtgctgggcggacaaggccgcggccatcgtctccgcgggcggcagctgcggcgggggcagggcggcgttccacctccgccagatcggggtgttcctggacatccacttcatcaacaagccggagctccaggtcagggcgtacgaggacccgcccaagtttgacgccgacgggaacctcgtcgacgccgagacgagggagcggctcaagcaggtgctcctctcgctgcaggccttcgcgctccggctccagcactaactagcaggagcggaggactgagcgaagaagaaacttggcaccgtgcgattacctaaacgttaatctgcattttcctttgcgtgttggatatgtaggtacttttgactatttcactttcttttaggggttacttttcacttttgttgggcggaatacattttgctctgtattcgtgcaccagtctttatgtggttctgtaagaaagagtaagctgctgtaaacagtgtgtttgtaagaaatcacgcaagtaccctttttataaacgtttcgttaagtttt

SEQ ID NO: 67962 - protein, 208 aa, Triticum aestivum
  peptide (1)..(208): Ceres Seq. ID no. 13591024
  misc_feature (21)..(194): Pfam Name: NADPH-dependent FMN reductase Pfam Description: NADPH-dependent FMN reductase
  misc_feature (18)..(207): Homolog of NCBI NO: 15804310 NR Description: orf, hypothetical protein [Escherichia coli
  misc_feature (18)..(207): Homolog of NCBI NO: 16767134 NR Description: putative oxidoreductase [Salmonella typhimurium
  misc_feature (18)..(207): Homolog of NCBI NO: 26250454 NR Description: Hypothetical protein yieF [Escherichia coli
  misc_feature (18)..(208): Homolog of NCBI NO: 40549313 NR Description: YieF [Salmonella enterica]
  misc_feature (18)..(207): Homolog of NCBI NO: 15596401 NR Description: conserved hypothetical protein [Pseudomonas
  misc_feature (12)..(207): Homolog of NCBI NO: 24745889 NR Description: NAD(P)H:quinone oxidoreductase [Solanum tuberosum]
  misc_feature (21)..(207): Homolog of NCBI NO: 5002232 NR Description: NADPH:quinone oxidoreductase [Arabidopsis
  misc_feature (21)..(207): Homolog of NCBI NO: 15232856 NR Description: NADPH:quinone oxidoreductase (NQR) [Arabidopsis
  misc_feature (21)..(207): Homolog of NCBI NO: 34906652 NR Description: putative NADPH:quinone oxidoreductase
  misc_feature (12)..(207): Homolog of NCBI NO: 34906648 NR Description: putative NADPH:quinone oxidoreductase
STMEAMASSSSAAKPKPSTTLRVAAFSGSLRKGSWHGGLIRAAEELCEESIPELQIDHVDISGLPMSNPDLETDDGDGFPPDVEAFRDRVRAADCFLFASPEYNYSVTATLKNALDWASRGTHKCWADKAAAIVSAGGSCGGGRAAFHLRQIGVFLDIHFINKPELQVRAYEDPPKFDADGNLVDAETRERLKQVLLSLQAFALRLQH

SEQ ID NO: 67963 - protein, 206 aa, Triticum aestivum
  peptide (1)..(206): Ceres Seq. ID no. 13591025
  misc_feature (19)..(192): Pfam Name: NADPH-dependent FMN reductase Pfam Description: NADPH-dependent FMN reductase
  misc_feature (16)..(205): Homolog of NCBI NO: 15804310 NR Description: orf, hypothetical protein [Escherichia coli
  misc_feature (16)..(205): Homolog of NCBI NO: 16767134 NR Description: putative oxidoreductase [Salmonella typhimurium
  misc_feature (16)..(205): Homolog of NCBI NO: 26250454 NR Description: Hypothetical protein yieF [Escherichia coli
  misc_feature (16)..(206): Homolog of NCBI NO: 40549313 NR Description: YieF [Salmonella enterica]
  misc_feature (16)..(205): Homolog of NCBI NO: 15596401 NR Description: conserved hypothetical protein [Pseudomonas
  misc_feature (10)..(205): Homolog of NCBI NO: 24745889 NR Description: NAD(P)H:quinone oxidoreductase [Solanum tuberosum]
  misc_feature (19)..(205): Homolog of NCBI NO: 5002232 NR Description: NADPH:quinone oxidoreductase [Arabidopsis
  misc_feature (19)..(205): Homolog of NCBI NO: 15232856 NR Description: NADPH:quinone oxidoreductase (NQR) [Arabidopsis
  misc_feature (19)..(205): Homolog of NCBI NO: 34906652 NR Description: putative NADPH:quinone oxidoreductase
  misc_feature (10)..(205): Homolog of NCBI NO: 34906648 NR Description: putative NADPH:quinone oxidoreductase
MEAMASSSSAAKPKPSTTLRVAAFSGSLRKGSWHGGLIRAAEELCEESIPELQIDHVDISGLPMSNPDLETDDGDGFPPDVEAFRDRVRAADCFLFASPEYNYSVTATLKNALDWASRGTHKCWADKAAAIVSAGGSCGGGRAAFHLRQIGVFLDIHFINKPELQVRAYEDPPKFDADGNLVDAETRERLKQVLLSLQAFALRLQH

SEQ ID NO: 67964 - protein, 203 aa, Triticum aestivum
  peptide (1)..(203): Ceres Seq. ID no. 13591026
  misc_feature (16)..(189): Pfam Name: NADPH-dependent FMN reductase Pfam Description: NADPH-dependent FMN reductase
  misc_feature (13)..(202): Homolog of NCBI NO: 15804310 NR Description: orf, hypothetical protein [Escherichia coli
  misc_feature (13)..(202): Homolog of NCBI NO: 16767134 NR Description: putative oxidoreductase [Salmonella typhimurium
  misc_feature (13)..(202): Homolog of NCBI NO: 26250454 NR Description: Hypothetical protein yieF [Escherichia coli
  misc_feature (13)..(203): Homolog of NCBI NO: 40549313 NR Description: YieF [Salmonella enterica]
  misc_feature (13)..(202): Homolog of NCBI NO: 15596401 NR Description: conserved hypothetical protein [Pseudomonas
  misc_feature (7)..(202): Homolog of NCBI NO: 24745889 NR Description: NAD(P)H:quinone oxidoreductase [Solanum tuberosum]
  misc_feature (16)..(202): Homolog of NCBI NO: 5002232 NR Description: NADPH:quinone oxidoreductase [Arabidopsis
  misc_feature (16)..(202): Homolog of NCBI NO: 15232856 NR Description: NADPH:quinone oxidoreductase (NQR) [Arabidopsis
  misc_feature (16)..(202): Homolog of NCBI NO: 34906652 NR Description: putative NADPH:quinone oxidoreductase
  misc_feature (7)..(202): Homolog of NCBI NO: 34906648 NR Description: putative NADPH:quinone oxidoreductase
MASSSSAAKPKPSTTLRVAAFSGSLRKGSWHGGLIRAAEELCEESIPELQIDHVDISGLPMSNPDLETDDGDGFPPDVEAFRDRVRAADCFLFASPEYNYSVTATLKNALDWASRGTHKCWADKAAAIVSAGGSCGGGRAAFHLRQIGVFLDIHFINKPELQVRAYEDPPKFDADGNLVDAETRERLKQVLLSLQAFALRLQH

SEQ ID NO: 67965 - DNA, 748 bp, Triticum aestivum
  misc_feature (1)..(748): Ceres Seq. ID no. 12614157
atcttacctcgagcgaggcaaccggcagcagcctccgctgccagagtgccggtgggcgcgcgatgcaccagctttccctggccgcgcggccgccggcgccgcagtctcagtgttctcggagtaggacggcgtgccgctgtagcctgaagcaggcgcctgcctctctcgccgtggccgcaagacggtgcgctgccgcgccgctcttggccgcgtcgctcctcctcgccgccgccgccgcgtctcctggcattcctgccggtactccaccagcgtttgcccaatcccaaggcgcggcgctgttccggaaagcgtgcatcgggtgccacgacacgggagggaacatcctacagccgggcgccaccctctccatgaaggatcttgagaggaacggagttgccacggaggaagagatatacaacatcacttactacgggaagggaaggatgccgggttatggagagcaatgcacgccgagagggcagtgtaccttcggcccccggctgcctgaagaggatatcaagatgcttgcagcatttgtcaaatcgcaagcagagaacgggtggccaaagatcgacggtgatgtcgagtgatccgattagggttgaacacgaggtgctggctccatttcgcgaggaggctgaaaccataactgttgatgaggttaaattttttttttttttttgactcgcaaactgtagaacaattgttctaagtaattttatattaataaaatgaaaatagttattcg

SEQ ID NO: 67966 - protein, 195 aa, Triticum aestivum
  peptide (1)..(195): Ceres Seq. ID no. 12614158
  misc_feature (96)..(189): Homolog of NCBI NO: 117921 NR Description: Cytochrome C6 (Soluble cytochrome f) (Cytochrome
  misc_feature (87)..(187): Homolog of NCBI NO: 17227657 NR Description: cytochrome c6 [Nostoc sp. PCC 7120]
  misc_feature (84)..(187): Homolog of NCBI NO: 33862735 NR Description: Cytochrome c, class IC:Cytochrome c, class I
  misc_feature (69)..(187): Homolog of NCBI NO: 33866050 NR Description: cytochrome C6 (soluble cytochrome F) (cytochrome
  misc_feature (88)..(187): Homolog of NCBI NO: 23040173 NR Description: hypothetical protein [Trichodesmium erythraeum
  misc_feature (83)..(187): Homolog of NCBI NO: 22652035 NR Description: putative cytochrome c6-2 [Synechococcus sp. PCC
  misc_feature (123)..(193): Homolog of NCBI NO: 34393286 NR Description: cytochrome C6, chloroplast precursor-like protein
  misc_feature (95)..(193): Homolog of NCBI NO: 10177496 NR Description: gene_id:K21C13.23~unknown protein [Arabidopsis
  misc_feature (65)..(193): Homolog of NCBI NO: 18422509 NR Description: expressed protein
  misc_feature (21)..(193): Homolog of NCBI NO: 34899810 NR Description: putative c6 type cytochrome
LTSSEATGSSLRCQSAGGRAMHQLSLAARPPAPQSQCSRSRTACRCSLKQAPASLAVAARRCAAAPLLAASLLLAAAAASPGIPAGTPPAFAQSQGAALFRKACIGCHDTGGNILQPGATLSMKDLERNGVATEEEIYNITYYGKGRMPGYGEQCTPRGQCTFGPRLPEEDIKMLAAFVKSQAENGWPKIDGDVE

SEQ ID NO: 67967 - protein, 175 aa, Triticum aestivum
  peptide (1)..(175): Ceres Seq. ID no. 12614159
  misc_feature (76)..(169): Homolog of NCBI NO: 117921 NR Description: Cytochrome C6 (Soluble cytochrome f) (Cytochrome
  misc_feature (67)..(167): Homolog of NCBI NO: 17227657 NR Description: cytochrome c6 [Nostoc sp. PCC 7120]
  misc_feature (64)..(167): Homolog of NCBI NO: 33862735 NR Description: Cytochrome c, class IC:Cytochrome c, class I
  misc_feature (49)..(167): Homolog of NCBI NO: 33866050 NR Description: cytochrome C6 (soluble cytochrome F) (cytochrome
  misc_feature (68)..(167): Homolog of NCBI NO: 23040173 NR Description: hypothetical protein [Trichodesmium erythraeum
  misc_feature (63)..(167): Homolog of NCBI NO: 22652035 NR Description: putative cytochrome c6-2 [Synechococcus sp. PCC
  misc_feature (103)..(173): Homolog of NCBI NO: 34393286 NR Description: cytochrome C6, chloroplast precursor-like protein
  misc_feature (75)..(173): Homolog of NCBI NO: 10177496 NR Description: gene_id:K21C13.23~unknown protein [Arabidopsis
  misc_feature (45)..(173): Homolog of NCBI NO: 18422509 NR Description: expressed protein
  misc_feature (1)..(173): Homolog of NCBI NO: 34899810 NR Description: putative c6 type cytochrome
MHQLSLAARPPAPQSQCSRSRTACRCSLKQAPASLAVAARRCAAAPLLAASLLLAAAAASPGIPAGTPPAFAQSQGAALFRKACIGCHDTGGNILQPGATLSMKDLERNGVATEEEIYNITYYGKGRMPGYGEQCTPRGQCTFGPRLPEEDIKMLAAFVKSQAENGWPKIDGDVE

SEQ ID NO: 67968 - DNA, 596 bp, Triticum aestivum
  misc_feature (1)..(596): Ceres Seq. ID no. 13590767
gaacatcctaatcgaaaaactcaagccagcaagcaagaagcacacaggaagctcctagccaacaccaatcaaagcctccatccaatcccaagcaacctcgaggatgtcttgctgcggaggaaactgcggctgcggcagcgcctgcaagtgcggcaacggctgcggcggctgcaacatgtacccggaggttgaggccgccggcgccaccctcctcgtctccgccaccgccacccacaaggcgagctcgggcgggatggagatggcggcggagaacggcggctgcggctgcacccagtgcaagtgcggcaccagctgcggctgctcctgctgcagctgctagatctatcatcggtcatgcatgcaccgcgcgcatcatatctatgatctatctacaatctacttaccatgtaacgccacctgatcgagggtctttgtatgtatgtaagcacctgccagcatgagcagagcaggtgcactgccatgcatgtaaaccgacccctaaataaaatctcccgtggtttaaccagaaaaaaaaaaaaaaaaaagcttatcgataccgtcgacctcgagggggggmccggyacccarttcgccct

SEQ ID NO: 67969 - protein, 78 aa, Triticum aestivum
  peptide (1)..(78): Ceres Seq. ID no. 15221004
  misc_feature (1)..(78): Pfam Name: Metallothionein Pfam Description: Metallothionein
  misc_feature (1)..(78): Homolog of NCBI NO: 2497897 NR Description: Metallothionein-like protein type 2 B
  misc_feature (1)..(78): Homolog of NCBI NO: 3694984 NR Description: metallothionein-1-like protein [Pimpinella
  misc_feature (1)..(78): Homolog of NCBI NO: 541943 NR Description: metallothionein - soybean
  misc_feature (1)..(78): Homolog of NCBI NO: 2407331 NR Description: metallothionein-1 like protein [Oenanthe javanica]
  misc_feature (1)..(78): Homolog of NCBI NO: 5853156 NR Description: metallothionein-like protein [Ipomoea batatas]
  misc_feature (1)..(69): Homolog of NCBI NO: 100596 NR Description: metallothionein-like protein - barley
  misc_feature (1)..(78): Homolog of NCBI NO: 7441819 NR Description: metallothionein-like protein - rice
  misc_feature (1)..(78): Homolog of NCBI NO: 7441818 NR Description: metallothionein-like protein - rice
  misc_feature (1)..(78): Homolog of NCBI NO: 2497904 NR Description: Metallothionein-like protein type 2
  misc_feature (1)..(78): Homolog of NCBI NO: 23954355 NR Description: metallothioneine type2 [Hordeum vulgare subsp.
MSCCGGNCGCGSACKCGNGCGGCNMYPEVEAAGATLLVSATATHKASSGGMEMAAENGGCGCTQCKCGTSCGCSCCSC

SEQ ID NO: 67970 - protein, 63 aa, Triticum aestivum
  peptide (1)..(63): Ceres Seq. ID no. 15221005
EHPNRKTQASKQEAHRKLLANTNQSLHPIPSNLEDVLLRRKLRLRQRLQVRQRLRRLQHVPGG

SEQ ID NO: 67971 - protein, 54 aa, Triticum aestivum
  peptide (1)..(54): Ceres Seq. ID no. 15221006
  misc_feature (1)..(54): Pfam Name: Metallothionein Pfam Description: Metallothionein
  misc_feature (1)..(54): Homolog of NCBI NO: 2497897 NR Description: Metallothionein-like protein type 2 B
  misc_feature (1)..(54): Homolog of NCBI NO: 3694984 NR Description: metallothionein-1-like protein [Pimpinella
  misc_feature (1)..(54): Homolog of NCBI NO: 541943 NR Description: metallothionein - soybean
  misc_feature (1)..(54): Homolog of NCBI NO: 2407331 NR Description: metallothionein-1 like protein [Oenanthe javanica]
  misc_feature (1)..(54): Homolog of NCBI NO: 5853156 NR Description: metallothionein-like protein [Ipomoea batatas]
  misc_feature (1)..(45): Homolog of NCBI NO: 100596 NR Description: metallothionein-like protein - barley
  misc_feature (1)..(54): Homolog of NCBI NO: 7441819 NR Description: metallothionein-like protein - rice
  misc_feature (1)..(54): Homolog of NCBI NO: 7441818 NR Description: metallothionein-like protein - rice
  misc_feature (1)..(54): Homolog of NCBI NO: 2497904 NR Description: Metallothionein-like protein type 2
  misc_feature (1)..(54): Homolog of NCBI NO: 23954355 NR Description: metallothioneine type2 [Hordeum vulgare subsp.
MYPEVEAAGATLLVSATATHKASSGGMEMAAENGGCGCTQCKCGTSCGCSCCSC

SEQ ID NO: 67972 - DNA, 1060 bp, Triticum aestivum
  misc_feature (1)..(1060): Ceres Seq. ID no. 13596269
aaattcgatccgtaatagcgttttttcgcgtactcccgagaccccaatcttttccccctctcgtcgcatcggcggcggcgacaggacatcgggcggcggcggcggcggcggcggctggacagccgcagaacgaaggaagggctcccctgtagcgccgttcctcgtcccgatccgcacggatccgccccacctaagggccccgtgcacaaggagcaaagatgataaaccttttcaagatcaaggggcagaagaacgaagaggcagccaactcgaaaggggggcctcccgtcaagaagcaaagtcctggggaattacgtctccataaagatattgctgaacttaaccttccaaagacaactaaaatttcctttccaaatggaaaggatgatctcatgaactttgaagccactctacgacctgatgaaggatactacgtaggtgggacatttactttcaccttccaagtatctccttcctaccctcacgaggctctgaaggtcaagtgcaagaccaaggtttaccatcctaatattgacctagaaggaaatgtctgcctgaacattctgcgtgaagactggaagcctgtcttgaacatcaacaccataatatatggcttaaaccttcttttctcacaacccaatgacgaggaccccttgaatcatgaagccgcggccgtcctccgagacaacccacagaagttccagagaaatgttcaaacggcgatgtcgggaggctatgttgataacacccatttcccaaggtgcaagtaaggtctgctatgtggagctctggttccgactcttgcccagttgccctgaatgcccttgcacagtctgaaggatgtggcatgtacccaggaaatgtatcgcatttgtgttagacgtgactgttattatgcttgtttggtggatgtaccggagtcatgcatgttgaagaaacatgctaagcagaaacaaaaacctcgcctgttattcagctgaaaagttggcggaagtgttccaagcgcagcaatcatatgagcatataactgaattatgaaaaataaaagagtctctgggcc

SEQ ID NO: 67973 - protein, 183 aa, Triticum aestivum
  peptide (1)..(183): Ceres Seq. ID no. 13596270
  misc_feature (1)..(182): Homolog of NCBI NO: 30585323 NR Description: Homo sapiens ubiquitin-conjugating enzyme E2M
  misc_feature (1)..(182): Homolog of NCBI NO: 4507791 NR Description: ubiquitin-conjugating enzyme E2M (UBC12 homolog,
  misc_feature (1)..(182): Homolog of NCBI NO: 38174699 NR Description: Unknown (protein for MGC:75750) [Silurana
  misc_feature (30)..(182): Homolog of NCBI NO: 10946511 NR Description: RUB1 conjugating enzyme [Lycopersicon esculentum]
  misc_feature (1)..(182): Homolog of NCBI NO: 25407764 NR Description: ubiquitin-protein ligase-like protein
  misc_feature (1)..(182): Homolog of NCBI NO: 18398792 NR Description: RUB1-conjugating enzyme, putative [Arabidopsis
  misc_feature (1)..(182): Homolog of NCBI NO: 26000688 NR Description: RUB1 conjugating enzyme [Olea europaea]
  misc_feature (1)..(182): Homolog of NCBI NO: 6635457 NR Description: RUB1 conjugating enzyme [Arabidopsis thaliana]
  misc_feature (1)..(182): Homolog of NCBI NO: 37531910 NR Description: putative ubiquitin-conjugating enzyme
  misc_feature (1)..(182): Homolog of NCBI NO: 40253382 NR Description: putative RUB1 conjugating enzyme
MINLFKIKGQKNEEAANSKGGPPVKKQSPGELRLHKDIAELNLPKTTKISFPNGKDDLMNFEATLRPDEGYYVGGTFTFTFQVSPSYPHEALKVKCKTKVYHPNIDLEGNVCLNILREDWKPVLNINTIIYGLNLLFSQPNDEDPLNHEAAAVLRDNPQKFQRNVQTAMSGGYVDNTHFPRCK

SEQ ID NO: 67974 - protein, 125 aa, Triticum aestivum
  peptide (1)..(125): Ceres Seq. ID no. 13596271
  misc_feature (1)..(124): Homolog of NCBI NO: 30585323 NR Description: Homo sapiens ubiquitin-conjugating enzyme E2M
  misc_feature (1)..(124): Homolog of NCBI NO: 4507791 NR Description: ubiquitin-conjugating enzyme E2M (UBC12 homolog,
  misc_feature (1)..(124): Homolog of NCBI NO: 38174699 NR Description: Unknown (protein for MGC:75750) [Silurana
  misc_feature (1)..(124): Homolog of NCBI NO: 10946511 NR Description: RUB1 conjugating enzyme [Lycopersicon esculentum]
  misc_feature (1)..(124): Homolog of NCBI NO: 25407764 NR Description: ubiquitin-protein ligase-like protein
  misc_feature (1)..(124): Homolog of NCBI NO: 18398792 NR Description: RUB1-conjugating enzyme, putative [Arabidopsis
  misc_feature (1)..(124): Homolog of NCBI NO: 26000688 NR Description: RUB1 conjugating enzyme [Olea europaea]
  misc_feature (1)..(124): Homolog of NCBI NO: 6635457 NR Description: RUB1 conjugating enzyme [Arabidopsis thaliana]
  misc_feature (1)..(124): Homolog of NCBI NO: 37531910 NR Description: putative ubiquitin-conjugating enzyme
  misc_feature (1)..(124): Homolog of NCBI NO: 40253382 NR Description: putative RUB1 conjugating enzyme
MNFEATLRPDEGYYVGGTFTFTFQVSPSYPHEALKVKCKTKVYHPNIDLEGNVCLNILREDWKPVLNINTIIYGLNLLFSQPNDEDPLNHEAAAVLRDNPQKFQRNVQTAMSGGYVDNTHFPRCK

SEQ ID NO: 67975 - protein, 107 aa, Triticum aestivum
  peptide (1)..(107): Ceres Seq. ID no. 13596272
NSIRNSVFSRTPETPIFSPSRRIGGGDRTSGGGGGGGGWTAAERRKGSPVAPFLVPIRTDPPHLRAPCTRSKDDKPFQDQGAEERRGSQLERGASRQEAKSWGITSP

SEQ ID NO: 67976 - DNA, 1613 bp, Triticum aestivum
  misc_feature (1)..(1613): Ceres Seq. ID no. 13596321
atgatcgcctatttaagcttctcctgttctcgcccaccctgccccatcccattcccactctctcccagcagcggcggcagcggcacgtcgtcgtcctcctccccctcgccgtccgcgcgtccgtccaacagaggctgggaaccttaaagcggaacagggttcatggagggtggaggcgcaagaaatgtttctgcagcggcagcacagacaaaggaaagtgcggatgacggctcctgcaagccactgcctccttgctgtgtcaaggcgcaggctgctgtggcggaatctgaggccaagtgccacgctaccgtggtgtctgggtggttcacaggaacccggtcacgctctggcaaaccaagcaaagcgcagtacttcaacaatccaatgtggcctggggaggctcattcgttgaaagtagagaagattttgtaccaggggaaatcgccataccaagaagttttagtatttgagtcttcaacctatgggaatgtccttgtgcttgatggaattgttcagctcactgacaaggatgaatgtgcataccaggaaatggttactcaccttgcactgtgctcaattccatctcctaaaaatgttttggttgtcggaggtggtgatggtggtgtactacgagaaatagccaagcatgattcagtggagagtatagacatatgtgagattgatcagctagttattgatgtttgtaaagattttttcccacgtctatatgttggatataaagaccctcgtgtcaaacttcatgttggtgatgctgtggagttcttgagaaactctccagaaggaaaatatgatgccattattgttgattcatcagatccaattgggccagctcaggaacttgtggagaagcccttttttcagacaattgctagggctttaaagcctggcggtgttctttctaatctagctgaaagtatgtggctgcacacacatctaatccaggatatgctttctatctgtcgagaggtattcaagggtggcgtgcactatgcctgggcaagtgttccaacatatcctagtggtgtcattggatttttgctatgtgcgaaggaaggtccaccggtggacttcttaactcctgtgaatccaatcgagaaaattgaaggagctactaaagatggacgagagatgagattttacaattcagagattcataaggctgcttttattctgccaacgtttgtaaagagggagctggaggcatataactcttccactgaaaaggagagaccggagaagccaaccgcaaaaccagtgaagatgaaggtaatgcgggacagcgctattaccgcttcctagaccgcgggcggacacctgtgtgctatccatcttccccgatgagacccgccgcacctgtatatccacgttccacgcctgtcctttgctaccaaattttattcaatagttacatgattgtgtggtgctctagcatagttgcgtgacacaactgagggtgtaatatcactaaatgtgtatggtgtgttgcagttggtgaataaaggagcaaacagaaggggatgtgtgatgtgtttcccttatctgtaacatgtatgatgtttcattgttgcgtgagttctcgtggtgcaagtacc

SEQ ID NO: 67977 - protein, 385 aa, Triticum aestivum
  peptide (1)..(385): Ceres Seq. ID no. 13596322
  misc_feature (53)..(310): Pfam Name: Spermine/spermidine synthase Pfam Description: Spermine/spermidine synthase
  misc_feature (41)..(353): Homolog of NCBI NO: 6094329 NR Description: Spermidine synthase 2 (Putrescine
  misc_feature (73)..(354): Homolog of NCBI NO: 6094327 NR Description: Spermidine synthase 1 (Putrescine
  misc_feature (73)..(354): Homolog of NCBI NO: 6094335 NR Description: Spermidine synthase (Putrescine
  misc_feature (73)..(354): Homolog of NCBI NO: 6094330 NR Description: Spermidine synthase 2 (Putrescine
  misc_feature (1)..(358): Homolog of NCBI NO: 9757993 NR Description: spermidine synthase [Arabidopsis thaliana]
  misc_feature (22)..(358): Homolog of NCBI NO: 33150481 NR Description: putative spermine synthase [Lycopersicon
  misc_feature (17)..(358): Homolog of NCBI NO: 21592832 NR Description: spermidine synthase [Arabidopsis thaliana]
  misc_feature (1)..(358): Homolog of NCBI NO: 15983394 NR Description: AT5g53120/MFH8_5 [Arabidopsis thaliana]
  misc_feature (1)..(358): Homolog of NCBI NO: 18423473 NR Description: spermidine synthase [Arabidopsis thaliana]
  misc_feature (1)..(385): Homolog of NCBI NO: 33354149 NR Description: aminopropyl transferase [Oryza sativa (japonica
MEGGGARNVSAAAAQTKESADDGSCKPLPPCCVKAQAAVAESEAKCHATVVSGWFTGTRSRSGKPSKAQYFNNPMWPGEAHSLKVEKILYQGKSPYQEVLVFESSTYGNVLVLDGIVQLTDKDECAYQEMVTHLALCSIPSPKNVLVVGGGDGGVLREIAKHDSVESIDICEIDQLVIDVCKDFFPRLYVGYKDPRVKLHVGDAVEFLRNSPEGKYDAIIVDSSDPIGPAQELVEKPFFQTIARALKPGGVLSNLAESMWLHTHLIQDMLSICREVFKGGVHYAWASVPTYPSGVIGFLLCAKEGPPVDFLTPVNPIEKIEGATKDGREMRFYNSEIHKAAFILPTFVKRELEAYNSSTEKERPEKPTAKPVKMKVMRDSAITAS

SEQ ID NO: 67978 - protein, 311 aa, Triticum aestivum
  peptide (1)..(311): Ceres Seq. ID no. 13596323
  misc_feature (1)..(236): Pfam Name: Spermine/spermidine synthase Pfam Description: Spermine/spermidine synthase
  misc_feature (1)..(279): Homolog of NCBI NO: 6094329 NR Description: Spermidine synthase 2 (Putrescine
  misc_feature (1)..(280): Homolog of NCBI NO: 6094327 NR Description: Spermidine synthase 1 (Putrescine
  misc_feature (1)..(280): Homolog of NCBI NO: 6094335 NR Description: Spermidine synthase (Putrescine
  misc_feature (1)..(280): Homolog of NCBI NO: 6094330 NR Description: Spermidine synthase 2 (Putrescine
  misc_feature (1)..(284): Homolog of NCBI NO: 9757993 NR Description: spermidine synthase [Arabidopsis thaliana]
  misc_feature (1)..(284): Homolog of NCBI NO: 33150481 NR Description: putative spermine synthase [Lycopersicon
  misc_feature (1)..(284): Homolog of NCBI NO: 21592832 NR Description: spermidine synthase [Arabidopsis thaliana]
  misc_feature (1)..(284): Homolog of NCBI NO: 15983394 NR Description: AT5g53120/MFH8_5 [Arabidopsis thaliana]
  misc_feature (1)..(284): Homolog of NCBI NO: 18423473 NR Description: spermidine synthase [Arabidopsis thaliana]
  misc_feature (1)..(311): Homolog of NCBI NO: 33354149 NR Description: aminopropyl transferase [Oryza sativa (japonica
MWPGEAHSLKVEKILYQGKSPYQEVLVFESSTYGNVLVLDGIVQLTDKDECAYQEMVTHLALCSIPSPKNVLVVGGGDGGVLREIAKHDSVESIDICEIDQLVIDVCKDFFPRLYVGYKDPRVKLHVGDAVEFLRNSPEGKYDAIIVDSSDPIGPAQELVEKPFFQTIARALKPGGVLSNLAESMWLHTHLIQDMLSICREVFKGGVHYAWASVPTYPSGVIGFLLCAKEGPPVDFLTPVNPIEKIEGATKDGREMRFYNSEIHKAAFILPTFVKRELEAYNSSTEKERPEKPTAKPVKMKVMRDSAITAS

SEQ ID NO: 67979 - protein, 256 aa, Triticum aestivum
  peptide (1)..(256): Ceres Seq. ID no. 13596324
  misc_feature (1)..(181): Pfam Name: Spermine/spermidine synthase Pfam Description: Spermine/spermidine synthase
  misc_feature (1)..(224): Homolog of NCBI NO: 6094329 NR Description: Spermidine synthase 2 (Putrescine
  misc_feature (1)..(225): Homolog of NCBI NO: 6094327 NR Description: Spermidine synthase 1 (Putrescine
  misc_feature (1)..(225): Homolog of NCBI NO: 6094335 NR Description: Spermidine synthase (Putrescine
  misc_feature (1)..(225): Homolog of NCBI NO: 6094330 NR Description: Spermidine synthase 2 (Putrescine
  misc_feature (1)..(229): Homolog of NCBI NO: 9757993 NR Description: spermidine synthase [Arabidopsis thaliana]
  misc_feature (1)..(229): Homolog of NCBI NO: 33150481 NR Description: putative spermine synthase [Lycopersicon
  misc_feature (1)..(229): Homolog of NCBI NO: 21592832 NR Description: spermidine synthase [Arabidopsis thaliana]
  misc_feature (1)..(229): Homolog of NCBI NO: 15983394 NR Description: AT5g53120/MFH8_5 [Arabidopsis thaliana]
  misc_feature (1)..(229): Homolog of NCBI NO: 18423473 NR Description: spermidine synthase [Arabidopsis thaliana]
  misc_feature (1)..(256): Homolog of NCBI NO: 33354149 NR Description: aminopropyl transferase [Oryza sativa (japonica
MVTHLALCSIPSPKNVLVVGGGDGGVLREIAKHDSVESIDICEIDQLVIDVCKDFFPRLYVGYKDPRVKLHVGDAVEFLRNSPEGKYDAIIVDSSDPIGPAQELVEKPFFQTIARALKPGGVLSNLAESMWLHTHLIQDMLSICREVFKGGVHYAWASVPTYPSGVIGFLLCAKEGPPVDFLTPVNPIEKIEGATKDGREMRFYNSEIHKAAFILPTFVKRELEAYNSSTEKERPEKPTAKPVKMKVMRDSAITAS

SEQ ID NO: 67980 - DNA, 674 bp, Triticum aestivum
  misc_feature (1)..(674): Ceres Seq. ID no. 13654360
tttttttggttggttgatgcaaagttgcctagctacgcttgcagattaactatcaagccccatggtcgttgtcgtctacttataagcatccattgctggaccgtcagaccttcaagtagctaggagctccagttggtttgcttgctttgattggcgatgaacggtgcggcgctagacaacgtgatccggcggctgctggaggtgcggcgggggcggccggggaagcagcaagtgcagcaggtgcagctgggcgagggggagatccggcagctctgcgccgccgccaaggacgtcttcatgcgccagcccaacctgctccagctcgacgcccccatcaagatcgccggtgacatccacggtcagtacacggacctgctgcggctgtttgagctgggcggcttcccgccgcagcacaagtacctgttcctgggcgactacgtggaccgcggcaagcagagcatcgagaccatctgcctgctgctcgcctacaagctccggtacccggagcacttcttcctcctccgcggcaaccacgagtgcgcctccgtcaaccgcgtctacggcttctacgacgagtgcaagcgccgctactccgtccgtctctggcgccacttctccgactgcttcaactgcatgcccgtcgccgccctcgtcgagtcgcgcatcctctgcat

SEQ ID NO: 67981 - protein, 172 aa, Triticum aestivum
  peptide (1)..(172): Ceres Seq. ID no. 13654361
  misc_feature (58)..(171): Pfam Name: Calcineurin-like phosphoesterase Pfam Description: Calcineurin-like phosphoesterase
  misc_feature (1)..(64): Homolog of NCBI NO: 34902038 NR Description: putative SERINE/THREONINE PROTEIN PHOSPHATASE PP1
  misc_feature (64)..(171): Homolog of NCBI NO: 34902038 NR Description: putative SERINE/THREONINE PROTEIN PHOSPHATASE PP1
  misc_feature (1)..(171): Homolog of NCBI NO: 1346762 NR Description: SERINE/THREONINE PROTEIN PHOSPHATASE PP1
  misc_feature (1)..(171): Homolog of NCBI NO: 7435133 NR Description: phosphoprotein phosphatase (EC 3.1.3.16) 1
  misc_feature (1)..(171): Homolog of NCBI NO: 130709 NR Description: SERINE/THREONINE PROTEIN PHOSPHATASE PP1
  misc_feature (1)..(171): Homolog of NCBI NO: 15225576 NR Description: phosphoprotein phosphatase type 1 catalytic
  misc_feature (1)..(171): Homolog of NCBI NO: 1346753 NR Description: SERINE/THREONINE PROTEIN PHOSPHATASE PP1 ISOZYME
  misc_feature (1)..(171): Homolog of NCBI NO: 5053113 NR Description: phosphatase PP1 [Chlamydomonas reinhardtii]
  misc_feature (1)..(171): Homolog of NCBI NO: 25289017 NR Description: phosphoprotein phosphatase (EC 3.1.3.16) 1
  misc_feature (1)..(171): Homolog of NCBI NO: 15227080 NR Description: phosphoprotein phosphatase-type 1 catalytic
MNGAALDNVIRRLLEVRRGRPGKQQVQQVQLGEGEIRQLCAAAKDVFMRQPNLLQLDAPIKIAGDIHGQYTDLLRLFELGGFPPQHKYLFLGDYVDRGKQSIETICLLLAYKLRYPEHFFLLRGNHECASVNRVYGFYDECKRRYSVRLWRHFSDCFNCMPVAALVESRILC

SEQ ID NO: 67982 - protein, 125 aa, Triticum aestivum
  peptide (1)..(125): Ceres Seq. ID no. 13654362
  misc_feature (11)..(124): Pfam Name: Calcineurin-like phosphoesterase Pfam Description: Calcineurin-like phosphoesterase
  misc_feature (1)..(17): Homolog of NCBI NO: 34902038 NR Description: putative SERINE/THREONINE PROTEIN PHOSPHATASE PP1
  misc_feature (17)..(124): Homolog of NCBI NO: 34902038 NR Description: putative SERINE/THREONINE PROTEIN PHOSPHATASE PP1
  misc_feature (1)..(124): Homolog of NCBI NO: 1346762 NR Description: SERINE/THREONINE PROTEIN PHOSPHATASE PP1
  misc_feature (1)..(124): Homolog of NCBI NO: 7435133 NR Description: phosphoprotein phosphatase (EC 3.1.3.16) 1
  misc_feature (1)..(124): Homolog of NCBI NO: 130709 NR Description: SERINE/THREONINE PROTEIN PHOSPHATASE PP1
  misc_feature (1)..(124): Homolog of NCBI NO: 15225576 NR Description: phosphoprotein phosphatase type 1 catalytic
  misc_feature (1)..(124): Homolog of NCBI NO: 1346753 NR Description: SERINE/THREONINE PROTEIN PHOSPHATASE PP1 ISOZYME
  misc_feature (1)..(124): Homolog of NCBI NO: 5053113 NR Description: phosphatase PP1 [Chlamydomonas reinhardtii]
  misc_feature (1)..(124): Homolog of NCBI NO: 25289017 NR Description: phosphoprotein phosphatase (EC 3.1.3.16) 1
  misc_feature (1)..(124): Homolog of NCBI NO: 15227080 NR Description: phosphoprotein phosphatase-type 1 catalytic
MRQPNLLQLDAPIKIAGDIHGQYTDLLRLFELGGFPPQHKYLFLGDYVDRGKQSIETICLLLAYKLRYPEHFFLLRGNHECASVNRVYGFYDECKRRYSVRLWRHFSDCFNCMPVAALVESRILC

SEQ ID NO: 67983 - DNA, 1217 bp, Triticum aestivum
  misc_feature (1)..(1217): Ceres Seq. ID no. 12613701
aactgggaccaatgtgggcggttgtataaacgagtaggcgtgccgcacagagcaagcaagaggccgcgcgcagcacagtgccgcagccgctgcaagacgcaaagagagagccaagccttttccctttcggaaaggacagacagagtcgaggtaccgcggctagggatggggttcctcccgctgcttcaggtcgtcctcctggccgccgcggcggcggcgagggctccggcggcgcgggcgtggggcgaggagggccacttcatgacctgcaagatcgccgagggttttttgacgagcgaggcgtcggcggcggtgaaggggctcctgccggagtgggccaacggcgagctcgcggcggcgtgctcgtggccggacgccgtgcggcgccaaatgccgtggtccagctccctgcacttcgccgacacccccggcgactgcaagttcagctacgccagggactgccacggcacgaaaggggagaaggacatgtgcgtggtgggaggcatcaacaactacactgccgcgctccaagactcatcaagcccgtataatcggacggagagcctgctgttcctgtcgcacttcctgggcgacatccaccagcccatgcactgcggccgcaccgccgacctcggcggcaacaccatcgtcgtcacttggtacaacacgaccaagaccaaccttcacaaggtgtgggatgagaaggtcatcgaaacggccatgaacaggttctacaaggacgaccgaagcgccatgatccaggccatcaagctcaaccttaccaacgagtggtctaaagaagagaatcagtgggcggcgtgctatactcgaaccacaacctgtgctgacaagtacgcagaggagagtgcggagctgtcgtgccccgcgtacgtgggcgctgagcaaggctccaacttggaagatgagtacttcttctcggcgctcccggtggttcagaagaggattgcccagggaggcgtcaggctgggtgcgatcctcaaccagatcttcagtgggaagaacaacagcagcattcagagcagctaaggtccattagacgaaactaacgaatgagattgtgcaaggggttagcccaaacgttatgaaggagaataaggttatcatgttcgtctgaccatgttgacttcatactatgtaagtgagttggtcagtgcgtacttctgtaatcgaatccagtatttcctgaatgtgatgat

SEQ ID NO: 67984 - protein, 348 aa, Triticum aestivum
  peptide (1)..(348): Ceres Seq. ID no. 12613702
  misc_feature (62)..(337): Homolog of NCBI NO: 4099833 NR Description: bifunctional nuclease [Zinnia elegans]
  misc_feature (78)..(340): Homolog of NCBI NO: 18415729 NR Description: endonuclease, putative
  misc_feature (78)..(340): Homolog of NCBI NO: 22328857 NR Description: expressed protein; protein id: At4g21585.1
  misc_feature (76)..(337): Homolog of NCBI NO: 4099835 NR Description: bifunctional nuclease [Zinnia elegans]
  misc_feature (52)..(337): Homolog of NCBI NO: 34895514 NR Description: putative bifunctional nuclease
  misc_feature (52)..(337): Homolog of NCBI NO: 9558456 NR Description: unnamed protein product [Oryza sativa (japonica
  misc_feature (56)..(347): Homolog of NCBI NO: 7489371 NR Description: endonuclease (EC 3.1.30.-) precursor - barley
  misc_feature (56)..(347): Homolog of NCBI NO: 5672692 NR Description: nuclease I [Hordeum vulgare]
  misc_feature (56)..(347): Homolog of NCBI NO: 13274190 NR Description: putative nuclease [Hordeum vulgare subsp. vulgare]
  misc_feature (59)..(348): Homolog of NCBI NO: 38345900 NR Description: OSJNBa0060D06.10 [Oryza sativa (japonica
NWDQCGRLYKRVGVPHRASKRPRAAQCRSRCKTQRESQAFSLSERTDRVEVPRLGMGFLPLLQVVLLAAAAAARAPAARAWGEEGHFMTCKIAEGFLTSEASAAVKGLLPEWANGELAAACSWPDAVRRQMPWSSSLHFADTPGDCKFSYARDCHGTKGEKDMCVVGGINNYTAALQDSSSPYNRTESLLFLSHFLGDIHQPMHCGRTADLGGNTIVVTWYNTTKTNLHKVWDEKVIETAMNRFYKDDRSAMIQAIKLNLTNEWSKEENQWAACYTRTTTCADKYAEESAELSCPAYVGAEQGSNLEDEYFFSALPVVQKRIAQGGVRLGAILNQIFSGKNNSSIQSS

SEQ ID NO: 67985 - protein, 293 aa, Triticum aestivum
  peptide (1)..(293): Ceres Seq. ID no. 12613703
  misc_feature (7)..(282): Homolog of NCBI NO: 4099833 NR Description: bifunctional nuclease [Zinnia elegans]
  misc_feature (23)..(285): Homolog of NCBI NO: 18415729 NR Description: endonuclease, putative
  misc_feature (23)..(285): Homolog of NCBI NO: 22328857 NR Description: expressed protein; protein id: At4g21585.1
  misc_feature (21)..(282): Homolog of NCBI NO: 4099835 NR Description: bifunctional nuclease [Zinnia elegans]
  misc_feature (1)..(282): Homolog of NCBI NO: 34895514 NR Description: putative bifunctional nuclease
  misc_feature (1)..(282): Homolog of NCBI NO: 9558456 NR Description: unnamed protein product [Oryza sativa (japonica
  misc_feature (1)..(292): Homolog of NCBI NO: 7489371 NR Description: endonuclease (EC 3.1.30.-) precursor - barley
  misc_feature (1)..(292): Homolog of NCBI NO: 5672692 NR Description: nuclease I [Hordeum vulgare]
  misc_feature (1)..(292): Homolog of NCBI NO: 13274190 NR Description: putative nuclease [Hordeum vulgare subsp. vulgare]
  misc_feature (4)..(293): Homolog of NCBI NO: 38345900 NR Description: OSJNBa0060D06.10 [Oryza sativa (japonica
MGFLPLLQVVLLAAAAAARAPAARAWGEEGHFMTCKIAEGFLTSEASAAVKGLLPEWANGELAAACSWPDAVRRQMPWSSSLHFADTPGDCKFSYARDCHGTKGEKDMCVVGGINNYTAALQDSSSPYNRTESLLFLSHFLGDIHQPMHCGRTADLGGNTIVVTWYNTTKTNLHKVWDEKVIETAMNRFYKDDRSAMIQAIKLNLTNEWSKEENQWAACYTRTTTCADKYAEESAELSCPAYVGAEQGSNLEDEYFFSALPVVQKRIAQGGVRLGAILNQIFSGKNNSSIQSS

SEQ ID NO: 67986 - protein, 261 aa, Triticum aestivum
  peptide (1)..(261): Ceres Seq. ID no. 12613704
  misc_feature (1)..(250): Homolog of NCBI NO: 4099833 NR Description: bifunctional nuclease [Zinnia elegans]
  misc_feature (1)..(253): Homolog of NCBI NO: 18415729 NR Description: endonuclease, putative
  misc_feature (1)..(253): Homolog of NCBI NO: 22328857 NR Description: expressed protein; protein id: At4g21585.1
  misc_feature (1)..(250): Homolog of NCBI NO: 4099835 NR Description: bifunctional nuclease [Zinnia elegans]
  misc_feature (1)..(250): Homolog of NCBI NO: 34895514 NR Description: putative bifunctional nuclease
  misc_feature (1)..(250): Homolog of NCBI NO: 9558456 NR Description: unnamed protein product [Oryza sativa (japonica
  misc_feature (1)..(260): Homolog of NCBI NO: 7489371 NR Description: endonuclease (EC 3.1.30.-) precursor - barley
  misc_feature (1)..(260): Homolog of NCBI NO: 5672692 NR Description: nuclease I [Hordeum vulgare]
  misc_feature (1)..(260): Homolog of NCBI NO: 13274190 NR Description: putative nuclease [Hordeum vulgare subsp. vulgare]
  misc_feature (1)..(261): Homolog of NCBI NO: 38345900 NR Description: OSJNBa0060D06.10 [Oryza sativa (japonica
MTCKIAEGFLTSEASAAVKGLLPEWANGELAAACSWPDAVRRQMPWSSSLHFADTPGDCKFSYARDCHGTKGEKDMCVVGGINNYTAALQDSSSPYNRTESLLFLSHFLGDIHQPMHCGRTADLGGNTIVVTWYNTTKTNLHKVWDEKVIETAMNRFYKDDRSAMIQAIKLNLTNEWSKEENQWAACYTRTTTCADKYAEESAELSCPAYVGAEQGSNLEDEYFFSALPVVQKRIAQGGVRLGAILNQIFSGKNNSSIQSS

SEQ ID NO: 67987 - DNA, 1112 bp, Triticum aestivum
  misc_feature (1)..(1112): Ceres Seq. ID no. 13596325
tttttctttcaagcaagcaagcaagcaagcagaggagagggaccgggaccgggagtgagaggaagtcgagctcttttcttcgtcgacgctggtttttggcccctgactgctggtcgagatgtcgaagatggcggacgagaaggtgatttcggcgccggcgaccggcggaggagaggacgggctgatcgcaggggacctgtcagccacggaggcgcgtgtccgtccgttggagacgctgctgcgcgccgcgcctctggggctctgcgtcgccgccatggccgtcatgctccgcgacacgcagaccaacgagtacggcaccgtctcctactccgacctcggcggattcaagtacctggtttatgccaacgggctgtgcgcggcctactycctggtctccgcgttctacactgccgtgccgcggccggcgaccctgtcccgctcctggatcgtcttcctcctagatcaggtgttcacgtacctgatcctggcggccggcgcggcgtcggcagagctactctacctggcgtacaacggcgacaaggaggtgacgtggagcgaggcgtgcggcgtgttcggcggcttctgcaggcaggcccggacgtcggtggccatcaccttcggctccgtcgtctgctacatcctcctctccctcatctcgtcctaccgcctcttcagcgcctacgacgcacccatgccctcgctcggcaacaagggcgtcgagatcgctgccttcccgcgctgagccgagaggatccctagctgctgtgccttggctactcgatgacgggtcaaaactcaaaacacgtacgtacgtagtagtatcgctgtgtgtgtaggcgaacgaaataatctgtaagggctcatagttaatttcaagctacatatagtgcatctgcctctcttctttttactttattctatatataccgtactagctttgaatcttctgctgtgaggctgtggtggattcattgatgcgttccaaaaatgcgaacctagttccgttgcaggcacccaagtgatctatgtaactacgatgagcttcctaatttaaggagttcagttgcttgtaaggtgcttgaagcaaagcaaaatcaatactcttttcgttc

SEQ ID NO: 67988 - protein, 252 aa, Triticum aestivum
  peptide (1)..(252): Ceres Seq. ID no. 15221840
  misc_feature (129)..(129): Xaa is any aa, unknown or other
FFFQASKQASRGEGPGPGVRGSRALFFVDAGFWPLTAGRDVEDGGREGDFGAGDRRRRGRADRRGPVSHGGACPSVGDAAARRASGALRRRHGRHAPRHADQRVRHRLLLRPRRIQVPGLCQRAVRGLXPGLRVLHCRAAAGDPVPLLDRLPPRSGVHVPDPGGRRGVGRATLPGVQRRQGGDVERGVRRVRRLLQAGPDVGGHHLRLRRLLHPPLPHLVLPPLQRLRRTHALARQQGRRDRCLPALSREDP

SEQ ID NO: 67989 - protein, 207 aa, Triticum aestivum
  peptide (1)..(207): Ceres Seq. ID no. 15221841
  misc_feature (34)..(173): Pfam Name: Domain of unknown function (DUF588) Pfam Description: Domain of unknown function (DUF588)
  misc_feature (40)..(184): Homolog of NCBI NO: 15227576 NR Description: hypothetical integral membrane protein common
  misc_feature (17)..(188): Homolog of NCBI NO: 18403948 NR Description: expressed integral membrane protein common family
  misc_feature (31)..(190): Homolog of NCBI NO: 18414659 NR Description: expressed integral membrane protein common family
  misc_feature (37)..(197): Homolog of NCBI NO: 15240435 NR Description: expressed protein [Arabidopsis thaliana]
  misc_feature (27)..(191): Homolog of NCBI NO: 15231842 NR Description: expressed protein [Arabidopsis thaliana]
  misc_feature (65)..(205): Homolog of NCBI NO: 14030504 NR Description: salicylic acid-induced fragment 1 protein
  misc_feature (34)..(205): Homolog of NCBI NO: 16973324 NR Description: hypothetical protein [Gossypium hirsutum]
  misc_feature (14)..(205): Homolog of NCBI NO: 18394453 NR Description: expressed integral membrane protein common family
  misc_feature (1)..(205): Homolog of NCBI NO: 17380964 NR Description: unknown protein [Arabidopsis thaliana]
  misc_feature (4)..(207): Homolog of NCBI NO: 38344646 NR Description: OSJNBa0094P09.18 [Oryza sativa (japonica
  misc_feature (90)..(90): Xaa is any aa, unknown or other
MSKMADEKVISAPATGGGEDGLIAGDLSATEARVRPLETLLRAAPLGLCVAAMAVMLRDTQTNEYGTVSYSDLGGFKYLVYANGLCAAYXLVSAFYTAVPRPATLSRSWIVFLLDQVFTYLILAAGAASAELLYLAYNGDKEVTWSEACGVFGGFCRQARTSVAITFGSVVCYILLSLISSYRLFSAYDAPMPSLGNKGVEIAAFPR

SEQ ID NO: 67990 - protein, 204 aa, Triticum aestivum
  peptide (1)..(204): Ceres Seq. ID no. 15221842
  misc_feature (31)..(170): Pfam Name: Domain of unknown function (DUF588) Pfam Description: Domain of unknown function (DUF588)
  misc_feature (37)..(181): Homolog of NCBI NO: 15227576 NR Description: hypothetical integral membrane protein common
  misc_feature (14)..(185): Homolog of NCBI NO: 18403948 NR Description: expressed integral membrane protein common family
  misc_feature (28)..(187): Homolog of NCBI NO: 18414659 NR Description: expressed integral membrane protein common family
  misc_feature (34)..(194): Homolog of NCBI NO: 15240435 NR Description: expressed protein [Arabidopsis thaliana]
  misc_feature (24)..(188): Homolog of NCBI NO: 15231842 NR Description: expressed protein [Arabidopsis thaliana]
  misc_feature (62)..(202): Homolog of NCBI NO: 14030504 NR Description: salicylic acid-induced fragment 1 protein
  misc_feature (31)..(202): Homolog of NCBI NO: 16973324 NR Description: hypothetical protein [Gossypium hirsutum]
  misc_feature (11)..(202): Homolog of NCBI NO: 18394453 NR Description: expressed integral membrane protein common family
  misc_feature (1)..(202): Homolog of NCBI NO: 17380964 NR Description: unknown protein [Arabidopsis thaliana]
  misc_feature (1)..(204): Homolog of NCBI NO: 38344646 NR Description: OSJNBa0094P09.18 [Oryza sativa (japonica
  misc_feature (87)..(87): Xaa is any aa, unknown or other
MADEKVISAPATGGGEDGLIAGDLSATEARVRPLETLLRAAPLGLCVAAMAVMLRDTQTNEYGTVSYSDLGGFKYLVYANGLCAAYXLVSAFYTAVPRPATLSRSWIVFLLDQVFTYLILAAGAASAELLYLAYNGDKEVTWSEACGVFGGFCRQARTSVAITFGSVVCYILLSLISSYRLFSAYDAPMPSLGNKGVEIAAFPR

SEQ ID NO: 67991 - DNA, 1045 bp, Triticum aestivum
  misc_feature (1)..(1045): Ceres Seq. ID no. 13596373
aaaactcgcaaagcccgtagcaaactcgcaatctctcaaacaagctcatggccacctcggcgatcacatccccagcggcgccggaagcgacgctgcccctggccggccgcgtggccatcgtcaccggcgcgtcccgcgggatcgggcgcggcatcgcgacccacctgtcgtccctcggcgccagcctggtcctcgggtacgcctccagctctcagcaggcggacgcgctggccgctgagctcccgcgcgccgtggcggtgaaggccgacgtctcggacgaggcgggcgtccggtccctctttgacgccgcggagaccgccttcggcggcccggcgcacatcctcgtggcctgcgctggccagggcatcgggacctacccgtccctcgccaacaccgccacctcggacttcgacaacgtgttcgccgtgaacacccgaggtgcgtttctgtgcctgcgcgaggcggcgaaccggctgcaccgcgggggcgggggccggatcgtggccgtgtcctcgacgctggcggcgacgctgctccccggctacgcggcgtacgtggcgtctaaggcggccgtggaggcgatggtgcgggtggccgcgaaggagctcgggtcggcacgggtgacggtgaactgcatcgcgccggggccggtggcgacggagctcttcttcgacgggaagagcgaggaggcggtggagaggttcagggctgggcacccgatggggcggcttggggaggtcggcgacatcgcgcctgcggtggggttcctctgcaccgacgcggccgagtgggtgaacggccaggtcattcggctcaacggcggcattgcttaattcattggcgtggctgtcgctctgtttctccctttcaaacggatatctccgttttcttaaaaaattgctgtgcctgtttttttgttggaggattgtgattagctgcttttggtgcttgaataaagaagaaaacacaatgatatggtgtactccgtaaactattgtaggtgctcagagttgcatgtatcttttttatgaaagaagttgcacgc

SEQ ID NO: 67992 - protein, 261 aa, Triticum aestivum
  peptide (1)..(261): Ceres Seq. ID no. 13596374
  misc_feature (16)..(259): Homolog of NCBI NO: 1711355 NR Description: SHORT-CHAIN TYPE DEHYDROGENASE/REDUCTASE
  misc_feature (18)..(244): Homolog of NCBI NO: 30686710 NR Description: short-chain dehydrogenase/reductase family
  misc_feature (1)..(259): Homolog of NCBI NO: 30679011 NR Description: short-chain type dehydrogenase/reductase -related
  misc_feature (18)..(258): Homolog of NCBI NO: 9758903 NR Description: Brn1-like protein [Arabidopsis thaliana]
  misc_feature (7)..(259): Homolog of NCBI NO: 15229203 NR Description: short-chain dehydrogenase/reductase family
  misc_feature (14)..(259): Homolog of NCBI NO: 15235621 NR Description: short-chain dehydrogenase/reductase family
  misc_feature (10)..(261): Homolog of NCBI NO: 37534988 NR Description: putative short-chain alcohol dehydrogenase
  misc_feature (2)..(259): Homolog of NCBI NO: 34395019 NR Description: putative short-chain dehydrogenase/reductase
  misc_feature (2)..(259): Homolog of NCBI NO: 34393370 NR Description: putative short-chain dehydrogenase/reductase
  misc_feature (1)..(261): Homolog of NCBI NO: 34395018 NR Description: putative short-chain dehydrogenase/reductase
MATSAITSPAAPEATLPLAGRVAIVTGASRGIGRGIATHLSSLGASLVLGYASSSQQADALAAELPRAVAVKADVSDEAGVRSLFDAAETAFGGPAHILVACAGQGIGTYPSLANTATSDFDNVFAVNTRGAFLCLREAANRLHRGGGGRIVAVSSTLAATLLPGYAAYVASKAAVEAMVRVAAKELGSARVTVNCIAPGPVATELFFDGKSEEAVERFRAGHPMGRLGEVGDIAPAVGFLCTDAAEWVNGQVIRLNGGIA

SEQ ID NO: 67993 - DNA, 1297 bp, Triticum aestivum
  misc_feature (1)..(1297): Ceres Seq. ID no. 13654367
aacggagagaatggccggcgacgtcgcgcgcagggagctccgggcgcgcgtgggggcgatgccgtgggcggtgcggctccagctgcgcgcgctcgaggccgccgtcgacgccacgcagcgccgggacggcaccgtcaaccgcttcctcttctcgctgctcgtggaccgccaggcgcccgccaaccccgcgcgcgccgacgccgggggcgtccgctccgtggacgtcaccgtcgacgcgtccaccggcgtgcgggcccgcgtctactttacggccggggcgggggcggaggcagacgcgtcgccgcgccccgtgatcgtctacttccacggcggcggcttcacggtgttctccgcggccacccggccctacgacgagctctgccgcaccatgtgccgcgagacgggcgccgtcgtcgtgtccgtgacctaccgcctcgcgcccgagcaccgctaccccgcggcctacgacgacggggaggccgccctccggtacctcgccaccaccggcctgcccgccgaggtccccgtccgcgtcgacctctcccgctgcttcctcgccggcgacagcgccggcgccaacatcgcgcaccacgtggcccagcgctggacggcggcacccgcgacaacgcctccagccgtccacctcgccggcctcctgctcctgtcctcctacttcggcggagaggaccggaccgagtcggagcaagcgctggagggcgtggccccgatcgtgaacctccgccggtccgacttctggtggaaggcgtacttgccggagggcgccgaccgaaaccacccggccgcgcacgtgacgggcgaggccggcccggagccggagctgccggatgcgttcccgcgggcgatggtggtcgtcggcgggctcgacccgctccaggactgggggaggcggtacgccggcatgctgcgccggaagggcaaggaggtgcgcgtgatggagttcacggaggctgtacacgccttctacttcttcccggcgctgcccgagaccggcaagctcgtcgcggagatctcggcgttcgtggagagcaccgcgccgagctcgaccgcctagagaactagagacgatgattaggacaactcgtcgtggatctcgtacgtccccgtctctgctgatgttatattgttggctgatagcctatttcactgtcgaagtcgctgcgagcagccgcgtctgttaaattattacactgtggtgtataagttcgagttgccatctcgatattttctttgtgcaacatgtggcatgggtgatggggacatggcagtgatggcacct

SEQ ID NO: 67994 - protein, 359 aa, Triticum aestivum
  peptide (1)..(359): Ceres Seq. ID no. 13654368
  misc_feature (22)..(248): Pfam Name: HlyD family secretion protein Pfam Description: HlyD family secretion protein
  misc_feature (6)..(337): Homolog of NCBI NO: 23018788 NR Description: hypothetical protein [Thermobifida fusca]
  misc_feature (6)..(298): Homolog of NCBI NO: 23018055 NR Description: hypothetical protein [Thermobifida fusca]
NGENGRRRRAQGAPGARGGDAVGGAAPAARARGRRRRHAAPGRHRQPLPLLAARGPPGARQPRARRRRGRPLRGRHRRRVHRRAGPRLLYGRGGGGGRRVAAPRDRLLPRRRLHGVLRGHPALRRALPHHVPRDGRRRRVRDLPPRARAPLPRGLRRRGGRPPVPRHHRPARRGPRPRRPLPLLPRRRQRRRQHRAPRGPALDGGTRDNASSRPPRRPPAPVLLLRRRGPDRVGASAGGRGPDREPPPVRLLVEGVLAGGRRPKPPGRARDGRGRPGAGAAGCVPAGDGGRRRARPAPGLGEAVRRHAAPEGQGGARDGVHGGCTRLLLLPGAARDRQARRGDLGVRGEHRAELDRLEN

SEQ ID NO: 67995 - protein, 356 aa, Triticum aestivum
  peptide (1)..(356): Ceres Seq. ID no. 13654369
  misc_feature (103)..(147): Pfam Name: Carboxylesterase Pfam Description: Carboxylesterase
  misc_feature (12)..(349): Homolog of NCBI NO: 15229905 NR Description: expressed protein [Arabidopsis thaliana]
  misc_feature (4)..(349): Homolog of NCBI NO: 15240483 NR Description: expressed protein [Arabidopsis thaliana]
  misc_feature (20)..(356): Homolog of NCBI NO: 15237783 NR Description: expressed protein [Arabidopsis thaliana]
  misc_feature (20)..(356): Homolog of NCBI NO: 21618039 NR Description: unknown [Arabidopsis thaliana]
  misc_feature (14)..(348): Homolog of NCBI NO: 34904758 NR Description: hypothetical protein~predicted by GeneMark.hmm
  misc_feature (4)..(356): Homolog of NCBI NO: 34904760 NR Description: similar to carboxylesterase
  misc_feature (20)..(356): Homolog of NCBI NO: 34904774 NR Description: similar to carboxylesterase
  misc_feature (20)..(356): Homolog of NCBI NO: 34393714 NR Description: putative esterase [Oryza sativa (japonica
  misc_feature (2)..(352): Homolog of NCBI NO: 34904770 NR Description: similar to carboxylesterase
  misc_feature (4)..(356): Homolog of NCBI NO: 34904772 NR Description: similar to carboxylesterase
TERMAGDVARRELRARVGAMPWAVRLQLRALEAAVDATQRRDGTVNRFLFSLLVDRQAPANPARADAGGVRSVDVTVDASTGVRARVYFTAGAGAEADASPRPVIVYFHGGGFTVFSAATRPYDELCRTMCRETGAVVVSVTYRLAPEHRYPAAYDDGEAALRYLATTGLPAEVPVRVDLSRCFLAGDSAGANIAHHVAQRWTAAPATTPPAVHLAGLLLLSSYFGGEDRTESEQALEGVAPIVNLRRSDFWWKAYLPEGADRNHPAAHVTGEAGPEPELPDAFPRAMVVVGGLDPLQDWGRRYAGMLRRKGKEVRVMEFTEAVHAFYFFPALPETGKLVAEISAFVESTAPSSTA

SEQ ID NO: 67996 - protein, 353 aa, Triticum aestivum
  peptide (1)..(353): Ceres Seq. ID no. 13654370
  misc_feature (100)..(144): Pfam Name: Carboxylesterase Pfam Description: Carboxylesterase
  misc_feature (9)..(346): Homolog of NCBI NO: 15229905 NR Description: expressed protein [Arabidopsis thaliana]
  misc_feature (1)..(346): Homolog of NCBI NO: 15240483 NR Description: expressed protein [Arabidopsis thaliana]
  misc_feature (17)..(353): Homolog of NCBI NO: 15237783 NR Description: expressed protein [Arabidopsis thaliana]
  misc_feature (17)..(353): Homolog of NCBI NO: 21618039 NR Description: unknown [Arabidopsis thaliana]
  misc_feature (11)..(345): Homolog of NCBI NO: 34904758 NR Description: hypothetical protein~predicted by GeneMark.hmm
  misc_feature (1)..(353): Homolog of NCBI NO: 34904760 NR Description: similar to carboxylesterase
  misc_feature (17)..(353): Homolog of NCBI NO: 34904774 NR Description: similar to carboxylesterase
  misc_feature (17)..(353): Homolog of NCBI NO: 34393714 NR Description: putative esterase [Oryza sativa (japonica
  misc_feature (1)..(349): Homolog of NCBI NO: 34904770 NR Description: similar to carboxylesterase
  misc_feature (1)..(353): Homolog of NCBI NO: 34904772 NR Description: similar to carboxylesterase
MAGDVARRELRARVGAMPWAVRLQLRALEAAVDATQRRDGTVNRFLFSLLVDRQAPANPARADAGGVRSVDVTVDASTGVRARVYFTAGAGAEADASPRPVIVYFHGGGFTVFSAATRPYDELCRTMCRETGAVVVSVTYRLAPEHRYPAAYDDGEAALRYLATTGLPAEVPVRVDLSRCFLAGDSAGANIAHHVAQRWTAAPATTPPAVHLAGLLLLSSYFGGEDRTESEQALEGVAPIVNLRRSDFWWKAYLPEGADRNHPAAHVTGEAGPEPELPDAFPRAMVVVGGLDPLQDWGRRYAGMLRRKGKEVRVMEFTEAVHAFYFFPALPETGKLVAEISAFVESTAPSSTA

SEQ ID NO: 67997 - DNA, 929 bp, Triticum aestivum
  misc_feature (1)..(929): Ceres Seq. ID no. 13596185
acgaaggcaaagcgaacacacaaacccaaacccaaacccacccacttctcctctcaagccttcgcctgccaccgacgccacccaagcccccaaccctagcgaggactgaaagaggaggaggcggcggcaaccccgtcgaccggaggggagatggtgttcttcgcgctgctcgtgggggcagagctcgacggcctcaccaacctgcagccccgcggcggctgcgacgaccccagctacccttactacttcaagctgcggtgcgagagctgcggagagacgagcgccaagaccacctgcgtctccctcaacgaggtcgtcgaactgcccaccggcaaaggcacctccaatctcctccagaagtgcaagttatgttcgagggatggatcagttgtgatgattcctgggcagggaacaccactgactgctgagcagagccagaaaggagagatgacttgtttgatggtctttgaatgcagaggctatgaacctattgagttcgcttttggtaatggctggaaggctgaatctgtacatgggacaccatttgacattgatctttctgaaggagagtttgatgagtatgatgagaagggagagtgccctgtcgctctatccaagctgcagtcaacattcaaagtggtgaagaagcagggttttcatgggaagaccagatatgtctaagatccagtttctcttgggctcttcaaacattggagtcagagatgtgtaaagcgcatctacaaagttgaatcctcgatgttgattttgtatttgaactaagttcatgcccatgattcggtggatttgccatgaatttggttaagcttgcagtgatgtggcctcctgtttggaaaaattgaatattctgcctatcagtggtttcaaacttagatctatggctctaccatatcaatcataaaattatttag

SEQ ID NO: 67998 - protein, 176 aa, Triticum aestivum
  peptide (1)..(176): Ceres Seq. ID no. 13596186
  misc_feature (1)..(164): Pfam Name: Eukaryotic protein of unknown function (DUF866) Pfam Description: Eukaryotic protein of unknown function (DUF866)
  misc_feature (1)..(166): Homolog of NCBI NO: 21430774 NR Description: SD14289p [Drosophila melanogaster]
  misc_feature (5)..(161): Homolog of NCBI NO: 26328397 NR Description: unnamed protein product [Mus musculus]
  misc_feature (5)..(161): Homolog of NCBI NO: 21539639 NR Description: RIKEN cDNA 0610037L13 [Mus musculus]
  misc_feature (5)..(161): Homolog of NCBI NO: 27715611 NR Description: similar to hypothetical protein FLJ20580
  misc_feature (1)..(166): Homolog of NCBI NO: 24653302 NR Description: CG4646-PA [Drosophila melanogaster]
  misc_feature (5)..(161): Homolog of NCBI NO: 8923541 NR Description: hypothetical protein FLJ20580 [Homo sapiens]
  misc_feature (3)..(165): Homolog of NCBI NO: 7503539 NR Description: hypothetical protein F46B6.3 - Caenorhabditis
  misc_feature (1)..(165): Homolog of NCBI NO: 7486215 NR Description: hypothetical protein F26P21.50 - Arabidopsis
  misc_feature (1)..(165): Homolog of NCBI NO: 18418118 NR Description: expressed protein [Arabidopsis thaliana]
  misc_feature (1)..(174): Homolog of NCBI NO: 34914208 NR Description: OSJNBb0049O23.17 [Oryza sativa (japonica
MVFFALLVGAELDGLTNLQPRGGCDDPSYPYYFKLRCESCGETSAKTTCVSLNEVVELPTGKGTSNLLQKCKLCSRDGSVVMIPGQGTPLTAEQSQKGEMTCLMVFECRGYEPIEFAFGNGWKAESVHGTPFDIDLSEGEFDEYDEKGECPVALSKLQSTFKVVKKQGFHGKTRYV

SEQ ID NO: 67999 - protein, 141 aa, Triticum aestivum
  peptide (1)..(141): Ceres Seq. ID no. 13596187
EGKANTQTQTQTHPLLLSSLRLPPTPPKPPTLARTERGGGGGNPVDRRGDGVLRAARGGRARRPHQPAAPRRLRRPQLPLLLQAAVRELRRDERQDHLRLPQRGRRTAHRQRHLQSPPEVQVMFEGWISCDDSWAGNTTDC

SEQ ID NO: 68000 - protein, 95 aa, Triticum aestivum
  peptide (1)..(95): Ceres Seq. ID no. 13596188
  misc_feature (1)..(83): Pfam Name: Eukaryotic protein of unknown function (DUF866) Pfam Description: Eukaryotic protein of unknown function (DUF866)
  misc_feature (1)..(85): Homolog of NCBI NO: 21430774 NR Description: SD14289p [Drosophila melanogaster]
  misc_feature (1)..(80): Homolog of NCBI NO: 26328397 NR Description: unnamed protein product [Mus musculus]
  misc_feature (1)..(80): Homolog of NCBI NO: 21539639 NR Description: RIKEN cDNA 0610037L13 [Mus musculus]
  misc_feature (1)..(80): Homolog of NCBI NO: 27715611 NR Description: similar to hypothetical protein FLJ20580
  misc_feature (1)..(85): Homolog of NCBI NO: 24653302 NR Description: CG4646-PA [Drosophila melanogaster]
  misc_feature (1)..(80): Homolog of NCBI NO: 8923541 NR Description: hypothetical protein FLJ20580 [Homo sapiens]
  misc_feature (1)..(84): Homolog of NCBI NO: 7503539 NR Description: hypothetical protein F46B6.3 - Caenorhabditis
  misc_feature (1)..(84): Homolog of NCBI NO: 7486215 NR Description: hypothetical protein F26P21.50 - Arabidopsis
  misc_feature (1)..(84): Homolog of NCBI NO: 18418118 NR Description: expressed protein [Arabidopsis thaliana]
  misc_feature (1)..(93): Homolog of NCBI NO: 34914208 NR Description: OSJNBb0049O23.17 [Oryza sativa (japonica
MIPGQGTPLTAEQSQKGEMTCLMVFECRGYEPIEFAFGNGWKAESVHGTPFDIDLSEGEFDEYDEKGECPVALSKLQSTFKVVKKQGFHGKTRYV

SEQ ID NO: 68001 - DNA, 1296 bp, Triticum aestivum
  misc_feature (1)..(1296): Ceres Seq. ID no. 13503500
aaggtaacgcgtctctgttcatctcacctcaccacgcgcgtacactttctctctcccctccctccctttattagatctctctcgctcaacaaaattcctcaactcgagctccctgaccgcaaccactcaaccacccagcaggcccagcaccaccgcgtctaagcaggtgccgcctccgcctccgcgtccttgtctgcggcggctgcaatggccgaccgcgtctaccccgccgccaagcccactccgccgcccccaatggccaacggaggcggcggcccggcggcgcccaagccgcagatgtaccagcgccccatctacaggccgcaggggcaggcgaagagcaggcgcgggcggtcctgccggtgcagcttgtgctgctgcttctgctgggcactgctggtggtcgtcctcctcgcgctagtcgccgcggccgcgggcggcgccttctacgtgctctaccggccgcaacgccccagcttcaccgtctcctctgtccgcctcagcacgttcaacctctcctcctccaccaccgcgcccgtcctcaccgactccatccagctcaccgtcaccgccaagaaccccaacaagaagctcgtctatttctacgacgacttctcattctcggccgccaccgccgccaacgcagtcccgctcggggacgccaccgtgcccgggttcgcgcatgatgccggcaacaccaccgttttcactgcgaccatcaccgccgctggtgtcaccgtagaccccagcggcgccggctctgaccttaagatgtccggcgctttctccgtcgctatagatgccgacacgcgggccggcgtcaaggtcggcagcctcaagaccaagaagatgggcatccaggtgcactgcgagggcatcaaggtgacgccacccagtccacctccgccagcgccgaagaaggtaaaggggaagaatggcaccgccctggcgcctgcgcctgcgttggacaacgccgagacgaccgcgatggtgagcaccgccgcgcactcgtgcaaggtcagagtccgtgtgaagatctggaagtggaccttctaggtataatgccaactttagggactgccatgcaaaacattcaggaaacatatatttttcactttatattggaaagtagagaccatgaatatcgtcggtgtaaattccctcaaagttgattctatttttgttcttgtttggaattttcttaaacatatttttggtggatgtataacttggtgatttgttatttgtaagattacggttcgaatgaaaaaaaaaaaaaaaaaagcttatcgatac

SEQ ID NO: 68002 - protein, 282 aa, Triticum aestivum
  peptide (1)..(282): Ceres Seq. ID no. 13503501
  misc_feature (1)..(230): Homolog of NCBI NO: 18401317 NR Description: expressed protein [Arabidopsis thaliana]
  misc_feature (8)..(226): Homolog of NCBI NO: 26449684 NR Description: unknown protein [Arabidopsis thaliana]
  misc_feature (8)..(226): Homolog of NCBI NO: 30690312 NR Description: expressed protein [Arabidopsis thaliana]
  misc_feature (8)..(226): Homolog of NCBI NO: 25408980 NR Description: hypothetical protein At2g46300 [imported] -
  misc_feature (11)..(243): Homolog of NCBI NO: 21536796 NR Description: unknown [Arabidopsis thaliana]
  misc_feature (11)..(243): Homolog of NCBI NO: 15239804 NR Description: expressed protein [Arabidopsis thaliana]
  misc_feature (3)..(230): Homolog of NCBI NO: 18394509 NR Description: expressed protein [Arabidopsis thaliana]
  misc_feature (3)..(230): Homolog of NCBI NO: 11762174 NR Description: At1g17620 [Arabidopsis thaliana]
  misc_feature (20)..(282): Homolog of NCBI NO: 34914304 NR Description: B1151A10.19 [Oryza sativa (japonica
  misc_feature (10)..(282): Homolog of NCBI NO: 34903552 NR Description: P0001B06.28 [Oryza sativa (japonica
MADRVYPAAKPTPPPPMANGGGGPAAPKPQMYQRPIYRPQGQAKSRRGRSCRCSLCCCFCWALLVVVLLALVAAAAGGAFYVLYRPQRPSFTVSSVRLSTFNLSSSTTAPVLTDSIQLTVTAKNPNKKLVYFYDDFSFSAATAANAVPLGDATVPGFAHDAGNTTVFTATITAAGVTVDPSGAGSDLKMSGAFSVAIDADTRAGVKVGSLKTKKMGIQVHCEGIKVTPPSPPPPAPKKVKGKNGTALAPAPALDNAETTAMVSTAAHSCKVRVRVKIWKWTF

SEQ ID NO: 68003 - protein, 266 aa, Triticum aestivum
  peptide (1)..(266): Ceres Seq. ID no. 13503502
  misc_feature (1)..(214): Homolog of NCBI NO: 18401317 NR Description: expressed protein [Arabidopsis thaliana]
  misc_feature (1)..(210): Homolog of NCBI NO: 26449684 NR Description: unknown protein [Arabidopsis thaliana]
  misc_feature (1)..(210): Homolog of NCBI NO: 30690312 NR Description: expressed protein [Arabidopsis thaliana]
  misc_feature (1)..(210): Homolog of NCBI NO: 25408980 NR Description: hypothetical protein At2g46300 [imported] -
  misc_feature (1)..(227): Homolog of NCBI NO: 21536796 NR Description: unknown [Arabidopsis thaliana]
  misc_feature (1)..(227): Homolog of NCBI NO: 15239804 NR Description: expressed protein [Arabidopsis thaliana]
  misc_feature (1)..(214): Homolog of NCBI NO: 18394509 NR Description: expressed protein [Arabidopsis thaliana]
  misc_feature (1)..(214): Homolog of NCBI NO: 11762174 NR Description: At1g17620 [Arabidopsis thaliana]
  misc_feature (4)..(266): Homolog of NCBI NO: 34914304 NR Description: B1151A10.19 [Oryza sativa (japonica
  misc_feature (1)..(266): Homolog of NCBI NO: 34903552 NR Description: P0001B06.28 [Oryza sativa (japonica
MANGGGGPAAPKPQMYQRPIYRPQGQAKSRRGRSCRCSLCCCFCWALLVVVLLALVAAAAGGAFYVLYRPQRPSFTVSSVRLSTFNLSSSTTAPVLTDSIQLTVTAKNPNKKLVYFYDDFSFSAATAANAVPLGDATVPGFAHDAGNTTVFTATITAAGVTVDPSGAGSDLKMSGAFSVAIDADTRAGVKVGSLKTKKMGIQVHCEGIKVTPPSPPPPAPKKVKGKNGTALAPAPALDNAETTAMVSTAAHSCKVRVRVKIWKWTF

SEQ ID NO: 68004 - protein, 252 aa, Triticum aestivum
  peptide (1)..(252): Ceres Seq. ID no. 13503503
  misc_feature (1)..(200): Homolog of NCBI NO: 18401317 NR Description: expressed protein [Arabidopsis thaliana]
  misc_feature (1)..(196): Homolog of NCBI NO: 26449684 NR Description: unknown protein [Arabidopsis thaliana]
  misc_feature (1)..(196): Homolog of NCBI NO: 30690312 NR Description: expressed protein [Arabidopsis thaliana]
  misc_feature (1)..(196): Homolog of NCBI NO: 25408980 NR Description: hypothetical protein At2g46300 [imported] -
  misc_feature (1)..(213): Homolog of NCBI NO: 21536796 NR Description: unknown [Arabidopsis thaliana]
  misc_feature (1)..(213): Homolog of NCBI NO: 15239804 NR Description: expressed protein [Arabidopsis thaliana]
  misc_feature (1)..(200): Homolog of NCBI NO: 18394509 NR Description: expressed protein [Arabidopsis thaliana]
  misc_feature (1)..(200): Homolog of NCBI NO: 11762174 NR Description: At1g17620 [Arabidopsis thaliana]
  misc_feature (1)..(252): Homolog of NCBI NO: 34914304 NR Description: B1151A10.19 [Oryza sativa (japonica
  misc_feature (1)..(252): Homolog of NCBI NO: 34903552 NR Description: P0001B06.28 [Oryza sativa (japonica
MYQRPIYRPQGQAKSRRGRSCRCSLCCCFCWALLVVVLLALVAAAAGGAFYVLYRPQRPSFTVSSVRLSTFNLSSSTTAPVLTDSIQLTVTAKNPNKKLVYFYDDFSFSAATAANAVPLGDATVPGFAHDAGNTTVFTATITAAGVTVDPSGAGSDLKMSGAFSVAIDADTRAGVKVGSLKTKKMGIQVHCEGIKVTPPSPPPPAPKKVKGKNGTALAPAPALDNAETTAMVSTAAHSCKVRVRVKIWKWTF

SEQ ID NO: 68005 - DNA, 940 bp, Triticum aestivum
  misc_feature (1)..(940): Ceres Seq. ID no. 13596338
gagaaaggaacggctgccgtcccctgcctgcaaccgcaactcaaccagtcagtcgccattactcttgtttctcatcacccaccgcgagcgcgaagcaggaggagcagcaccatgctggggcatctagtcgggctggtgaaggtgcgggtgacgcgcggggtgaacctcgccatccgcgacctccgctccagcgacccctacgtcgtcgtccgcatgggcaagcagaagctgaagacgcgagttgtaaggaagagtatcaatccggagtggaacgatgaactgaccctctccatcgaagatcctaccattcctgtcaaactggacgtgttcgacaaggacacattcttcgacgacccgatgggcaacgcggagctggacatcggcccgctggtggaggccgcgaggatgagggtccagctgcagggcgtcgctgacaacaccgtggtgaagaagctggtgcccaaccggcagaactgcctcgccgagcagagcgccatctacctgtccgagggcacggtgaagcaggacgtggtgctcaggctgaggaacgtcgagtgcggggaggtcgagctccagctccagtggatcgacatccccggctccaagggcgtatcaggcttttaattagctctctgtgcactctctgctgtttgcagagttctttctcaagtgaaaagctggagtaaattctgattagaatccaagcttaagttaggatttagattatgtgcgatagatgactgtgtggtcgaacttcctaagatggactgaaaaaggaagaactggtggcaggggcgcaaaaattctcagaaaaaaaaaaaaaaaaaaaaaaaaaaaaaaaaaaaaaaaaaaaaaaaaaaaaaaaaaaaaaaaaaaaaaaaaargaaaaaaaaaaaaaaaaaggtttwtcgatmccgccvacccccgggggggggcccgg

SEQ ID NO: 68006 - protein, 207 aa, Triticum aestivum
  peptide (1)..(207): Ceres Seq. ID no. 15221843
  misc_feature (46)..(124): Pfam Name: C2 domain Pfam Description: C2 domain
  misc_feature (43)..(204): Homolog of NCBI NO: 18409675 NR Description: C2 domain-containing protein [Arabidopsis
  misc_feature (41)..(201): Homolog of NCBI NO: 18408493 NR Description: C2 domain-containing protein [Arabidopsis
  misc_feature (37)..(204): Homolog of NCBI NO: 15219500 NR Description: C2 domain-containing protein [Arabidopsis
  misc_feature (42)..(200): Homolog of NCBI NO: 33146442 NR Description: zinc finger and C2 domain protein-like
  misc_feature (42)..(204): Homolog of NCBI NO: 13430460 NR Description: unknown protein [Arabidopsis thaliana]
  misc_feature (42)..(204): Homolog of NCBI NO: 18409682 NR Description: C2 domain-containing protein [Arabidopsis
  misc_feature (33)..(204): Homolog of NCBI NO: 15221907 NR Description: C2 domain-containing protein [Arabidopsis
  misc_feature (20)..(204): Homolog of NCBI NO: 25405940 NR Description: protein T1N15.21 [imported] - Arabidopsis
  misc_feature (34)..(204): Homolog of NCBI NO: 30684739 NR Description: C2 domain-containing protein [Arabidopsis
  misc_feature (41)..(204): Homolog of NCBI NO: 15240322 NR Description: C2 domain-containing protein [Arabidopsis
EKGTAAVPCLQPQLNQSVAITLVSHHPPRARSRRSSTMLGHLVGLVKVRVTRGVNLAIRDLRSSDPYVVVRMGKQKLKTRVVRKSINPEWNDELTLSIEDPTIPVKLDVFDKDTFFDDPMGNAELDIGPLVEAARMRVQLQGVADNTVVKKLVPNRQNCLAEQSAIYLSEGTVKQDVVLRLRNVECGEVELQLQWIDIPGSKGVSGF

SEQ ID NO: 68007 - protein, 170 aa, Triticum aestivum
  peptide (1)..(170): Ceres Seq. ID no. 15221844
  misc_feature (9)..(87): Pfam Name: C2 domain Pfam Description: C2 domain
  misc_feature (6)..(167): Homolog of NCBI NO: 18409675 NR Description: C2 domain-containing protein [Arabidopsis
  misc_feature (4)..(164): Homolog of NCBI NO: 18408493 NR Description: C2 domain-containing protein [Arabidopsis
  misc_feature (1)..(167): Homolog of NCBI NO: 15219500 NR Description: C2 domain-containing protein [Arabidopsis
  misc_feature (5)..(163): Homolog of NCBI NO: 33146442 NR Description: zinc finger and C2 domain protein-like
  misc_feature (5)..(167): Homolog of NCBI NO: 13430460 NR Description: unknown protein [Arabidopsis thaliana]
  misc_feature (5)..(167): Homolog of NCBI NO: 18409682 NR Description: C2 domain-containing protein [Arabidopsis
  misc_feature (1)..(167): Homolog of NCBI NO: 15221907 NR Description: C2 domain-containing protein [Arabidopsis
  misc_feature (1)..(167): Homolog of NCBI NO: 25405940 NR Description: protein T1N15.21 [imported] - Arabidopsis
  misc_feature (1)..(167): Homolog of NCBI NO: 30684739 NR Description: C2 domain-containing protein [Arabidopsis
  misc_feature (4)..(167): Homolog of NCBI NO: 15240322 NR Description: C2 domain-containing protein [Arabidopsis
MLGHLVGLVKVRVTRGVNLAIRDLRSSDPYVVVRMGKQKLKTRVVRKSINPEWNDELTLSIEDPTIPVKLDVFDKDTFFDDPMGNAELDIGPLVEAARMRVQLQGVADNTVVKKLVPNRQNCLAEQSAIYLSEGTVKQDVVLRLRNVECGEVELQLQWIDIPGSKGVSGF

SEQ ID NO: 68008 - protein, 136 aa, Triticum aestivum
  peptide (1)..(136): Ceres Seq. ID no. 15221845
  misc_feature (1)..(53): Pfam Name: C2 domain Pfam Description: C2 domain
  misc_feature (1)..(133): Homolog of NCBI NO: 18409675 NR Description: C2 domain-containing protein [Arabidopsis
  misc_feature (1)..(130): Homolog of NCBI NO: 18408493 NR Description: C2 domain-containing protein [Arabidopsis
  misc_feature (1)..(133): Homolog of NCBI NO: 15219500 NR Description: C2 domain-containing protein [Arabidopsis
  misc_feature (1)..(129): Homolog of NCBI NO: 33146442 NR Description: zinc finger and C2 domain protein-like
  misc_feature (1)..(133): Homolog of NCBI NO: 13430460 NR Description: unknown protein [Arabidopsis thaliana]
  misc_feature (1)..(133): Homolog of NCBI NO: 18409682 NR Description: C2 domain-containing protein [Arabidopsis
  misc_feature (1)..(133): Homolog of NCBI NO: 15221907 NR Description: C2 domain-containing protein [Arabidopsis
  misc_feature (1)..(133): Homolog of NCBI NO: 25405940 NR Description: protein T1N15.21 [imported] - Arabidopsis
  misc_feature (1)..(133): Homolog of NCBI NO: 30684739 NR Description: C2 domain-containing protein [Arabidopsis
  misc_feature (1)..(133): Homolog of NCBI NO: 15240322 NR Description: C2 domain-containing protein [Arabidopsis
MGKQKLKTRVVRKSINPEWNDELTLSIEDPTIPVKLDVFDKDTFFDDPMGNAELDIGPLVEAARMRVQLQGVADNTVVKKLVPNRQNCLAEQSAIYLSEGTVKQDVVLRLRNVECGEVELQLQWIDIPGSKGVSGF

SEQ ID NO: 68009 - DNA, 1059 bp, Triticum aestivum
  misc_feature (1)..(1059): Ceres Seq. ID no. 13596339
cctgcctctgcgtcttcctctgcttcctcttctcctcccaatccaatccttgtagaatcttccaccggcgcccgggtaagatgaacggcctcctcgtgtccccgtgcacaaggccgcccctgctccgccccttcccgagcccggccacccgtctcctacccgccagaaccctagttcttcgcccgctccgcctcccccgtggcgtctgtgcgtcccctcctcccccgcgcgccgccgccgccgctgcgtctgcagtgggcggccttctggcgccgctcgaggttggcctgcgcagcatcaacctcgcgccgctgcgcccgccggttgcggcggccatgtcggcggccgtgcgctggctgggggtctaccgggaggttctgcttgtcggggtgctcttctcctggtttcccaacatcccctgggaccgccagcccttctccgctctgcgagacctctgcgacccttttctcgccctctgccgcgaggtcgtgccgcccgtcttcggccgcaagctcgatctcagcccgctcgtcgccttcatggcgatagacatcctcatcatgatccttcgcccacagccacgcatgtgatggaattgaaggatagtcgttggtatgttaagatccactatggttttgtcgttgctggatattacaagataagaagtggtggttgaatgatctttagcaagggtagcagaatttgagtgattttgagacgttttgtagacaagtgtagcttccttgataaaacttctgccaagtagatatgtgctagctacagtctttgtgattctgctctgttcccagacggatttgtctatgatatggcaacacggatctgcatgtagtgagcgattcagagaactgaatcgaaagctgagccattcctgaacggtttgcgagagaatcccaaactagcttaggcaggctcattaatgtgcatggtctacttttttcttctttttccttccaccatgaggatcttatctccttttctgacttggctaatgtgtttacctccagagccacttgttctggttgagtgttgatatactcg

SEQ ID NO: 68010 - protein, 195 aa, Triticum aestivum
  peptide (1)..(195): Ceres Seq. ID no. 13596340
  misc_feature (108)..(189): Pfam Name: YGGT family Pfam Description: YGGT family
  misc_feature (108)..(189): Homolog of NCBI NO: 33862954 NR Description: conserved hypothetical membrane protein
  misc_feature (113)..(189): Homolog of NCBI NO: 11467623 NR Description: hypothetical chloroplast RF19 [Guillardia theta]
  misc_feature (108)..(185): Homolog of NCBI NO: 37523109 NR Description: hypothetical protein [Gloeobacter violaceus]
  misc_feature (112)..(195): Homolog of NCBI NO: 17229553 NR Description: hypothetical protein [Nostoc sp. PCC 7120]
  misc_feature (118)..(189): Homolog of NCBI NO: 22298077 NR Description: ORF_ID:tsr0534~hypothetical protein
  misc_feature (104)..(185): Homolog of NCBI NO: 21617923 NR Description: unknown [Arabidopsis thaliana]
  misc_feature (104)..(185): Homolog of NCBI NO: 18397948 NR Description: expressed protein [Arabidopsis thaliana]
  misc_feature (36)..(189): Homolog of NCBI NO: 21592772 NR Description: unknown [Arabidopsis thaliana]
  misc_feature (36)..(189): Homolog of NCBI NO: 15234345 NR Description: expressed protein [Arabidopsis thaliana]
  misc_feature (27)..(195): Homolog of NCBI NO: 34393226 NR Description: unknown protein [Oryza sativa (japonica
CLCVFLCFLFSSQSNPCRIFHRRPGKMNGLLVSPCTRPPLLRPFPSPATRLLPARTLVLRPLRLPRGVCASPPPPRAAAAAASAVGGLLAPLEVGLRSINLAPLRPPVAAAMSAAVRWLGVYREVLLVGVLFSWFPNIPWDRQPFSALRDLCDPFLALCREVVPPVFGRKLDLSPLVAFMAIDILIMILRPQPRM

SEQ ID NO: 68011 - protein, 169 aa, Triticum aestivum
  peptide (1)..(169): Ceres Seq. ID no. 13596341
  misc_feature (82)..(163): Pfam Name: YGGT family Pfam Description: YGGT family
  misc_feature (82)..(163): Homolog of NCBI NO: 33862954 NR Description: conserved hypothetical membrane protein
  misc_feature (87)..(163): Homolog of NCBI NO: 11467623 NR Description: hypothetical chloroplast RF19 [Guillardia theta]
  misc_feature (82)..(159): Homolog of NCBI NO: 37523109 NR Description: hypothetical protein [Gloeobacter violaceus]
  misc_feature (86)..(169): Homolog of NCBI NO: 17229553 NR Description: hypothetical protein [Nostoc sp. PCC 7120]
  misc_feature (92)..(163): Homolog of NCBI NO: 22298077 NR Description: ORF_ID:tsr0534~hypothetical protein
  misc_feature (78)..(159): Homolog of NCBI NO: 21617923 NR Description: unknown [Arabidopsis thaliana]
  misc_feature (78)..(159): Homolog of NCBI NO: 18397948 NR Description: expressed protein [Arabidopsis thaliana]
  misc_feature (10)..(163): Homolog of NCBI NO: 21592772 NR Description: unknown [Arabidopsis thaliana]
  misc_feature (10)..(163): Homolog of NCBI NO: 15234345 NR Description: expressed protein [Arabidopsis thaliana]
  misc_feature (1)..(169): Homolog of NCBI NO: 34393226 NR Description: unknown protein [Oryza sativa (japonica
MNGLLVSPCTRPPLLRPFPSPATRLLPARTLVLRPLRLPRGVCASPPPPRAAAAAASAVGGLLAPLEVGLRSINLAPLRPPVAAAMSAAVRWLGVYREVLLVGVLFSWFPNIPWDRQPFSALRDLCDPFLALCREVVPPVFGRKLDLSPLVAFMAIDILIMILRPQPRM

SEQ ID NO: 68012 - DNA, 1194 bp, Triticum aestivum
  misc_feature (1)..(1194): Ceres Seq. ID no. 15225069
agtacttcgacgacccacctcagagcaggaccgcatcgccttcctcctcgtccccgcgcctcccacccgccggccggaaggggagacgaaggcgaagcgcagccaagatgccgcagcggcactcgaagaacaacaacgacctcgccttcttcacctacgaggagaagcggaagctcgggtacggcacccagcgggagcggctcggcaaggactccatcaagcccttcgatgcctgctgcctctgcctcaagccgctcatcgacccgctcgcctgccccaagggccacaccttctgcaaggagtgcatcctcgagtgcctcctcgcgcagaagaaggacatcaagcgcaagcttatagctcatgactcccagaaaaagcaagagaaggaagaggaggaggagaagctggtgctgcaaaagtccaaggaattggatgcttttgatcagcagaatcatggagcagtcccccagtactatgatcgcagcggttcccaagacaagaatggttttcatggagccaacagtgtgaagactacctccttcgaagaggaagccctacgcaccatgaaggcgttctggcttccgtcagctacacccgaagctactgtcaaggtagatgctccttctactgacacaatctgtcccgaggggcaggagaagctcaagctgaaatcactcttccctatttctttcaccgaggagaacgctcgtcagaagagcaataagtcagtggagaaaagctacatctgccccagctgcaagtccaatctcacaaacacaatgtccctggtggcgatcagcacctgtggccatgtcttctgcaagaagtgctcggacaagttcatagcaacagataaggtctgcttaatgtgcagcaaaccgtgcaaagagaggaatttgattaatttagagaaaggaggaacgggtttcgctgcacacgatgaccacctagaggcaaagaacttcaagcatttagggagtggttctggactaggattggtgaagcctgctcctaaggcatagccttcaattatgtaactgttgttgtataatgctgtcagtcatcgttgtggcacgaatatatgtaacctggattttttaaatgttttgatatcttttgatatgtatgatctggaacaaacgatactcaggtttttcatccaagtgataatgtgcttgcggttttgctccatgc

SEQ ID NO: 68013 - protein, 339 aa, Triticum aestivum
  peptide (1)..(339): Ceres Seq. ID no. 15225070
  misc_feature (39)..(319): Homolog of NCBI NO: 39593613 NR Description: Hypothetical protein CBG05897 [Caenorhabditis
  misc_feature (39)..(319): Homolog of NCBI NO: 13384956 NR Description: RIKEN cDNA 2310061K06 [Mus musculus]
  misc_feature (39)..(319): Homolog of NCBI NO: 27731403 NR Description: similar to RIKEN cDNA 2310061K06 [Rattus
  misc_feature (39)..(319): Homolog of NCBI NO: 15030017 NR Description: ENOS interacting protein [Homo sapiens]
  misc_feature (39)..(319): Homolog of NCBI NO: 24643007 NR Description: CG6179-PA [Drosophila melanogaster]
  misc_feature (39)..(319): Homolog of NCBI NO: 7705716 NR Description: eNOS interacting protein; CGI-25 protein [Homo
  misc_feature (39)..(322): Homolog of NCBI NO: 31213459 NR Description: ENSANGP00000021661 [Anopheles gambiae]
  misc_feature (39)..(319): Homolog of NCBI NO: 38174118 NR Description: Unknown (protein for MGC:75989) [Silurana
  misc_feature (36)..(335): Homolog of NCBI NO: 26449463 NR Description: unknown protein [Arabidopsis thaliana]
  misc_feature (36)..(335): Homolog of NCBI NO: 18407260 NR Description: expressed protein [Arabidopsis thaliana]
YFDDPPQSRTASPSSSSPRLPPAGRKGRRRRSAAKMPQRHSKNNNDLAFFTYEEKRKLGYGTQRERLGKDSIKPFDACCLCLKPLIDPLACPKGHTFCKECILECLLAQKKDIKRKLIAHDSQKKQEKEEEEEKLVLQKSKELDAFDQQNHGAVPQYYDRSGSQDKNGFHGANSVKTTSFEEEALRTMKAFWLPSATPEATVKVDAPSTDTICPEGQEKLKLKSLFPISFTEENARQKSNKSVEKSYICPSCKSNLTNTMSLVAISTCGHVFCKKCSDKFIATDKVCLMCSKPCKERNLINLEKGGTGFAAHDDHLEAKNFKHLGSGSGLGLVKPAPKA

SEQ ID NO: 68014 - protein, 304 aa, Triticum aestivum
  peptide (1)..(304): Ceres Seq. ID no. 15225071
  misc_feature (4)..(284): Homolog of NCBI NO: 39593613 NR Description: Hypothetical protein CBG05897 [Caenorhabditis
  misc_feature (4)..(284): Homolog of NCBI NO: 13384956 NR Description: RIKEN cDNA 2310061K06 [Mus musculus]
  misc_feature (4)..(284): Homolog of NCBI NO: 27731403 NR Description: similar to RIKEN cDNA 2310061K06 [Rattus
  misc_feature (4)..(284): Homolog of NCBI NO: 15030017 NR Description: ENOS interacting protein [Homo sapiens]
  misc_feature (4)..(284): Homolog of NCBI NO: 24643007 NR Description: CG6179-PA [Drosophila melanogaster]
  misc_feature (4)..(284): Homolog of NCBI NO: 7705716 NR Description: eNOS interacting protein; CGI-25 protein [Homo
  misc_feature (4)..(287): Homolog of NCBI NO: 31213459 NR Description: ENSANGP00000021661 [Anopheles gambiae]
  misc_feature (4)..(284): Homolog of NCBI NO: 38174118 NR Description: Unknown (protein for MGC:75989) [Silurana
  misc_feature (1)..(300): Homolog of NCBI NO: 26449463 NR Description: unknown protein [Arabidopsis thaliana]
  misc_feature (1)..(300): Homolog of NCBI NO: 18407260 NR Description: expressed protein [Arabidopsis thaliana]
MPQRHSKNNNDLAFFTYEEKRKLGYGTQRERLGKDSIKPFDACCLCLKPLIDPLACPKGHTFCKECILECLLAQKKDIKRKLIAHDSQKKQEKEEEEEKLVLQKSKELDAFDQQNHGAVPQYYDRSGSQDKNGFHGANSVKTTSFEEEALRTMKAFWLPSATPEATVKVDAPSTDTICPEGQEKLKLKSLFPISFTEENARQKSNKSVEKSYICPSCKSNLTNTMSLVAISTCGHVFCKKCSDKFIATDKVCLMCSKPCKERNLINLEKGGTGFAAHDDHLEAKNFKHLGSGSGLGLVKPAPKA

SEQ ID NO: 68015 - DNA, 1708 bp, Triticum aestivum
  misc_feature (1)..(1708): Ceres Seq. ID no. 13654539
aggaagagaagagatcagatcagatctcatctcagtctcctctgctcaggtcgccggcgatggcgatggcgccgtccctccgcaccaccgtcctgctcctcctcttcctcctcgccgcctcttctcaggcggaggcggcacaagcggcggaggacggcatccgggtcctctccgccgagaaaaggatcgacctcaccggccccattgtcaaggtcttcctcaccctcaaggtccagaacgccgccaccggcgccgacgcctcacacgtcctcatcgccttcacgcctgccgaggccgaccacctcgccatcgtcaaggccacccgggccgagggcaagcgcaagaagaaggcctacatcccgctcccagtaacacccgccgacgccgccaccgccgctcccaacggcgcccgcctctactccatctcccttcccagcccactaaaacccgccgagaccaccacggtggaggtcttctacgtgctcacccactccctcgagcccttccctgccgagatcacccagtccgagtcccagctcgtctactaccgcgacagcgccgtcatcctctcgccgtaccatgtccaggagcagggcacctacgtcaagacgcccagcagcagggtcgagtccttcaccagggccgaccccaccagccgctcgggccctgatgtcaaatacggcgcgtacagcaaccagctcccatacgcctactcgcccatcattctgcattatgagaacaaccatgcgtttgctgtcgtcgaggagctcgtgcgcaaggtggagatctcccactgggggaacgtccaggtcaccgagcactacaagttgaagcatggcggtgccaagcacaaaggagtcttttcaaggctcgagtatcaggctaggcaatctatcagcggagcgtcatcatttaagaatcttcttgcaaggttgcctccacgagttcattcagtctactatcgtgatgagattggtaacatctcctcatcccatctgcgcagtgattcatacaagtcagaactagaaattgaaccaagatatccgctttttggtgggtggcactgcactttcaccatcggctatggtatgccactgcaagatttcctgtttgaatcggctgatggccgacgctttgccaatcttacatttggatgccctctactgaatactgtggttgataatcttaccatcaaggttgtgcttcccgagggatcgaaaagcccgcaggctgttgttcctttcgagaccgagcaacatcttgagactagctattcatacctggatgttgtggggaggacgacagtggtgataaagaagaaaaacgtagtaggagagcacaatgttccattccaggtgtactacgagttcagtcccatcttcatgctggcggagccgctgatgctggtgaccgcagtgctgctcttgttcgcggcgtgcattgtctatcttcacacggatctgtccatcgcgaaatcgcaggcctcctgaaggaggagtagctgcaaactagtcgttgtgatgaagtaattgatggtggtgaaacattagctttggggagttttgtagaagaagcaagcatgacgataattgattgctgtaggaactttgactcttttttttttattttcctgtggaagaaaaagaaaaatcacaattggattggatgttgagcaacaacttggttagtctgatcaagatacgttttt

SEQ ID NO: 68016 - protein, 495 aa, Triticum aestivum
  peptide (1)..(495): Ceres Seq. ID no. 15219664
  misc_feature (53)..(484): Pfam Name: Ribophorin I Pfam Description: Ribophorin I
  misc_feature (31)..(495): Homolog of NCBI NO: 4506675 NR Description: ribophorin I [Homo sapiens]
  misc_feature (30)..(495): Homolog of NCBI NO: 38512106 NR Description: Ribophorin I [Rattus norvegicus]
  misc_feature (30)..(495): Homolog of NCBI NO: 16359229 NR Description: ribophorin I [Mus musculus]
  misc_feature (23)..(495): Homolog of NCBI NO: 9857227 NR Description: ribophorin I [Sus scrofa]
  misc_feature (27)..(495): Homolog of NCBI NO: 40674542 NR Description: Unknown (protein for MGC:76266) [Silurana
  misc_feature (27)..(495): Homolog of NCBI NO: 28175644 NR Description: Similar to ribophorin I [Xenopus laevis]
  misc_feature (27)..(495): Homolog of NCBI NO: 28277278 NR Description: Similar to ribophorin I [Xenopus laevis]
  misc_feature (28)..(495): Homolog of NCBI NO: 15223039 NR Description: ribophorin I
  misc_feature (22)..(495): Homolog of NCBI NO: 7489438 NR Description: ribophorin I homolog - barley (fragment)
  misc_feature (45)..(491): Homolog of NCBI NO: 15226341 NR Description: ribophorin I -related [Arabidopsis thaliana]
EEKRSDQISSQSPLLRSPAMAMAPSLRTTVLLLLFLLAASSQAEAAQAAEDGIRVLSAEKRIDLTGPIVKVFLTLKVQNAATGADASHVLIAFTPAEADHLAIVKATRAEGKRKKKAYIPLPVTPADAATAAPNGARLYSISLPSPLKPAETTTVEVFYVLTHSLEPFPAEITQSESQLVYYRDSAVILSPYHVQEQGTYVKTPSSRVESFTRADPTSRSGPDVKYGAYSNQLPYAYSPIILHYENNHAFAVVEELVRKVEISHWGNVQVTEHYKLKHGGAKHKGVFSRLEYQARQSISGASSFKNLLARLPPRVHSVYYRDEIGNISSSHLRSDSYKSELEIEPRYPLFGGWHCTFTIGYGMPLQDFLFESADGRRFANLTFGCPLLNTVVDNLTIKVVLPEGSKSPQAVVPFETEQHLETSYSYLDVVGRTTVVIKKKNVVGEHNVPFQVYYEFSPIFMLAEPLMLVTAVLLLFAACIVYLHTDLSIAKSQAS

SEQ ID NO: 68017 - protein, 476 aa, Triticum aestivum
  peptide (1)..(476): Ceres Seq. ID no. 15219665
  misc_feature (34)..(465): Pfam Name: Ribophorin I Pfam Description: Ribophorin I
  misc_feature (12)..(476): Homolog of NCBI NO: 4506675 NR Description: ribophorin I [Homo sapiens]
  misc_feature (11)..(476): Homolog of NCBI NO: 38512106 NR Description: Ribophorin I [Rattus norvegicus]
  misc_feature (11)..(476): Homolog of NCBI NO: 16359229 NR Description: ribophorin I [Mus musculus]
  misc_feature (4)..(476): Homolog of NCBI NO: 9857227 NR Description: ribophorin I [Sus scrofa]
  misc_feature (8)..(476): Homolog of NCBI NO: 40674542 NR Description: Unknown (protein for MGC:76266) [Silurana
  misc_feature (8)..(476): Homolog of NCBI NO: 28175644 NR Description: Similar to ribophorin I [Xenopus laevis]
  misc_feature (8)..(476): Homolog of NCBI NO: 28277278 NR Description: Similar to ribophorin I [Xenopus laevis]
  misc_feature (9)..(476): Homolog of NCBI NO: 15223039 NR Description: ribophorin I
  misc_feature (3)..(476): Homolog of NCBI NO: 7489438 NR Description: ribophorin I homolog - barley (fragment)
  misc_feature (26)..(472): Homolog of NCBI NO: 15226341 NR Description: ribophorin I -related [Arabidopsis thaliana]
MAMAPSLRTTVLLLLFLLAASSQAEAAQAAEDGIRVLSAEKRIDLTGPIVKVFLTLKVQNAATGADASHVLIAFTPAEADHLAIVKATRAEGKRKKKAYIPLPVTPADAATAAPNGARLYSISLPSPLKPAETTTVEVFYVLTHSLEPFPAEITQSESQLVYYRDSAVILSPYHVQEQGTYVKTPSSRVESFTRADPTSRSGPDVKYGAYSNQLPYAYSPIILHYENNHAFAVVEELVRKVEISHWGNVQVTEHYKLKHGGAKHKGVFSRLEYQARQSISGASSFKNLLARLPPRVHSVYYRDEIGNISSSHLRSDSYKSELEIEPRYPLFGGWHCTFTIGYGMPLQDFLFESADGRRFANLTFGCPLLNTVVDNLTIKVVLPEGSKSPQAVVPFETEQHLETSYSYLDVVGRTTVVIKKKNVVGEHNVPFQVYYEFSPIFMLAEPLMLVTAVLLLFAACIVYLHTDLSIAKSQAS

SEQ ID NO: 68018 - protein, 474 aa, Triticum aestivum
  peptide (1)..(474): Ceres Seq. ID no. 15219666
  misc_feature (32)..(463): Pfam Name: Ribophorin I Pfam Description: Ribophorin I
  misc_feature (10)..(474): Homolog of NCBI NO: 4506675 NR Description: ribophorin I [Homo sapiens]
  misc_feature (9)..(474): Homolog of NCBI NO: 38512106 NR Description: Ribophorin I [Rattus norvegicus]
  misc_feature (9)..(474): Homolog of NCBI NO: 16359229 NR Description: ribophorin I [Mus musculus]
  misc_feature (2)..(474): Homolog of NCBI NO: 9857227 NR Description: ribophorin I [Sus scrofa]
  misc_feature (6)..(474): Homolog of NCBI NO: 40674542 NR Description: Unknown (protein for MGC:76266) [Silurana
  misc_feature (6)..(474): Homolog of NCBI NO: 28175644 NR Description: Similar to ribophorin I [Xenopus laevis]
  misc_feature (6)..(474): Homolog of NCBI NO: 28277278 NR Description: Similar to ribophorin I [Xenopus laevis]
  misc_feature (7)..(474): Homolog of NCBI NO: 15223039 NR Description: ribophorin I
  misc_feature (1)..(474): Homolog of NCBI NO: 7489438 NR Description: ribophorin I homolog - barley (fragment)
  misc_feature (24)..(470): Homolog of NCBI NO: 15226341 NR Description: ribophorin I -related [Arabidopsis thaliana]
MAPSLRTTVLLLLFLLAASSQAEAAQAAEDGIRVLSAEKRIDLTGPIVKVFLTLKVQNAATGADASHVLIAFTPAEADHLAIVKATRAEGKRKKKAYIPLPVTPADAATAAPNGARLYSISLPSPLKPAETTTVEVFYVLTHSLEPFPAEITQSESQLVYYRDSAVILSPYHVQEQGTYVKTPSSRVESFTRADPTSRSGPDVKYGAYSNQLPYAYSPIILHYENNHAFAVVEELVRKVEISHWGNVQVTEHYKLKHGGAKHKGVFSRLEYQARQSISGASSFKNLLARLPPRVHSVYYRDEIGNISSSHLRSDSYKSELEIEPRYPLFGGWHCTFTIGYGMPLQDFLFESADGRRFANLTFGCPLLNTVVDNLTIKVVLPEGSKSPQAVVPFETEQHLETSYSYLDVVGRTTVVIKKKNVVGEHNVPFQVYYEFSPIFMLAEPLMLVTAVLLLFAACIVYLHTDLSIAKSQAS

SEQ ID NO: 68019 - DNA, 891 bp, Triticum aestivum
  misc_feature (1)..(891): Ceres Seq. ID no. 13596295
aaaaccctagcgccacaaccagacggcaggtaagggaggaggagagcggcggcgaagatggtgtcgctgaagctgcagaagcgcctggcctcgagcgtcctcaagtgcggcaagggcaaggtctggctcgaccccaatgaggtcaacgagatctccatggccaactcccggcagaacatccggaagctggtaaaggatggtttcatcatcaggaagcctcagaagatccactccaggtctcgtgcaaggagggcacatgaggccaagcagaagggccgtcactctggatatggtaagcgtaggggtaccagggaggctaggctccccaccaagatcctgtggatgcggaggatgcgcgtcctgaggcgccttctgcgcaagtaccgtgaggccaagaagatcgacaagcacatgtaccatgacatgtacctgaaggtcaagggtaacatgttcaagaacaagagggtcctcatggagagtatccacaagtccaaggctgagaaggcaagagagaagaccctctctgatcagtttgaggccaagcgcgccaagagcaaggcaagcagggagaggaagcatgccaggagggaggagagattggctcagggccccagagatcatgcaccagcaccagcggctgcagctccagctccagcagcagcggcaccaaagaaggccaaggccaagaagtgaaggtctgacatgaagctttagctttctggtatcatgaagggttagcctgattttggagcatctgaagttcagaactgttttctgtgcaatatctgtgtgccgcgtatgagataccttaaatatcatatcgtgtttgttctgttggatgttgcttatgcagagtttctttaaacatttcggttcaccgaacctagtttt

SEQ ID NO: 68020 - protein, 211 aa, Triticum aestivum
  peptide (1)..(211): Ceres Seq. ID no. 13596296
  misc_feature (2)..(149): Pfam Name: Ribosomal protein L19e Pfam Description: Ribosomal protein L19e
  misc_feature (1)..(203): Homolog of NCBI NO: 40643028 NR Description: ribosomal protein L19 [Crassostrea gigas]
  misc_feature (1)..(182): Homolog of NCBI NO: 28630352 NR Description: ribosomal protein L19 [Branchiostoma lanceolatum]
  misc_feature (1)..(182): Homolog of NCBI NO: 28200276 NR Description: ribosomal protein L19 [Branchiostoma belcheri
  misc_feature (1)..(208): Homolog of NCBI NO: 15228314 NR Description: 60S ribosomal protein L19 (RPL19B) [Arabidopsis
  misc_feature (1)..(201): Homolog of NCBI NO: 7440943 NR Description: ribosomal protein L19.T2H3.3 - Arabidopsis
  misc_feature (1)..(211): Homolog of NCBI NO: 15235290 NR Description: 60S ribosomal protein L19 (RPL19C) [Arabidopsis
  misc_feature (1)..(204): Homolog of NCBI NO: 40287526 NR Description: 60S ribosomal protein L19 [Capsicum annuum]
  misc_feature (1)..(211): Homolog of NCBI NO: 18087585 NR Description: At1g02780/T14P4_3 [Arabidopsis thaliana]
  misc_feature (1)..(211): Homolog of NCBI NO: 15218602 NR Description: 60S ribosomal protein L19 (RPL19A) [Arabidopsis
  misc_feature (1)..(208): Homolog of NCBI NO: 29837764 NR Description: putative ribosomal protein L19
MVSLKLQKRLASSVLKCGKGKVWLDPNEVNEISMANSRQNIRKLVKDGFIIRKPQKIHSRSRARRAHEAKQKGRHSGYGKRRGTREARLPTKILWMRRMRVLRRLLRKYREAKKIDKHMYHDMYLKVKGNMFKNKRVLMESIHKSKAEKAREKTLSDQFEAKRAKSKASRERKHARREERLAQGPRDHAPAPAAAAPAPAAAAPKKAKAKK

SEQ ID NO: 68021 - protein, 178 aa, Triticum aestivum
  peptide (1)..(178): Ceres Seq. ID no. 13596297
  misc_feature (1)..(116): Pfam Name: Ribosomal protein L19e Pfam Description: Ribosomal protein L19e
  misc_feature (1)..(170): Homolog of NCBI NO: 40643028 NR Description: ribosomal protein L19 [Crassostrea gigas]
  misc_feature (1)..(149): Homolog of NCBI NO: 28630352 NR Description: ribosomal protein L19 [Branchiostoma lanceolatum]
  misc_feature (1)..(149): Homolog of NCBI NO: 28200276 NR Description: ribosomal protein L19 [Branchiostoma belcheri
  misc_feature (1)..(175): Homolog of NCBI NO: 15228314 NR Description: 60S ribosomal protein L19 (RPL19B) [Arabidopsis
  misc_feature (1)..(168): Homolog of NCBI NO: 7440943 NR Description: ribosomal protein L19.T2H3.3 - Arabidopsis
  misc_feature (1)..(178): Homolog of NCBI NO: 15235290 NR Description: 60S ribosomal protein L19 (RPL19C) [Arabidopsis
  misc_feature (1)..(171): Homolog of NCBI NO: 40287526 NR Description: 60S ribosomal protein L19 [Capsicum annuum]
  misc_feature (1)..(178): Homolog of NCBI NO: 18087585 NR Description: At1g02780/T14P4_3 [Arabidopsis thaliana]
  misc_feature (1)..(178): Homolog of NCBI NO: 15218602 NR Description: 60S ribosomal protein L19 (RPL19A) [Arabidopsis
  misc_feature (1)..(175): Homolog of NCBI NO: 29837764 NR Description: putative ribosomal protein L19
MANSRQNIRKLVKDGFIIRKPQKIHSRSRARRAHEAKQKGRHSGYGKRRGTREARLPTKILWMRRMRVLRRLLRKYREAKKIDKHMYHDMYLKVKGNMFKNKRVLMESIHKSKAEKAREKTLSDQFEAKRAKSKASRERKHARREERLAQGPRDHAPAPAAAAPAPAAAAPKKAKAKK

SEQ ID NO: 68022 - protein, 116 aa, Triticum aestivum
  peptide (1)..(116): Ceres Seq. ID no. 13596298
  misc_feature (1)..(54): Pfam Name: Ribosomal protein L19e Pfam Description: Ribosomal protein L19e
  misc_feature (1)..(108): Homolog of NCBI NO: 40643028 NR Description: ribosomal protein L19 [Crassostrea gigas]
  misc_feature (1)..(87): Homolog of NCBI NO: 28630352 NR Description: ribosomal protein L19 [Branchiostoma lanceolatum]
  misc_feature (1)..(87): Homolog of NCBI NO: 28200276 NR Description: ribosomal protein L19 [Branchiostoma belcheri
  misc_feature (1)..(113): Homolog of NCBI NO: 15228314 NR Description: 60S ribosomal protein L19 (RPL19B) [Arabidopsis
  misc_feature (1)..(106): Homolog of NCBI NO: 7440943 NR Description: ribosomal protein L19.T2H3.3 - Arabidopsis
  misc_feature (1)..(116): Homolog of NCBI NO: 15235290 NR Description: 60S ribosomal protein L19 (RPL19C) [Arabidopsis
  misc_feature (1)..(109): Homolog of NCBI NO: 40287526 NR Description: 60S ribosomal protein L19 [Capsicum annuum]
  misc_feature (1)..(116): Homolog of NCBI NO: 18087585 NR Description: At1g02780/T14P4_3 [Arabidopsis thaliana]
  misc_feature (1)..(116): Homolog of NCBI NO: 15218602 NR Description: 60S ribosomal protein L19 (RPL19A) [Arabidopsis
  misc_feature (1)..(113): Homolog of NCBI NO: 29837764 NR Description: putative ribosomal protein L19
MRRMRVLRRLLRKYREAKKIDKHMYHDMYLKVKGNMFKNKRVLMESIHKSKAEKAREKTLSDQFEAKRAKSKASRERKHARREERLAQGPRDHAPAPAAAAPAPAAAAPKKAKAKK

SEQ ID NO: 68023 - DNA, 578 bp, Triticum aestivum
  misc_feature (1)..(578): Ceres Seq. ID no. 13596299
aaaccctagctcgttccccttctagccttaaaccttcttcccccatctcacgaaaaagggcaacatctaagcggcggcggcggcgggcggtgaccatggcggagctgaagcggctgtcggagagccgcgacctaacccgcatcgagcggataggtgcgcactcccacatccgggggctggggctggactcctccatcgaggcccgcgatgcctcggaggggatggtcggccagctccccgcgcgccgcgccgctggactcatcctccagctcatccgccaggggaagatcgccggccgcgccgtcctcctcgcagggcagccggggaccggcaagaccgccctcgccatgggcatcgccaagtcgctcggcgccgagacgcccttcgcctccgtcgctgcctccgagctcttctccctcgacctctccaagaccgaggcgctcacccaggcgttccgccgcgccattggcgttcgcatcaaggaggaagcggagatcattgagggcgaggtcgttgagatctcaatcgaccgccctgtctccgccagtagctcgggcataccttcaggtgctaccgcg

SEQ ID NO: 68024 - protein, 192 aa, Triticum aestivum
  peptide (1)..(192): Ceres Seq. ID no. 13596300
  misc_feature (101)..(150): Pfam Name: ATPase family associated with various cellular Pfam Description: ATPase family associated with various cellular
  misc_feature (41)..(186): Homolog of NCBI NO: 29840994 NR Description: similar to GenBank Accession Number AF151804
  misc_feature (37)..(186): Homolog of NCBI NO: 27819634 NR Description: RuvB-like protein 2 [Danio rerio]
  misc_feature (31)..(186): Homolog of NCBI NO: 30316328 NR Description: RuvB-like 2 (Reptin)
  misc_feature (31)..(186): Homolog of NCBI NO: 29126859 NR Description: Similar to RuvB-like protein 2 [Xenopus laevis]
  misc_feature (31)..(186): Homolog of NCBI NO: 33872272 NR Description: RUVBL2 protein [Homo sapiens]
  misc_feature (31)..(186): Homolog of NCBI NO: 5730023 NR Description: RuvB-like 2
  misc_feature (31)..(186): Homolog of NCBI NO: 4929561 NR Description: CGI-46 protein [Homo sapiens]
  misc_feature (31)..(186): Homolog of NCBI NO: 6755382 NR Description: RuvB-like protein 2 [Mus musculus]
  misc_feature (32)..(184): Homolog of NCBI NO: 15229623 NR Description: RuvB DNA helicase - like protein [Arabidopsis
  misc_feature (32)..(185): Homolog of NCBI NO: 15240788 NR Description: RuvB DNA helicase-related protein [Arabidopsis
TLARSPSSLKPSSPISRKRATSKRRRRRAVTMAELKRLSESRDLTRIERIGAHSHIRGLGLDSSIEARDASEGMVGQLPARRAAGLILQLIRQGKIAGRAVLLAGQPGTGKTALAMGIAKSLGAETPFASVAASELFSLDLSKTEALTQAFRRAIGVRIKEEAEIIEGEVVEISIDRPVSASSSGIPSGATA

SEQ ID NO: 68025 - protein, 161 aa, Triticum aestivum
  peptide (1)..(161): Ceres Seq. ID no. 13596301
  misc_feature (70)..(119): Pfam Name: ATPase family associated with various cellular Pfam Description: ATPase family associated with various cellular
  misc_feature (10)..(155): Homolog of NCBI NO: 29840994 NR Description: similar to GenBank Accession Number AF151804
  misc_feature (6)..(155): Homolog of NCBI NO: 27819634 NR Description: RuvB-like protein 2 [Danio rerio]
  misc_feature (1)..(155): Homolog of NCBI NO: 30316328 NR Description: RuvB-like 2 (Reptin)
  misc_feature (1)..(155): Homolog of NCBI NO: 29126859 NR Description: Similar to RuvB-like protein 2 [Xenopus laevis]
  misc_feature (1)..(155): Homolog of NCBI NO: 33872272 NR Description: RUVBL2 protein [Homo sapiens]
  misc_feature (1)..(155): Homolog of NCBI NO: 5730023 NR Description: RuvB-like 2
  misc_feature (1)..(155): Homolog of NCBI NO: 4929561 NR Description: CGI-46 protein [Homo sapiens]
  misc_feature (1)..(155): Homolog of NCBI NO: 6755382 NR Description: RuvB-like protein 2 [Mus musculus]
  misc_feature (1)..(153): Homolog of NCBI NO: 15229623 NR Description: RuvB DNA helicase - like protein [Arabidopsis
  misc_feature (1)..(154): Homolog of NCBI NO: 15240788 NR Description: RuvB DNA helicase-related protein [Arabidopsis
MAELKRLSESRDLTRIERIGAHSHIRGLGLDSSIEARDASEGMVGQLPARRAAGLILQLIRQGKIAGRAVLLAGQPGTGKTALAMGIAKSLGAETPFASVAASELFSLDLSKTEALTQAFRRAIGVRIKEEAEIIEGEVVEISIDRPVSASSSGIPSGATA

SEQ ID NO: 68026 - protein, 123 aa, Triticum aestivum
  peptide (1)..(123): Ceres Seq. ID no. 13596302
  misc_feature (27)..(80): Pfam Name: Collagen triple helix repeat (20 copies) Pfam Description: Collagen triple helix repeat (20 copies)
  misc_feature (1)..(91): Homolog of NCBI NO: 1076205 NR Description: hypothetical protein WP6 - Chlamydomonas
  misc_feature (1)..(86): Homolog of NCBI NO: 22988596 NR Description: hypothetical protein [Burkholderia fungorum]
  misc_feature (1)..(122): Homolog of NCBI NO: 1076205 NR Description: hypothetical protein WP6 - Chlamydomonas
  misc_feature (1)..(117): Homolog of NCBI NO: 2429362 NR Description: proline rich protein [Santalum album]
MPRRGWSASSPRAAPLDSSSSSSARGRSPAAPSSSQGSRGPARPPSPWASPSRSAPRRPSPPSLPPSSSPSTSPRPRRSPRRSAAPLAFASRRKRRSLRARSLRSQSTALSPPVARAYLQVLP

SEQ ID NO: 68027 - DNA, 1247 bp, Triticum aestivum
  misc_feature (1)..(1247): Ceres Seq. ID no. 13596354
ccgtatatcccaacccaaccccagcaaaagcagtccgcgacttgcgagcagagtacacgacgcgaccgcgagccaaaccctaccgcgaacacgtcggcgatgagctcctccaacggcaacggcgggaagaagccggcaccgtccggcgggcgcgggggcatccgcaccctcgccgacatcaaccgcggcccctccgggttcccaggcgcaggcggcagcggcagcgactccgatgagccccaggagtactacaccggcggcgagaagagtgggatgcttgttcaagatccaacaaggagaaataatgtggactcaatctttgagcaagctagagtgatgggtgctcagcaagttccactgccttcttttgaaggccaatcttccagctcaaccagctttgcaggaacaggtcgtctgctttcaggggatgcgcagacagcaccagctgctcctcaaccaccgcaggatgttcttcacaatatacatttctggaacaatggtttcacagtagatgatggtccactaagagcctatgaggacgctgcaaatgcagacttcattgagagcatcaagaagtcccagtgcccccaagagctggagcctgctgatcgaaggacagctgtccatgtcaatgttataaaacgacatggagattatgaggaacctgcaaggcctcgatcagctttccagggtgttggtagaacccttggtgggtcttcagcagatgagagtcctgcaccagctcctgtgacacaagagccccacggtgctcccaggtcaattggcatagttgtggacgactcgcagccctttacatccatacagctaaggttagcggacggcactcgcatggtcgctcggtttaaccttaaccacaccgtgggcgacatcaggtctttcattgatgcatcccgcccaggagctgcgcggccgtatcagttgcagactggcttcccacccaagcagctgactgaccctacgcagactgttgaccaagctggactcaagaactccgttatcatgcagaagatgtagttctcaccgagctggatctgtcgcacagaatgtctttccgatgcaattattaaattagtgctgctgaatggtttatcatgtccactagatactgcactttgcatgcaacctgtgatgtactggttgttttgtcgataaacgtcagtggagtctatattcgtcttgctaccaattatgaatgtctatcaaagttaatgaatgtccggttgtct

SEQ ID NO: 68028 - protein, 344 aa, Triticum aestivum
  peptide (1)..(344): Ceres Seq. ID no. 13596355
  misc_feature (266)..(343): Pfam Name: UBX domain Pfam Description: UBX domain
  misc_feature (76)..(344): Homolog of NCBI NO: 20149635 NR Description: p47 protein [Homo sapiens]
  misc_feature (2)..(325): Homolog of NCBI NO: 40739694 NR Description: hypothetical protein AN8228.2 [Aspergillus
  misc_feature (7)..(340): Homolog of NCBI NO: 7485149 NR Description: hypothetical protein - Arabidopsis thaliana
  misc_feature (43)..(343): Homolog of NCBI NO: 15234731 NR Description: expressed protein [Arabidopsis thaliana]
  misc_feature (7)..(343): Homolog of NCBI NO: 15292665 NR Description: putative phosphatase [Arabidopsis thaliana]
  misc_feature (7)..(343): Homolog of NCBI NO: 18414442 NR Description: phosphatase like protein [Arabidopsis thaliana]
  misc_feature (42)..(343): Homolog of NCBI NO: 13123657 NR Description: phosphatase-like protein Mtc923 [Medicago
  misc_feature (1)..(344): Homolog of NCBI NO: 13123659 NR Description: phosphatase-like protein Psc923 [Pisum sativum]
  misc_feature (43)..(343): Homolog of NCBI NO: 7487458 NR Description: hypothetical protein T27D20.10 - Arabidopsis
  misc_feature (43)..(343): Homolog of NCBI NO: 18412499 NR Description: membrane trafficking factor -related [Arabidopsis
PYIPTQPQQKQSATCEQSTRRDREPNPTANTSAMSSSNGNGGKKPAPSGGRGGIRTLADINRGPSGFPGAGGSGSDSDEPQEYYTGGEKSGMLVQDPTRRNNVDSIFEQARVMGAQQVPLPSFEGQSSSSTSFAGTGRLLSGDAQTAPAAPQPPQDVLHNIHFWNNGFTVDDGPLRAYEDAANADFIESIKKSQCPQELEPADRRTAVHVNVIKRHGDYEEPARPRSAFQGVGRTLGGSSADESPAPAPVTQEPHGAPRSIGIVVDDSQPFTSIQLRLADGTRMVARFNLNHTVGDIRSFIDASRPGAARPYQLQTGFPPKQLTDPTQTVDQAGLKNSVIMQKM

SEQ ID NO: 68029 - protein, 311 aa, Triticum aestivum
  peptide (1)..(311): Ceres Seq. ID no. 13596356
  misc_feature (233)..(310): Pfam Name: UBX domain Pfam Description: UBX domain
  misc_feature (43)..(311): Homolog of NCBI NO: 20149635 NR Description: p47 protein [Homo sapiens]
  misc_feature (1)..(292): Homolog of NCBI NO: 40739694 NR Description: hypothetical protein AN8228.2 [Aspergillus
  misc_feature (1)..(307): Homolog of NCBI NO: 7485149 NR Description: hypothetical protein - Arabidopsis thaliana
  misc_feature (10)..(310): Homolog of NCBI NO: 15234731 NR Description: expressed protein [Arabidopsis thaliana]
  misc_feature (1)..(310): Homolog of NCBI NO: 15292665 NR Description: putative phosphatase [Arabidopsis thaliana]
  misc_feature (1)..(310): Homolog of NCBI NO: 18414442 NR Description: phosphatase like protein [Arabidopsis thaliana]
  misc_feature (9)..(310): Homolog of NCBI NO: 13123657 NR Description: phosphatase-like protein Mtc923 [Medicago
  misc_feature (1)..(311): Homolog of NCBI NO: 13123659 NR Description: phosphatase-like protein Psc923 [Pisum sativum]
  misc_feature (10)..(310): Homolog of NCBI NO: 7487458 NR Description: hypothetical protein T27D20.10 - Arabidopsis
  misc_feature (10)..(310): Homolog of NCBI NO: 18412499 NR Description: membrane trafficking factor -related [Arabidopsis
MSSSNGNGGKKPAPSGGRGGIRTLADINRGPSGFPGAGGSGSDSDEPQEYYTGGEKSGMLVQDPTRRNNVDSIFEQARVMGAQQVPLPSFEGQSSSSTSFAGTGRLLSGDAQTAPAAPQPPQDVLHNIHFWNNGFTVDDGPLRAYEDAANADFIESIKKSQCPQELEPADRRTAVHVNVIKRHGDYEEPARPRSAFQGVGRTLGGSSADESPAPAPVTQEPHGAPRSIGIVVDDSQPFTSIQLRLADGTRMVARFNLNHTVGDIRSFIDASRPGAARPYQLQTGFPPKQLTDPTQTVDQAGLKNSVIMQKM

SEQ ID NO: 68030 - protein, 253 aa, Triticum aestivum
  peptide (1)..(253): Ceres Seq. ID no. 13596357
  misc_feature (175)..(252): Pfam Name: UBX domain Pfam Description: UBX domain
  misc_feature (1)..(253): Homolog of NCBI NO: 20149635 NR Description: p47 protein [Homo sapiens]
  misc_feature (1)..(234): Homolog of NCBI NO: 40739694 NR Description: hypothetical protein AN8228.2 [Aspergillus
  misc_feature (1)..(249): Homolog of NCBI NO: 7485149 NR Description: hypothetical protein - Arabidopsis thaliana
  misc_feature (1)..(252): Homolog of NCBI NO: 15234731 NR Description: expressed protein [Arabidopsis thaliana]
  misc_feature (1)..(252): Homolog of NCBI NO: 15292665 NR Description: putative phosphatase [Arabidopsis thaliana]
  misc_feature (1)..(252): Homolog of NCBI NO: 18414442 NR Description: phosphatase like protein [Arabidopsis thaliana]
  misc_feature (1)..(252): Homolog of NCBI NO: 13123657 NR Description: phosphatase-like protein Mtc923 [Medicago
  misc_feature (1)..(253): Homolog of NCBI NO: 13123659 NR Description: phosphatase-like protein Psc923 [Pisum sativum]
  misc_feature (1)..(252): Homolog of NCBI NO: 7487458 NR Description: hypothetical protein T27D20.10 - Arabidopsis
  misc_feature (1)..(252): Homolog of NCBI NO: 18412499 NR Description: membrane trafficking factor -related [Arabidopsis
MLVQDPTRRNNVDSIFEQARVMGAQQVPLPSFEGQSSSSTSFAGTGRLLSGDAQTAPAAPQPPQDVLHNIHFWNNGFTVDDGPLRAYEDAANADFIESIKKSQCPQELEPADRRTAVHVNVIKRHGDYEEPARPRSAFQGVGRTLGGSSADESPAPAPVTQEPHGAPRSIGIVVDDSQPFTSIQLRLADGTRMVARFNLNHTVGDIRSFIDASRPGAARPYQLQTGFPPKQLTDPTQTVDQAGLKNSVIMQKM

SEQ ID NO: 68031 - DNA, 1704 bp, Triticum aestivum
  misc_feature (1)..(1704): Ceres Seq. ID no. 12627133
acagtagaccacggtcacggacagcggcgacctccttcacagcgtcgctttgccgccggccgtagaaaccctgcaccgccgccgtttggtttcgaattgaatcgggctctgttgatgggcagcttgcgcgctccgcctcagctcgccggcggtaccagccttggtcgcggttaccggccctgtcttgcctcctccggggtccccaaatccaaagtgctgagtgttagctgcccgatgaagtcctataggctgtccgatctcagcgatgccgaggttagcggcctcaaggcgcgccctcgcattgacttcacctccattttcagcacggtgaatccgattgttgaagatgtgcgcgtcagaggtgatgctgcggttaaggattatacagaaaagtttgacaaggtcactctcgataatgccgttgtgcgtgttagcgatctcccagatgcagagcttgatccagctgttaaggaagcctttgatgtggcgtatgacaacatttatgccttccatgtttcacaaaagtcgccagaaaagacagttgagaatatgaaaggcgtgagatgtaaaaggataacaagatgcattggttctgtcgggctgtatgttccagggggcactgcagtcttgccttcaactgcattgatgcttgctgtgcctgcacagattgctggatgcaaaactgtagttcttgccacaccccctagttgtgatggtagcatatgtaaggaggttctttactgtgccaaaaaagctggtgttacacacatactaaaagctgggggagctcaggcaatctccgctatggcatggggaaccgcatcatgcccaaaggttgagaaaatatttggtcctggcaaccagtatgtcacagctgctaaaatgattcttcagaacagcgaagctatggtctctatagacatgcctgctggcccttcagaagttctggtaattgctgacaaatatgccaacccagttcatgttgccgctgatctgctatctcaggcagaacatggcccagatagtcaggttgttctagttattgctggagatggtgttgatttaggtgccattgaagcagaagttagcaagcagtgcgatgctcttcctagaggcgactttgcttccaaagcacttggccacagtttcactgtgtttgccagagatatggttgaggcattatcgttctcaaatatgtatgctcctgagcatttgatcatcaacgtaaaggatgctgagcaatgggaggagctcatcgagaacgcagggtcagttttcttgggacaatggacccccgagagcgtgggtgactatgccagtgggacgaaccacgtcctcccaacctacggttacgcgaggatgtacagcggtgtgtcgctgaactctttcctcaagtacatcactgttcaatccctgactgaagaagggctgagaaggctgggcccctacgtcgcaaagatggcagaagtcgaagggctagaagcgcacaagcgagctgttaccctcagactgcaagaggtcgaagccactgtaactgtgtaaactgttagcatggtctgttgtgccagtctatttgatgcttggggactgatatttttcttcatttttatcggatggaacttgccagagtttaaggtgaagaatacgaagctgtttcatggaataatgctacttatgtcgatctgttaaatgaataaacttgtg

SEQ ID NO: 68032 - protein, 513 aa, Triticum aestivum
  peptide (1)..(513): Ceres Seq. ID no. 12627134
  misc_feature (92)..(505): Pfam Name: Histidinol dehydrogenase Pfam Description: Histidinol dehydrogenase
  misc_feature (81)..(503): Homolog of NCBI NO: 19112678 NR Description: histidinol dehydrogenase [Schizosaccharomyces
  misc_feature (105)..(504): Homolog of NCBI NO: 40746471 NR Description: hypothetical protein AN0797.2 [Aspergillus
  misc_feature (69)..(504): Homolog of NCBI NO: 31095443 NR Description: HIS4 [Hebeloma cylindrosporum]
  misc_feature (79)..(509): Homolog of NCBI NO: 21593566 NR Description: histidinol dehydrogenase [Arabidopsis thaliana]
  misc_feature (60)..(509): Homolog of NCBI NO: 3982577 NR Description: histidinol dehydrogenase [Thlaspi goesingense]
  misc_feature (75)..(512): Homolog of NCBI NO: 123178 NR Description: Histidinol dehydrogenase, chloroplast precursor
  misc_feature (75)..(509): Homolog of NCBI NO: 30697915 NR Description: histidinol dehydrogenase [Arabidopsis thaliana]
  misc_feature (75)..(509): Homolog of NCBI NO: 30697913 NR Description: histidinol dehydrogenase [Arabidopsis thaliana]
  misc_feature (64)..(509): Homolog of NCBI NO: 10177677 NR Description: histidinol dehydrogenase [Arabidopsis thaliana]
  misc_feature (74)..(513): Homolog of NCBI NO: 34904356 NR Description: unnamed protein product [Oryza sativa (japonica
TVDHGHGQRRPPSQRRFAAGRRNPAPPPFGFELNRALLMGSLRAPPQLAGGTSLGRGYRPCLASSGVPKSKVLSVSCPMKSYRLSDLSDAEVSGLKARPRIDFTSIFSTVNPIVEDVRVRGDAAVKDYTEKFDKVTLDNAVVRVSDLPDAELDPAVKEAFDVAYDNIYAFHVSQKSPEKTVENMKGVRCKRITRCIGSVGLYVPGGTAVLPSTALMLAVPAQIAGCKTVVLATPPSCDGSICKEVLYCAKKAGVTHILKAGGAQAISAMAWGTASCPKVEKIFGPGNQYVTAAKMILQNSEAMVSIDMPAGPSEVLVIADKYANPVHVAADLLSQAEHGPDSQVVLVIAGDGVDLGAIEAEVSKQCDALPRGDFASKALGHSFTVFARDMVEALSFSNMYAPEHLIINVKDAEQWEELIENAGSVFLGQWTPESVGDYASGTNHVLPTYGYARMYSGVSLNSFLKYITVQSLTEEGLRRLGPYVAKMAEVEGLEAHKRAVTLRLQEVEATVTV

SEQ ID NO: 68033 - protein, 475 aa, Triticum aestivum
  peptide (1)..(475): Ceres Seq. ID no. 12627135
  misc_feature (54)..(467): Pfam Name: Histidinol dehydrogenase Pfam Description: Histidinol dehydrogenase
  misc_feature (43)..(465): Homolog of NCBI NO: 19112678 NR Description: histidinol dehydrogenase [Schizosaccharomyces
  misc_feature (67)..(466): Homolog of NCBI NO: 40746471 NR Description: hypothetical protein AN0797.2 [Aspergillus
  misc_feature (31)..(466): Homolog of NCBI NO: 31095443 NR Description: HIS4 [Hebeloma cylindrosporum]
  misc_feature (41)..(471): Homolog of NCBI NO: 21593566 NR Description: histidinol dehydrogenase [Arabidopsis thaliana]
  misc_feature (22)..(471): Homolog of NCBI NO: 3982577 NR Description: histidinol dehydrogenase [Thlaspi goesingense]
  misc_feature (37)..(474): Homolog of NCBI NO: 123178 NR Description: Histidinol dehydrogenase, chloroplast precursor
  misc_feature (37)..(471): Homolog of NCBI NO: 30697915 NR Description: histidinol dehydrogenase [Arabidopsis thaliana]
  misc_feature (37)..(471): Homolog of NCBI NO: 30697913 NR Description: histidinol dehydrogenase [Arabidopsis thaliana]
  misc_feature (26)..(471): Homolog of NCBI NO: 10177677 NR Description: histidinol dehydrogenase [Arabidopsis thaliana]
  misc_feature (36)..(475): Homolog of NCBI NO: 34904356 NR Description: unnamed protein product [Oryza sativa (japonica
MGSLRAPPQLAGGTSLGRGYRPCLASSGVPKSKVLSVSCPMKSYRLSDLSDAEVSGLKARPRIDFTSIFSTVNPIVEDVRVRGDAAVKDYTEKFDKVTLDNAVVRVSDLPDAELDPAVKEAFDVAYDNIYAFHVSQKSPEKTVENMKGVRCKRITRCIGSVGLYVPGGTAVLPSTALMLAVPAQIAGCKTVVLATPPSCDGSICKEVLYCAKKAGVTHILKAGGAQAISAMAWGTASCPKVEKIFGPGNQYVTAAKMILQNSEAMVSIDMPAGPSEVLVIADKYANPVHVAADLLSQAEHGPDSQVVLVIAGDGVDLGAIEAEVSKQCDALPRGDFASKALGHSFTVFARDMVEALSFSNMYAPEHLIINVKDAEQWEELIENAGSVFLGQWTPESVGDYASGTNHVLPTYGYARMYSGVSLNSFLKYITVQSLTEEGLRRLGPYVAKMAEVEGLEAHKRAVTLRLQEVEATVTV

SEQ ID NO: 68034 - protein, 435 aa, Triticum aestivum
  peptide (1)..(435): Ceres Seq. ID no. 12627136
  misc_feature (14)..(427): Pfam Name: Histidinol dehydrogenase Pfam Description: Histidinol dehydrogenase
  misc_feature (3)..(425): Homolog of NCBI NO: 19112678 NR Description: histidinol dehydrogenase [Schizosaccharomyces
  misc_feature (27)..(426): Homolog of NCBI NO: 40746471 NR Description: hypothetical protein AN0797.2 [Aspergillus
  misc_feature (1)..(426): Homolog of NCBI NO: 31095443 NR Description: HIS4 [Hebeloma cylindrosporum]
  misc_feature (1)..(431): Homolog of NCBI NO: 21593566 NR Description: histidinol dehydrogenase [Arabidopsis thaliana]
  misc_feature (1)..(431): Homolog of NCBI NO: 3982577 NR Description: histidinol dehydrogenase [Thlaspi goesingense]
  misc_feature (1)..(434): Homolog of NCBI NO: 123178 NR Description: Histidinol dehydrogenase, chloroplast precursor
  misc_feature (1)..(431): Homolog of NCBI NO: 30697915 NR Description: histidinol dehydrogenase [Arabidopsis thaliana]
  misc_feature (1)..(431): Homolog of NCBI NO: 30697913 NR Description: histidinol dehydrogenase [Arabidopsis thaliana]
  misc_feature (1)..(431): Homolog of NCBI NO: 10177677 NR Description: histidinol dehydrogenase [Arabidopsis thaliana]
  misc_feature (1)..(435): Homolog of NCBI NO: 34904356 NR Description: unnamed protein product [Oryza sativa (japonica
MKSYRLSDLSDAEVSGLKARPRIDFTSIFSTVNPIVEDVRVRGDAAVKDYTEKFDKVTLDNAVVRVSDLPDAELDPAVKEAFDVAYDNIYAFHVSQKSPEKTVENMKGVRCKRITRCIGSVGLYVPGGTAVLPSTALMLAVPAQIAGCKTVVLATPPSCDGSICKEVLYCAKKAGVTHILKAGGAQAISAMAWGTASCPKVEKIFGPGNQYVTAAKMILQNSEAMVSIDMPAGPSEVLVIADKYANPVHVAADLLSQAEHGPDSQVVLVIAGDGVDLGAIEAEVSKQCDALPRGDFASKALGHSFTVFARDMVEALSFSNMYAPEHLIINVKDAEQWEELIENAGSVFLGQWTPESVGDYASGTNHVLPTYGYARMYSGVSLNSFLKYITVQSLTEEGLRRLGPYVAKMAEVEGLEAHKRAVTLRLQEVEATVTV

SEQ ID NO: 68035 - DNA, 797 bp, Triticum aestivum
  misc_feature (1)..(797): Ceres Seq. ID no. 12584421
aacagggaagcgaaggcggcggcgcgggcgacgagcggagacgacgactgccggctgccgccttctctccggccaaagaaaccataggtggcaggaggatggaggtgaagctcaaggacctcgtcccggcagcgactaacacagtgaacacgacgttcatcgtggttgacaaggcgccacgcccgacccacgcaaacgcgcacggcagggaggagacatgcccgtcactagtggctgacgagacggcagcggtgcatttccttctgtggggcaccgagtgcgatgccttcgagtctggggacatcgtgcggctcacgagtggcatcttctcgtaccatagaggcaacaacctgttcttgcgcgccgggaagcgaggacgaatggagaaggtgggcgagttcaccatgatgttcgtcgagacgcccaacatgagcgaggtgaggtgggggcccgatccaggcgacccaaggaagatggtgcaggaggctgtcgtgtcgccctactcccaagtcttcaagccgctgcattgatgcctatcatttcaggcttccagctcattgttgctaagtctcattaaatcatatgcaatagtgcaatactaaccgtggtagtaaattatgcaacactaaccacttgctgagttttgtatgctttctccttaaaatgtcactgggccatcgttctaatgtcttgagatgtttctcatgtaaacggagctcatagaagatttagctagccaaaagtatatcccaagctgtgttgatgtgaacaacagtgtactttttccctgaaatgtc

SEQ ID NO: 68036 - protein, 175 aa, Triticum aestivum
  peptide (1)..(175): Ceres Seq. ID no. 12584422
  misc_feature (77)..(143): Pfam Name: OB-fold nucleic acid binding domain Pfam Description: OB-fold nucleic acid binding domain
  misc_feature (35)..(166): Homolog of NCBI NO: 20129311 NR Description: CG5181-PA [Drosophila melanogaster]
  misc_feature (37)..(160): Homolog of NCBI NO: 26340138 NR Description: unnamed protein product [Mus musculus]
  misc_feature (37)..(160): Homolog of NCBI NO: 30844321 NR Description: RIKEN cDNA 5830411E10 [Mus musculus]
  misc_feature (37)..(160): Homolog of NCBI NO: 16877754 NR Description: Similar to RIKEN cDNA 4930434H03 gene [Homo
  misc_feature (34)..(145): Homolog of NCBI NO: 34862206 NR Description: similar to RIKEN cDNA 2610036N15 [Rattus
  misc_feature (34)..(145): Homolog of NCBI NO: 13129048 NR Description: hypothetical protein MGC2731 [Homo sapiens]
  misc_feature (34)..(166): Homolog of NCBI NO: 28076937 NR Description: RIKEN cDNA 2610036N15 [Mus musculus]
  misc_feature (33)..(174): Homolog of NCBI NO: 15242865 NR Description: unknown protein; protein id: At5g63690.1
  misc_feature (35)..(174): Homolog of NCBI NO: 34898750 NR Description: hypothetical protein~similar to Arabidopsis
  misc_feature (35)..(174): Homolog of NCBI NO: 34898746 NR Description: hypothetical protein~similar to Arabidopsis
QGSEGGGAGDERRRRLPAAAFSPAKETIGGRRMEVKLKDLVPAATNTVNTTFIVVDKAPRPTHANAHGREETCPSLVADETAAVHFLLWGTECDAFESGDIVRLTSGIFSYHRGNNLFLRAGKRGRMEKVGEFTMMFVETPNMSEVRWGPDPGDPRKMVQEAVVSPYSQVFKPLH

SEQ ID NO: 68037 - protein, 143 aa, Triticum aestivum
  peptide (1)..(143): Ceres Seq. ID no. 12584423
  misc_feature (45)..(111): Pfam Name: OB-fold nucleic acid binding domain Pfam Description: OB-fold nucleic acid binding domain
  misc_feature (3)..(134): Homolog of NCBI NO: 20129311 NR Description: CG5181-PA [Drosophila melanogaster]
  misc_feature (5)..(128): Homolog of NCBI NO: 26340138 NR Description: unnamed protein product [Mus musculus]
  misc_feature (5)..(128): Homolog of NCBI NO: 30844321 NR Description: RIKEN cDNA 5830411E10 [Mus musculus]
  misc_feature (5)..(128): Homolog of NCBI NO: 16877754 NR Description: Similar to RIKEN cDNA 4930434H03 gene [Homo
  misc_feature (2)..(113): Homolog of NCBI NO: 34862206 NR Description: similar to RIKEN cDNA 2610036N15 [Rattus
  misc_feature (2)..(113): Homolog of NCBI NO: 13129048 NR Description: hypothetical protein MGC2731 [Homo sapiens]
  misc_feature (2)..(134): Homolog of NCBI NO: 28076937 NR Description: RIKEN cDNA 2610036N15 [Mus musculus]
  misc_feature (1)..(142): Homolog of NCBI NO: 15242865 NR Description: unknown protein; protein id: At5g63690.1
  misc_feature (3)..(142): Homolog of NCBI NO: 34898750 NR Description: hypothetical protein~similar to Arabidopsis
  misc_feature (3)..(142): Homolog of NCBI NO: 34898746 NR Description: hypothetical protein~similar to Arabidopsis
MEVKLKDLVPAATNTVNTTFIVVDKAPRPTHANAHGREETCPSLVADETAAVHFLLWGTECDAFESGDIVRLTSGIFSYHRGNNLFLRAGKRGRMEKVGEFTMMFVETPNMSEVRWGPDPGDPRKMVQEAVVSPYSQVFKPLH

SEQ ID NO: 68038 - DNA, 613 bp, Triticum aestivum
  misc_feature (1)..(613): Ceres Seq. ID no. 12584462
atagattccaaagccagccaaccatctaatcagtaatggaggggctcatcccgttcgtctacaaggccatcaaggagcggcgcacccggagctactccaggtgcggctcggcgcgcggcgccgccgtcgcggacgaggacgacgtctgggagcagcagaagcagcagtgggcggcggcggacggcgcggggagggaggcggggcaccggcggcaccggtcgctggaggagctggccggcgaggtgggctccgcggcgcccgagtggccggcccgcggggcgatgcgccggggccggagcgccaggatcttctcctgcatcggcggcatgtgatcaatacgtatgaatgatacgtgctgctggtgctctgcctgctttgtttagctactactttagccgtgcctgtaaggtaaggttcatggtgatttgaagacgaagagtagtacgtagaagagtctgtgtggtgcgcgcgtgttgtgtgtactccagccaaagtgtatatacatgggtttgatgatgctgaagatgtaaaaactggtggtgcatgctcgtttgagcctgtccaaccgatggtactgcacgaatggactcgtttgcaagctacgtgttcaggg

SEQ ID NO: 68039 - protein, 98 aa, Triticum aestivum
  peptide (1)..(98): Ceres Seq. ID no. 12584463
  misc_feature (1)..(82): Homolog of NCBI NO: 34907500 NR Description: B1099D03.20 [Oryza sativa (japonica
MEGLIPFVYKAIKERRTRSYSRCGSARGAAVADEDDVWEQQKQQWAAADGAGREAGHRRHRSLEELAGEVGSAAPEWPARGAMRRGRSARIFSCIGGM

SEQ ID NO: 68040 - DNA, 1245 bp, Triticum aestivum
  misc_feature (1)..(1245): Ceres Seq. ID no. 13598327
acacacaggcagaatatggagaccaagcagagcacagaagggaaatggtcgcacgggaagaccatgccggtgaagaacgtccaggcgctggccgcggacgcggcggagctgacggaggaggccatcaagcggtacatcaggccggcgagggccgacgatgtcgtcgttgctgctcacggcgataatagcagccagagcattcctgtgatcgaccttggtaggctccttgatccccggagctatcagctggaggcggccaggctcaggtccgcatgtgaggagtggggcttcttccaggtgaaaaaccatgaaattcctgacacagttcttgaaaacatgaggaacgacctcgagcacttcttcaggcttcccctcgatgagaagaacagatttggccagttgcctggagacctccaaggctatggccaagcatttgttgagtccgaacatcaaacgctcgactggtgtgacaggctttacctagtgacccagccacctcacgatcgtgaaatgagaccatggcctacaactcctgtcagcttcagggaatccattgagtcgtactcctctgagctgatgagggtgactggctcgctcatggcaatcatcgctagaaacctaggcgttgatctccccagtgatacatacgtgagtcaggcattgaggatgacctactaccctgcatgccccgtggctcatgataaggttttggggatttcaccacattccgacatttctatgctaacgctggtatgggagttgaatatggtgggagggctccagatcaagagacaagatgcatgggtgccggtaaaaccccacccccaaggcattggtggtgaatgttggtgactttcttgagataatgacaaacggaaagtaccaaagcattgagcacagggtcaccgttaatcctcacaaggagaggatgtccatttctgcttttcacctcccaaagtttgatatgagcgtgggcccattatctgaaatagttggggccgagctcaagaaatacaagaccctgagggtggacgaggttgctaaggttgttttctcgagcaaacttgacggcaagaaaaccaaggactatgccatgcttagagtctgagtctacaagagcagaaacttggagcagaaatttcgacagccgtatataggcctgaaacatttgcgctgctccattttggtcatggttaattggccgatgtatatgaatgtgaactaataaatgtatccagatgtgag

SEQ ID NO: 68041 - protein, 283 aa, Triticum aestivum
  peptide (1)..(283): Ceres Seq. ID no. 15222308
  misc_feature (217)..(278): Pfam Name: 2OG-Fe(II) oxygenase superfamily Pfam Description: 2OG-Fe(II) oxygenase superfamily
  misc_feature (6)..(275): Homolog of NCBI NO: 15219988 NR Description: oxidoreductase, 2OG-Fe(II) oxygenase family
  misc_feature (43)..(278): Homolog of NCBI NO: 18402992 NR Description: oxidoreductase, 2OG-Fe(II) oxygenase family
  misc_feature (13)..(278): Homolog of NCBI NO: 15235017 NR Description: oxidoreductase, 2OG-Fe(II) oxygenase family
  misc_feature (25)..(275): Homolog of NCBI NO: 37536820 NR Description: putative ethylene-forming enzyme
  misc_feature (21)..(271): Homolog of NCBI NO: 37536808 NR Description: putative ethylene-forming enzyme
  misc_feature (20)..(273): Homolog of NCBI NO: 34895204 NR Description: P0463A02.24 [Oryza sativa (japonica
  misc_feature (21)..(272): Homolog of NCBI NO: 37536792 NR Description: putative dioxygenase [Oryza sativa (japonica
  misc_feature (21)..(275): Homolog of NCBI NO: 37536796 NR Description: putative dioxygenase [Oryza sativa (japonica
  misc_feature (21)..(277): Homolog of NCBI NO: 37536804 NR Description: putative ethylene-forming enzyme
  misc_feature (21)..(277): Homolog of NCBI NO: 37536802 NR Description: putative ethylene-forming enzyme
THRQNMETKQSTEGKWSHGKTMPVKNVQALAADAAELTEEAIKRYIRPARADDVVVAAHGDNSSQSIPVIDLGRLLDPRSYQLEAARLRSACEEWGFFQVKNHEIPDTVLENMRNDLEHFFRLPLDEKNRFGQLPGDLQGYGQAFVESEHQTLDWCDRLYLVTQPPHDREMRPWPTTPVSFRESIESYSSELMRVTGSLMAIIARNLGVDLPSDTYVSQALRMTYYPACPVAHDKVLGISPHSDISMLTLVWELNMVGGLQIKRQDAWVPVKPHPQGIGGECW

SEQ ID NO: 68042 - protein, 278 aa, Triticum aestivum
  peptide (1)..(278): Ceres Seq. ID no. 15222309
  misc_feature (212)..(273): Pfam Name: 2OG-Fe(II) oxygenase superfamily Pfam Description: 2OG-Fe(II) oxygenase superfamily
  misc_feature (1)..(270): Homolog of NCBI NO: 15219988 NR Description: oxidoreductase, 2OG-Fe(II) oxygenase family
  misc_feature (38)..(273): Homolog of NCBI NO: 18402992 NR Description: oxidoreductase, 2OG-Fe(II) oxygenase family
  misc_feature (8)..(273): Homolog of NCBI NO: 15235017 NR Description: oxidoreductase, 2OG-Fe(II) oxygenase family
  misc_feature (20)..(270): Homolog of NCBI NO: 37536820 NR Description: putative ethylene-forming enzyme
  misc_feature (16)..(266): Homolog of NCBI NO: 37536808 NR Description: putative ethylene-forming enzyme
  misc_feature (15)..(268): Homolog of NCBI NO: 34895204 NR Description: P0463A02.24 [Oryza sativa (japonica
  misc_feature (16)..(267): Homolog of NCBI NO: 37536792 NR Description: putative dioxygenase [Oryza sativa (japonica
  misc_feature (16)..(270): Homolog of NCBI NO: 37536796 NR Description: putative dioxygenase [Oryza sativa (japonica
  misc_feature (16)..(272): Homolog of NCBI NO: 37536804 NR Description: putative ethylene-forming enzyme
  misc_feature (16)..(272): Homolog of NCBI NO: 37536802 NR Description: putative ethylene-forming enzyme
METKQSTEGKWSHGKTMPVKNVQALAADAAELTEEAIKRYIRPARADDVVVAAHGDNSSQSIPVIDLGRLLDPRSYQLEAARLRSACEEWGFFQVKNHEIPDTVLENMRNDLEHFFRLPLDEKNRFGQLPGDLQGYGQAFVESEHQTLDWCDRLYLVTQPPHDREMRPWPTTPVSFRESIESYSSELMRVTGSLMAIIARNLGVDLPSDTYVSQALRMTYYPACPVAHDKVLGISPHSDISMLTLVWELNMVGGLQIKRQDAWVPVKPHPQGIGGECW

SEQ ID NO: 68043 - protein, 262 aa, Triticum aestivum
  peptide (1)..(262): Ceres Seq. ID no. 15222310
  misc_feature (196)..(257): Pfam Name: 2OG-Fe(II) oxygenase superfamily Pfam Description: 2OG-Fe(II) oxygenase superfamily
  misc_feature (1)..(254): Homolog of NCBI NO: 15219988 NR Description: oxidoreductase, 2OG-Fe(II) oxygenase family
  misc_feature (22)..(257): Homolog of NCBI NO: 18402992 NR Description: oxidoreductase, 2OG-Fe(II) oxygenase family
  misc_feature (1)..(257): Homolog of NCBI NO: 15235017 NR Description: oxidoreductase, 2OG-Fe(II) oxygenase family
  misc_feature (4)..(254): Homolog of NCBI NO: 37536820 NR Description: putative ethylene-forming enzyme
  misc_feature (1)..(250): Homolog of NCBI NO: 37536808 NR Description: putative ethylene-forming enzyme
  misc_feature (1)..(252): Homolog of NCBI NO: 34895204 NR Description: P0463A02.24 [Oryza sativa (japonica
  misc_feature (1)..(251): Homolog of NCBI NO: 37536792 NR Description: putative dioxygenase [Oryza sativa (japonica
  misc_feature (1)..(254): Homolog of NCBI NO: 37536796 NR Description: putative dioxygenase [Oryza sativa (japonica
  misc_feature (1)..(256): Homolog of NCBI NO: 37536804 NR Description: putative ethylene-forming enzyme
  misc_feature (1)..(256): Homolog of NCBI NO: 37536802 NR Description: putative ethylene-forming enzyme
MPVKNVQALAADAAELTEEAIKRYIRPARADDVVVAAHGDNSSQSIPVIDLGRLLDPRSYQLEAARLRSACEEWGFFQVKNHEIPDTVLENMRNDLEHFFRLPLDEKNRFGQLPGDLQGYGQAFVESEHQTLDWCDRLYLVTQPPHDREMRPWPTTPVSFRESIESYSSELMRVTGSLMAIIARNLGVDLPSDTYVSQALRMTYYPACPVAHDKVLGISPHSDISMLTLVWELNMVGGLQIKRQDAWVPVKPHPQGIGGECW

SEQ ID NO: 68044 - DNA, 1600 bp, Triticum aestivum
  misc_feature (1)..(1600): Ceres Seq. ID no. 13591190
agagcagagcagaacttgaagcagaacagagccaaaaccaacccaaaaagcatttcgtgctaggacagtgaagccatggagaagaccgttgtcctgtaccctggcgtcggcgtcggccacctggtgccgatggtggaggtcgccaagctgttcctcaagcacggcctggccgtcaccgtggtgctcatcgatccgcaggtcgagtccacggacttctccgccgccgtcgcccgcgcgagggcctccaacccctccgtcgccttccacgtcctgccgccgccgcccgccgattccaactccaacagcgcgcccacgcaccccgtcatccagattttccggctcctgaaatccatgaacgctcccctcctcgacttcctccgctcgctgccctccgtcgacgcactcgtcctcgacatgttctgcgtcgacgcccaagatgtcgcggccgagctcaagctgccggtctactacttctacgcgtcggccgccgccgatctcgcgctcttcttcaacctgccgagcaagctcgccggcagtaaggtaaaggagctcggcgactctatcatcactttcccgggtgttcctccgttaaaggcttcggacttacccgaagtcacccacaacgatgaagtactcaaggccatctcaggcatgttcgaccgaatgccagatgccaacggaattctcattaattccttcgagtcgctggagacgcgggcggtgcgcgctctcaaggacgggctctgcgtccctggtcgtgccacgccgccggtctactgcatcgggccgttggtttcgggaggcggagacaaggagcacgagtgcctccggtggctggacgcgcagccggaccagagcgtggtgttcctctccttcggcagcatgggcacgttctccggtaagcagctcgaggagattgcaactggattagaaaagtcaggggagagattcctgtgggtcgtgcggagcccgcgcaatcccgactacaagtacggcgattcgctgccggagcccgatctcgacgcgctcatgccggaagggttcttggagaggaccaaggacagagggctcgtgatcaagtcttgggcgccgcaggtggaggtcctgcgccacagggcgaccggcgcattcatgacgcactgcggctggaactcgacgctggagggcatcacggcagggttgccgctgctgtgctggccgctgtacgcggagcagaaggtgaacaaggtgcacatagtggagggaatgaagctcggggtggagatgagaggctacaacgaagaggtggttaaggccgaggaagtggaggagaaggtcaggtgggttatggcgtccgagggcggcaaggcgctcagggagcgggtggcggcggcgaaggatgcagctgccgaggcgctcaaggaagggggctcgtccgacttggcgtttgtccaattcctcaacgacctggacacttccatagccccaaccgtgcagcattgatgtgaaacttgtaatctttatttaatgttcgattcgtagtagcgggctatctcattttgatattatatgcggactaagtttatttccgaaccctttcgcagctactgttggtttgttc

SEQ ID NO: 68045 - protein, 468 aa, Triticum aestivum
  peptide (1)..(468): Ceres Seq. ID no. 13591191
  misc_feature (4)..(462): Pfam Name: UDP-glucoronosyl and UDP-glucosyl transferase Pfam Description: UDP-glucoronosyl and UDP-glucosyl transferase
  misc_feature (1)..(465): Homolog of NCBI NO: 28380078 NR Description: Hydroquinone glucosyltransferase (Arbutin
  misc_feature (1)..(450): Homolog of NCBI NO: 15234056 NR Description: glycosyltransferase family [Arabidopsis thaliana]
  misc_feature (2)..(455): Homolog of NCBI NO: 18401158 NR Description: glycosyltransferase family [Arabidopsis thaliana]
  misc_feature (2)..(455): Homolog of NCBI NO: 21593785 NR Description: putative glucosyltransferase [Arabidopsis
  misc_feature (3)..(455): Homolog of NCBI NO: 22535568 NR Description: putative glucosyltransferase
  misc_feature (1)..(458): Homolog of NCBI NO: 34910218 NR Description: putative flavonol glucosyltransferase
  misc_feature (1)..(461): Homolog of NCBI NO: 34910222 NR Description: putative flavonol glucosyltransferase
  misc_feature (3)..(461): Homolog of NCBI NO: 34910228 NR Description: putative flavonol glucosyltransferase
  misc_feature (1)..(462): Homolog of NCBI NO: 34910206 NR Description: putative flavonol glucosyltransferase
  misc_feature (1)..(463): Homolog of NCBI NO: 34910204 NR Description: putative flavonol glucosyltransferase
MEKTVVLYPGVGVGHLVPMVEVAKLFLKHGLAVTVVLIDPQVESTDFSAAVARARASNPSVAFHVLPPPPADSNSNSAPTHPVIQIFRLLKSMNAPLLDFLRSLPSVDALVLDMFCVDAQDVAAELKLPVYYFYASAAADLALFFNLPSKLAGSKVKELGDSIITFPGVPPLKASDLPEVTHNDEVLKAISGMFDRMPDANGILINSFESLETRAVRALKDGLCVPGRATPPVYCIGPLVSGGGDKEHECLRWLDAQPDQSVVFLSFGSMGTFSGKQLEEIATGLEKSGERFLWVVRSPRNPDYKYGDSLPEPDLDALMPEGFLERTKDRGLVIKSWAPQVEVLRHRATGAFMTHCGWNSTLEGITAGLPLLCWPLYAEQKVNKVHIVEGMKLGVEMRGYNEEVVKAEEVEEKVRWVMASEGGKALRERVAAAKDAAAEALKEGGSSDLAFVQFLNDLDTSIAPTVQH

SEQ ID NO: 68046 - protein, 450 aa, Triticum aestivum
  peptide (1)..(450): Ceres Seq. ID no. 13591192
  misc_feature (1)..(444): Pfam Name: UDP-glucoronosyl and UDP-glucosyl transferase Pfam Description: UDP-glucoronosyl and UDP-glucosyl transferase
  misc_feature (1)..(447): Homolog of NCBI NO: 28380078 NR Description: Hydroquinone glucosyltransferase (Arbutin
  misc_feature (1)..(432): Homolog of NCBI NO: 15234056 NR Description: glycosyltransferase family [Arabidopsis thaliana]
  misc_feature (1)..(437): Homolog of NCBI NO: 18401158 NR Description: glycosyltransferase family [Arabidopsis thaliana]
  misc_feature (1)..(437): Homolog of NCBI NO: 21593785 NR Description: putative glucosyltransferase [Arabidopsis
  misc_feature (1)..(437): Homolog of NCBI NO: 22535568 NR Description: putative glucosyltransferase
  misc_feature (1)..(440): Homolog of NCBI NO: 34910218 NR Description: putative flavonol glucosyltransferase
  misc_feature (1)..(443): Homolog of NCBI NO: 34910222 NR Description: putative flavonol glucosyltransferase
  misc_feature (1)..(443): Homolog of NCBI NO: 34910228 NR Description: putative flavonol glucosyltransferase
  misc_feature (1)..(444): Homolog of NCBI NO: 34910206 NR Description: putative flavonol glucosyltransferase
  misc_feature (1)..(445): Homolog of NCBI NO: 34910204 NR Description: putative flavonol glucosyltransferase
MVEVAKLFLKHGLAVTVVLIDPQVESTDFSAAVARARASNPSVAFHVLPPPPADSNSNSAPTHPVIQIFRLLKSMNAPLLDFLRSLPSVDALVLDMFCVDAQDVAAELKLPVYYFYASAAADLALFFNLPSKLAGSKVKELGDSIITFPGVPPLKASDLPEVTHNDEVLKAISGMFDRMPDANGILINSFESLETRAVRALKDGLCVPGRATPPVYCIGPLVSGGGDKEHECLRWLDAQPDQSVVFLSFGSMGTFSGKQLEEIATGLEKSGERFLWVVRSPRNPDYKYGDSLPEPDLDALMPEGFLERTKDRGLVIKSWAPQVEVLRHRATGAFMTHCGWNSTLEGITAGLPLLCWPLYAEQKVNKVHIVEGMKLGVEMRGYNEEVVKAEEVEEKVRWVMASEGGKALRERVAAAKDAAAEALKEGGSSDLAFVQFLNDLDTSIAPTVQH

SEQ ID NO: 68047 - protein, 376 aa, Triticum aestivum
  peptide (1)..(376): Ceres Seq. ID no. 13591193
  misc_feature (1)..(370): Pfam Name: UDP-glucoronosyl and UDP-glucosyl transferase Pfam Description: UDP-glucoronosyl and UDP-glucosyl transferase
  misc_feature (1)..(373): Homolog of NCBI NO: 28380078 NR Description: Hydroquinone glucosyltransferase (Arbutin
  misc_feature (1)..(358): Homolog of NCBI NO: 15234056 NR Description: glycosyltransferase family [Arabidopsis thaliana]
  misc_feature (1)..(363): Homolog of NCBI NO: 18401158 NR Description: glycosyltransferase family [Arabidopsis thaliana]
  misc_feature (1)..(363): Homolog of NCBI NO: 21593785 NR Description: putative glucosyltransferase [Arabidopsis
  misc_feature (1)..(363): Homolog of NCBI NO: 22535568 NR Description: putative glucosyltransferase
  misc_feature (1)..(366): Homolog of NCBI NO: 34910218 NR Description: putative flavonol glucosyltransferase
  misc_feature (1)..(369): Homolog of NCBI NO: 34910222 NR Description: putative flavonol glucosyltransferase
  misc_feature (1)..(369): Homolog of NCBI NO: 34910228 NR Description: putative flavonol glucosyltransferase
  misc_feature (1)..(370): Homolog of NCBI NO: 34910206 NR Description: putative flavonol glucosyltransferase
  misc_feature (1)..(371): Homolog of NCBI NO: 34910204 NR Description: putative flavonol glucosyltransferase
MNAPLLDFLRSLPSVDALVLDMFCVDAQDVAAELKLPVYYFYASAAADLALFFNLPSKLAGSKVKELGDSIITFPGVPPLKASDLPEVTHNDEVLKAISGMFDRMPDANGILINSFESLETRAVRALKDGLCVPGRATPPVYCIGPLVSGGGDKEHECLRWLDAQPDQSVVFLSFGSMGTFSGKQLEEIATGLEKSGERFLWVVRSPRNPDYKYGDSLPEPDLDALMPEGFLERTKDRGLVIKSWAPQVEVLRHRATGAFMTHCGWNSTLEGITAGLPLLCWPLYAEQKVNKVHIVEGMKLGVEMRGYNEEVVKAEEVEEKVRWVMASEGGKALRERVAAAKDAAAEALKEGGSSDLAFVQFLNDLDTSIAPTVQH

SEQ ID NO: 68048 - DNA, 1338 bp, Triticum aestivum
  misc_feature (1)..(1338): Ceres Seq. ID no. 13596375
cccccctccagttcgcacgagaccwttacctwgaacatsytwatcagaaaaccccaaaccctgaaaaggtcacgccgccgctgcgactccggccgccggcctcccctcctagatggaacctcagcaagagtcgaccgtcgacggccgcaagaggcggcgtagaggaggagtcgggaaacgccagaaggattcttcttgctcacaacaggcacctccgcctgcccctccagtggatgcggcctcccccctggagaagcggcgtcgcaaggccggcgaggccgccgcaatacccaaggggcgcaagcctgcgagcctactcgaaaagatgcgtgcaaggttatctggaggtcatttcagaatgttaaacgagaaactgtacacttgcagtggccaggatgcatttgactactttaaaaacgagcctgagctttttgacgtgtatcatgcaggatatcaagagcagatgtcacattggccagagcagccagttaatgtgataatcaagtggttgaagagtcataacaaatcatggaccgttgctgattttggatgtggcaatgcagcagttgctaaaaacgtgaagaacaaggtcttctccatcgatcttgtttcagatgacccttcagtgattgcttgtgatatggctcataccccattggagccatcctctgtagatgtggcgatattctgtctttctttgatgggaaccaactttccgagttatctacaggaagctaacagagtcctcaagccaagtggttggcttcttattgcggaagtgaggagtaggctagacccgaacaccggaggtgctgatcctgataagttctccgaagccatcagccagcttggcttttcccttgtttcgaaggatgagaagaacaaaatgtttgtcctgttttatttcaggaaaaaggaaaagagcaaggtggcgaaaaacattgaatggccccagttgaaaccttgcttatacaagcggcgatgatctcatcctccactatggtcgctccagacctcttccagagtgtggttaaattaatcgatgtcttgtgctaaactagtcatccttttctactcctatttcttttacctttgggcagctgtatgttcaaagaatcagaccacaccagatatgacctagtaagcgctgtaactcgaggcagtttagaagtgtattattatacagttctgaatctgcttcatatcttctttcctgggccttgtaaacgagtggaggataagttcaacaaagggcattatttctgcgttacttattatatttgatactccctctgtaaagaaatataagatcgtttaactcgaggcatgatttctttg

SEQ ID NO: 68049 - protein, 290 aa, Triticum aestivum
  peptide (1)..(290): Ceres Seq. ID no. 15221850
  misc_feature (16)..(290): Homolog of NCBI NO: 39587878 NR Description: Hypothetical protein CBG13492 [Caenorhabditis
  misc_feature (23)..(290): Homolog of NCBI NO: 34858882 NR Description: similar to RIKEN cDNA 1500003O22 [Rattus
  misc_feature (55)..(290): Homolog of NCBI NO: 17542244 NR Description: Rrp8p like [Caenorhabditis elegans]
  misc_feature (1)..(290): Homolog of NCBI NO: 26346719 NR Description: unnamed protein product [Mus musculus]
  misc_feature (1)..(290): Homolog of NCBI NO: 20270198 NR Description: RIKEN cDNA 1500003O22 [Mus musculus]
  misc_feature (1)..(290): Homolog of NCBI NO: 12758125 NR Description: KIAA0409 protein [Homo sapiens]
  misc_feature (1)..(290): Homolog of NCBI NO: 2662099 NR Description: KIAA0409 [Homo sapiens]
  misc_feature (253)..(290): Homolog of NCBI NO: 9758079 NR Description: contains similarity to unknown
  misc_feature (6)..(279): Homolog of NCBI NO: 9758079 NR Description: contains similarity to unknown
  misc_feature (6)..(290): Homolog of NCBI NO: 30693618 NR Description: expressed protein [Arabidopsis thaliana]
MEPQQESTVDGRKRRRRGGVGKRQKDSSCSQQAPPPAPPVDAASPLEKRRRKAGEAAAIPKGRKPASLLEKMRARLSGGHFRMLNEKLYTCSGQDAFDYFKNEPELFDVYHAGYQEQMSHWPEQPVNVIIKWLKSHNKSWTVADFGCGNAAVAKNVKNKVFSIDLVSDDPSVIACDMAHTPLEPSSVDVAIFCLSLMGTNFPSYLQEANRVLKPSGWLLIAEVRSRLDPNTGGADPDKFSEAISQLGFSLVSKDEKNKMFVLFYFRKKEKSKVAKNIEWPQLKPCLYKRR

SEQ ID NO: 68050 - protein, 219 aa, Triticum aestivum
  peptide (1)..(219): Ceres Seq. ID no. 15221851
  misc_feature (1)..(219): Homolog of NCBI NO: 39587878 NR Description: Hypothetical protein CBG13492 [Caenorhabditis
  misc_feature (1)..(219): Homolog of NCBI NO: 34858882 NR Description: similar to RIKEN cDNA 1500003O22 [Rattus
  misc_feature (1)..(219): Homolog of NCBI NO: 17542244 NR Description: Rrp8p like [Caenorhabditis elegans]
  misc_feature (1)..(219): Homolog of NCBI NO: 26346719 NR Description: unnamed protein product [Mus musculus]
  misc_feature (1)..(219): Homolog of NCBI NO: 20270198 NR Description: RIKEN cDNA 1500003O22 [Mus musculus]
  misc_feature (1)..(219): Homolog of NCBI NO: 12758125 NR Description: KIAA0409 protein [Homo sapiens]
  misc_feature (1)..(219): Homolog of NCBI NO: 2662099 NR Description: KIAA0409 [Homo sapiens]
  misc_feature (182)..(219): Homolog of NCBI NO: 9758079 NR Description: contains similarity to unknown
  misc_feature (1)..(208): Homolog of NCBI NO: 9758079 NR Description: contains similarity to unknown
  misc_feature (1)..(219): Homolog of NCBI NO: 30693618 NR Description: expressed protein [Arabidopsis thaliana]
MRARLSGGHFRMLNEKLYTCSGQDAFDYFKNEPELFDVYHAGYQEQMSHWPEQPVNVIIKWLKSHNKSWTVADFGCGNAAVAKNVKNKVFSIDLVSDDPSVIACDMAHTPLEPSSVDVAIFCLSLMGTNFPSYLQEANRVLKPSGWLLIAEVRSRLDPNTGGADPDKFSEAISQLGFSLVSKDEKNKMFVLFYFRKKEKSKVAKNIEWPQLKPCLYKRR

SEQ ID NO: 68051 - protein, 208 aa, Triticum aestivum
  peptide (1)..(208): Ceres Seq. ID no. 15221852
  misc_feature (1)..(208): Homolog of NCBI NO: 39587878 NR Description: Hypothetical protein CBG13492 [Caenorhabditis
  misc_feature (1)..(208): Homolog of NCBI NO: 34858882 NR Description: similar to RIKEN cDNA 1500003O22 [Rattus
  misc_feature (1)..(208): Homolog of NCBI NO: 17542244 NR Description: Rrp8p like [Caenorhabditis elegans]
  misc_feature (1)..(208): Homolog of NCBI NO: 26346719 NR Description: unnamed protein product [Mus musculus]
  misc_feature (1)..(208): Homolog of NCBI NO: 20270198 NR Description: RIKEN cDNA 1500003O22 [Mus musculus]
  misc_feature (1)..(208): Homolog of NCBI NO: 12758125 NR Description: KIAA0409 protein [Homo sapiens]
  misc_feature (1)..(208): Homolog of NCBI NO: 2662099 NR Description: KIAA0409 [Homo sapiens]
  misc_feature (171)..(208): Homolog of NCBI NO: 9758079 NR Description: contains similarity to unknown
  misc_feature (1)..(197): Homolog of NCBI NO: 9758079 NR Description: contains similarity to unknown
  misc_feature (1)..(208): Homolog of NCBI NO: 30693618 NR Description: expressed protein [Arabidopsis thaliana]
MLNEKLYTCSGQDAFDYFKNEPELFDVYHAGYQEQMSHWPEQPVNVIIKWLKSHNKSWTVADFGCGNAAVAKNVKNKVFSIDLVSDDPSVIACDMAHTPLEPSSVDVAIFCLSLMGTNFPSYLQEANRVLKPSGWLLIAEVRSRLDPNTGGADPDKFSEAISQLGFSLVSKDEKNKMFVLFYFRKKEKSKVAKNIEWPQLKPCLYKRR

SEQ ID NO: 68052 - DNA, 1456 bp, Triticum aestivum
  misc_feature (1)..(1456): Ceres Seq. ID no. 13502973
accattacctagaacaycctamtcsarwwcacacacgcacaacacaagaaaccgcaggaaaaataataccaagccgaccaatcatggctcgcccccgcctccggctgctcctcgtcgccgccgccgtcctcctcctcctccacccggccctctcctcggcggcggaggggctggaggaccccctcatcgagcaggtggtcgggggcgacgcggagaacgagctggagctcaacgcggaggcgcacttcgcgagcttcgtccggcggttcggcaagtcctacagggacgccgacgagcacgcgcaccggctctccgtgttcagggacaacctccgccgcgcgcgccgccaccagcgcctcgacccctccgcggtgcacggcatcaccaagttctccgacctcacccccgacgagttccgggagcgcttcctcggcctccgcaagtcccgccggagcttcctcaaggggatctccgggtcggcgcacgacgcgccggccctccccaccgacggcctccccacagagttcgactggcgcgagcacggcgcggtcggcccagtcaaggaccagggttcgtgcgggtcgtgctggtccttcagtacgtcgggggcgctggagggtgccaactacctcgccaccggaaagctggaggtgctcagcgagcagcagctggtcgactgcgaccaccagtgtgacccgtcagaaccacgcgcatgtgatgcgggatgcaatggtggcttgatgactacagctttcagctatctcgcaaaagccggtggcttagaaaccgagaaggattacccatacactgggaggaacagtgcctgcaagtttgacaaatccaaaattgctgctcaagttaagaattttagtactgttgctattgacgaagatcagattgccgctaaccttgtgaaacatggcccacttgcaattggtatcaatgcagtattcatgcaaacgtacattggtggtgtctcatgcccatacatctgcggaaggcatcttgatcatggtgttctcctggttggctatggatcagctggttacgcaccgctccgcttcaaggagaaaccatactggatcataaagaactcatggggcgaaaactggggcgagagcgggtactacaagatctgcaggggtccgcatgtcaaaaacaagtgcggtgtcgattccatggtctccacggttaccgccatccatacctctaagaaggaataagatcttgtagtactcagtctggattgcctatagacatgcttgtgtgccaggactaggtattccatgatggttattccagtattgccttgcaattcgtaaccagtaaatatgtgaaacttctcttgattgctgtaatgtatctctgggttgctatgtattgctacgcagttcttggaacatggtagcagatatttgttgccatcattaatgtatataatctggtgttctggttg

SEQ ID NO: 68053 - protein, 406 aa, Triticum aestivum
  peptide (1)..(406): Ceres Seq. ID no. 15223212
  misc_feature (171)..(398): Pfam Name: Papain family cysteine protease Pfam Description: Papain family cysteine protease
  misc_feature (44)..(406): Homolog of NCBI NO: 7211743 NR Description: papain-like cysteine proteinase isoform II
  misc_feature (36)..(406): Homolog of NCBI NO: 7381221 NR Description: papain-like cysteine proteinase isoform II
  misc_feature (28)..(403): Homolog of NCBI NO: 7435795 NR Description: cysteine proteinase (EC 3.4.22.-) 2 precursor -
  misc_feature (44)..(406): Homolog of NCBI NO: 7211741 NR Description: papain-like cysteine proteinase isoform I
  misc_feature (44)..(406): Homolog of NCBI NO: 7381219 NR Description: papain-like cysteine proteinase isoform I
  misc_feature (44)..(405): Homolog of NCBI NO: 34761156 NR Description: cysteine proteinase precursor [Ipomoea batatas]
  misc_feature (31)..(406): Homolog of NCBI NO: 7211745 NR Description: papain-like cysteine proteinase isoform III
  misc_feature (32)..(403): Homolog of NCBI NO: 15705865 NR Description: cysteine proteinase precursor [Sandersonia
  misc_feature (38)..(405): Homolog of NCBI NO: 1706260 NR Description: Cysteine proteinase 1 precursor
  misc_feature (28)..(406): Homolog of NCBI NO: 38344381 NR Description: OSJNBb0054B09.3 [Oryza sativa (japonica
  misc_feature (5)..(5): Xaa is any aa, unknown or other
  misc_feature (7)..(7): Xaa is any aa, unknown or other
  misc_feature (8)..(8): Xaa is any aa, unknown or other
  misc_feature (9)..(9): Xaa is any aa, unknown or other
HYLEXPXXXHTRTTQETAGKIIPSRPIMARPRLRLLLVAAAVLLLLHPALSSAAEGLEDPLIEQVVGGDAENELELNAEAHFASFVRRFGKSYRDADEHAHRLSVFRDNLRRARRHQRLDPSAVHGITKFSDLTPDEFRERFLGLRKSRRSFLKGISGSAHDAPALPTDGLPTEFDWREHGAVGPVKDQGSCGSCWSFSTSGALEGANYLATGKLEVLSEQQLVDCDHQCDPSEPRACDAGCNGGLMTTAFSYLAKAGGLETEKDYPYTGRNSACKFDKSKIAAQVKNFSTVAIDEDQIAANLVKHGPLAIGINAVFMQTYIGGVSCPYICGRHLDHGVLLVGYGSAGYAPLRFKEKPYWIIKNSWGENWGESGYYKICRGPHVKNKCGVDSMVSTVTAIHTSKKE

SEQ ID NO: 68054 - protein, 379 aa, Triticum aestivum
  peptide (1)..(379): Ceres Seq. ID no. 15223213
  misc_feature (144)..(371): Pfam Name: Papain family cysteine protease Pfam Description: Papain family cysteine protease
  misc_feature (17)..(379): Homolog of NCBI NO: 7211743 NR Description: papain-like cysteine proteinase isoform II
  misc_feature (9)..(379): Homolog of NCBI NO: 7381221 NR Description: papain-like cysteine proteinase isoform II
  misc_feature (1)..(376): Homolog of NCBI NO: 7435795 NR Description: cysteine proteinase (EC 3.4.22.-) 2 precursor -
  misc_feature (17)..(379): Homolog of NCBI NO: 7211741 NR Description: papain-like cysteine proteinase isoform I
  misc_feature (17)..(379): Homolog of NCBI NO: 7381219 NR Description: papain-like cysteine proteinase isoform I
  misc_feature (17)..(378): Homolog of NCBI NO: 34761156 NR Description: cysteine proteinase precursor [Ipomoea batatas]
  misc_feature (4)..(379): Homolog of NCBI NO: 7211745 NR Description: papain-like cysteine proteinase isoform III
  misc_feature (5)..(376): Homolog of NCBI NO: 15705865 NR Description: cysteine proteinase precursor [Sandersonia
  misc_feature (11)..(378): Homolog of NCBI NO: 1706260 NR Description: Cysteine proteinase 1 precursor
  misc_feature (1)..(379): Homolog of NCBI NO: 38344381 NR Description: OSJNBb0054B09.3 [Oryza sativa (japonica
MARPRLRLLLVAAAVLLLLHPALSSAAEGLEDPLIEQVVGGDAENELELNAEAHFASFVRRFGKSYRDADEHAHRLSVFRDNLRRARRHQRLDPSAVHGITKFSDLTPDEFRERFLGLRKSRRSFLKGISGSAHDAPALPTDGLPTEFDWREHGAVGPVKDQGSCGSCWSFSTSGALEGANYLATGKLEVLSEQQLVDCDHQCDPSEPRACDAGCNGGLMTTAFSYLAKAGGLETEKDYPYTGRNSACKFDKSKIAAQVKNFSTVAIDEDQIAANLVKHGPLAIGINAVFMQTYIGGVSCPYICGRHLDHGVLLVGYGSAGYAPLRFKEKPYWIIKNSWGENWGESGYYKICRGPHVKNKCGVDSMVSTVTAIHTSKKE

SEQ ID NO: 68055 - protein, 230 aa, Triticum aestivum
  peptide (1)..(230): Ceres Seq. ID no. 15223214
  misc_feature (6)..(6): Xaa is any aa, unknown or other
  misc_feature (7)..(7): Xaa is any aa, unknown or other
  misc_feature (8)..(8): Xaa is any aa, unknown or other
  misc_feature (9)..(9): Xaa is any aa, unknown or other
  misc_feature (10)..(10): Xaa is any aa, unknown or other
PLPRTXXXXXHTHNTRNRRKNNTKPTNHGSPPPPAAPRRRRRPPPPPPGPLLGGGGAGGPPHRAGGRGRRGERAGAQRGGALRELRPAVRQVLQGRRRARAPALRVQGQPPPRAPPPAPRPLRGARHHQVLRPHPRRVPGALPRPPQVPPELPQGDLRVGARRAGPPHRRPPHRVRLARARRGRPSQGPGFVRVVLVLQYVGGAGGCQLPRHRKAGGAQRAAAGRLRPPV

SEQ ID NO: 68056 - DNA, 1492 bp, Triticum aestivum
  misc_feature (1)..(1492): Ceres Seq. ID no. 13596376
ctcactcacgtcgcctctctgccagccctcgacatggcgcgttccactcgtctcgtcgcttccaccgccacggctctcctcctcctcctcctgtcggcgtgctcgtgccgcgcggccggcgacagcccgagcgccgtggtgctggcggtgaggaaggacggcgcgacggggcagtacctgacgggcttccggcagcgcacgccccaggtgccggtgacggccgtgctcgacctcggcggcggcacgctctgggtggactgcgacgccgggtacgtgtcctcgtcctacgcgcgcgtgccgtgcgcgtccaagctgtgccgcctcgccaagaccggcgcctgcgccaccagctgcgtcggcaagccatccccggggtgcctcaacgatacctgcggcgggttcccggagaacaccgtcacgcgcgtcagcaccggcgggaacctcatcacggacgtgctgtcggtgtccaccaccttccgcccggggccggggccgctcgccaccgcgccggcgtttctgttcacgtgcggagccacgttcctgaccgagggcctggccgccggcgccaccggcatggcgtcgctcagccgcgcccgcttcgcgctcccgacgcagctcgccgccgccttccgcttctcccgcaagttcgcgctctgcctcacttcgacctccgcggccggggccgtcgtcttcggcgacgcgccctacgcgttccagcccggggtggacctctccaagtcgctcctctacaccccgctgctcgtcaacaacgtgagcaccgccggcgtctccggcgagaaggacaagtcgaacgagtacttcatcggcgtgacggccatcaaggtgaacgggcgcgccgtgccgctgaacgcctcgctgctggtcatcgacaagcagggcggcggcggcaccaagctcagcacggtggcgccctacaccgtgctggagacctccatccacaaggcggtcacggacgcgttcgcggcggagacggccatgatcccccgggtgcgggccgtggcgccgttcaagctctgctacgacgggagcaaggtggggagcacgcgcgtgggcccggccgtgccgaccgtcgagctggtgctgcagagcgaggccgcgtcgtgggtggtgttcggggccaactcgatggtggccgtcaagggcggcgcgctgtgccttggcgtggtggacggcggcgcggccccgcggacgtcggtggtggtcgggggccacatgatggaggacaacctgctggagttcgatctgcagcggtcgcggctcgggttcagctcctccctgctcttccgccagaccacctgcaacaacttccgccttgggtagaaagaaacaaatggcatccggatgggatcgcagaagatgatctgggcgcttgcgtcaagcagactgcaatcgaaatttgtttgtgtgttgtgtttccccttgggttctgttttggctgtttgaataatcaacaggagatcgaacgattgtc

SEQ ID NO: 68057 - protein, 496 aa, Triticum aestivum
  peptide (1)..(496): Ceres Seq. ID no. 13596377
  misc_feature (6)..(426): Homolog of NCBI NO: 23106243 NR Description: hypothetical protein [Azotobacter vinelandii]
  misc_feature (1)..(420): Homolog of NCBI NO: 23104656 NR Description: hypothetical protein [Azotobacter vinelandii]
HSRRLSASPRHGAFHSSRRFHRHGSPPPPPVGVLVPRGRRQPERRGAGGEEGRRDGAVPDGLPAAHAPGAGDGRARPRRRHALGGLRRRVRVLVLRARAVRVQAVPPRQDRRLRHQLRRQAIPGVPQRYLRRVPGEHRHARQHRREPHHGRAVGVHHLPPGAGAARHRAGVSVHVRSHVPDRGPGRRRHRHGVAQPRPLRAPDAARRRLPLLPQVRALPHFDLRGRGRRLRRRALRVPARGGPLQVAPLHPAARQQREHRRRLRREGQVERVLHRRDGHQGERARRAAERLAAGHRQAGRRRHQAQHGGALHRAGDLHPQGGHGRVRGGDGHDPPGAGRGAVQALLRREQGGEHARGPGRADRRAGAAERGRVVGGVRGQLDGGRQGRRAVPWRGGRRRGPADVGGGRGPHDGGQPAGVRSAAVAARVQLLPALPPDHLQQLPPWVERNKWHPDGIAEDDLGACVKQTAIEICLCVVFPLGFCFGCLNNQQEIERL

SEQ ID NO: 68058 - protein, 446 aa, Triticum aestivum
  peptide (1)..(446): Ceres Seq. ID no. 13596378
  misc_feature (43)..(432): Pfam Name: Eukaryotic aspartyl protease Pfam Description: Eukaryotic aspartyl protease
  misc_feature (46)..(434): Homolog of NCBI NO: 1401240 NR Description: 7S seed globulin precursor
  misc_feature (15)..(443): Homolog of NCBI NO: 18379072 NR Description: expressed protein [Arabidopsis thaliana]
  misc_feature (24)..(443): Homolog of NCBI NO: 21537233 NR Description: EDGP precursor [Arabidopsis thaliana]
  misc_feature (24)..(443): Homolog of NCBI NO: 15218740 NR Description: expressed protein [Arabidopsis thaliana]
  misc_feature (43)..(443): Homolog of NCBI NO: 7488910 NR Description: dermal glycoprotein precursor, extracellular -
  misc_feature (12)..(443): Homolog of NCBI NO: 27372527 NR Description: xyloglucan-specific fungal endoglucanase
  misc_feature (12)..(443): Homolog of NCBI NO: 32482806 NR Description: putative xyloglucanase inhibitor [Solanum
LTHVASLPALDMARSTRLVASTATALLLLLLSACSCRAAGDSPSAVVLAVRKDGATGQYLTGFRQRTPQVPVTAVLDLGGGTLWVDCDAGYVSSSYARVPCASKLCRLAKTGACATSCVGKPSPGCLNDTCGGFPENTVTRVSTGGNLITDVLSVSTTFRPGPGPLATAPAFLFTCGATFLTEGLAAGATGMASLSRARFALPTQLAAAFRFSRKFALCLTSTSAAGAVVFGDAPYAFQPGVDLSKSLLYTPLLVNNVSTAGVSGEKDKSNEYFIGVTAIKVNGRAVPLNASLLVIDKQGGGGTKLSTVAPYTVLETSIHKAVTDAFAAETAMIPRVRAVAPFKLCYDGSKVGSTRVGPAVPTVELVLQSEAASWVVFGANSMVAVKGGALCLGVVDGGAAPRTSVVVGGHMMEDNLLEFDLQRSRLGFSSSLLFRQTTCNNFRLG

SEQ ID NO: 68059 - protein, 435 aa, Triticum aestivum
  peptide (1)..(435): Ceres Seq. ID no. 13596379
  misc_feature (32)..(421): Pfam Name: Eukaryotic aspartyl protease Pfam Description: Eukaryotic aspartyl protease
  misc_feature (35)..(423): Homolog of NCBI NO: 1401240 NR Description: 7S seed globulin precursor
  misc_feature (4)..(432): Homolog of NCBI NO: 18379072 NR Description: expressed protein [Arabidopsis thaliana]
  misc_feature (13)..(432): Homolog of NCBI NO: 21537233 NR Description: EDGP precursor [Arabidopsis thaliana]
  misc_feature (13)..(432): Homolog of NCBI NO: 15218740 NR Description: expressed protein [Arabidopsis thaliana]
  misc_feature (32)..(432): Homolog of NCBI NO: 7488910 NR Description: dermal glycoprotein precursor, extracellular -
  misc_feature (1)..(432): Homolog of NCBI NO: 27372527 NR Description: xyloglucan-specific fungal endoglucanase
  misc_feature (1)..(432): Homolog of NCBI NO: 32482806 NR Description: putative xyloglucanase inhibitor [Solanum
MARSTRLVASTATALLLLLLSACSCRAAGDSPSAVVLAVRKDGATGQYLTGFRQRTPQVPVTAVLDLGGGTLWVDCDAGYVSSSYARVPCASKLCRLAKTGACATSCVGKPSPGCLNDTCGGFPENTVTRVSTGGNLITDVLSVSTTFRPGPGPLATAPAFLFTCGATFLTEGLAAGATGMASLSRARFALPTQLAAAFRFSRKFALCLTSTSAAGAVVFGDAPYAFQPGVDLSKSLLYTPLLVNNVSTAGVSGEKDKSNEYFIGVTAIKVNGRAVPLNASLLVIDKQGGGGTKLSTVAPYTVLETSIHKAVTDAFAAETAMIPRVRAVAPFKLCYDGSKVGSTRVGPAVPTVELVLQSEAASWVVFGANSMVAVKGGALCLGVVDGGAAPRTSVVVGGHMMEDNLLEFDLQRSRLGFSSSLLFRQTTCNNFRLG

SEQ ID NO: 68060 - DNA, 681 bp, Triticum aestivum
  misc_feature (1)..(681): Ceres Seq. ID no. 13654517
gcacacactctccgcgacaccgtaatccccggcccctccggcgattccccactctctcagccccgatccactccgccgccgcgccagctcgccatggctgccgccgacgaggcgcagggcttccgcccgctggacgaggcgtcgctggtggcctacatccgggcgaccccggcgctggccgccagcctcggcggccgcgtcgacgacctcgccgtcaaggaggtcggcgacggcaacctcaacttcgtctacatcgtctcctccgacgccggctccgtcgtcgtcaagcaggcgctgccgtacatccgctgcgtgggggactcgtggccgatgacgagggagcgggcctactttgaggcctccgcgctgcgggagcacggccgcctctgcccggaccacgtcccggaggtctaccacttcgaccgcgccatgtcgctcatcgggatgcgctacatcaagccgccccacatcatcctccgcaagggcctcatcgccggcgtcgagtaccccctcctcgccgagcacatgtccgactacatggccaagaccctcttcttcacctccctcctctacaactccaccaccgagcacaagaagcaagttgctcgctactgcgagaacgtggagatgtgcaggctcacggagctgtttaaacacaataaagttggaactggagggggg

SEQ ID NO: 68061 - protein, 227 aa, Triticum aestivum
  peptide (1)..(227): Ceres Seq. ID no. 13654518
  misc_feature (74)..(215): Homolog of NCBI NO: 30022120 NR Description: 5-methylthioribose kinase [Bacillus cereus ATCC
  misc_feature (58)..(215): Homolog of NCBI NO: 37999472 NR Description: Methylthioribose kinase (MTR kinase)
  misc_feature (58)..(215): Homolog of NCBI NO: 16078420 NR Description: ykrT [Bacillus subtilis]
  misc_feature (70)..(217): Homolog of NCBI NO: 18921366 NR Description: 5-methylthioribose kinase [Klebsiella pneumoniae]
  misc_feature (37)..(215): Homolog of NCBI NO: 16265283 NR Description: conserved hypothetical protein [Sinorhizobium
  misc_feature (41)..(215): Homolog of NCBI NO: 13476069 NR Description: hypothetical protein [Mesorhizobium loti]
  misc_feature (36)..(215): Homolog of NCBI NO: 27380009 NR Description: bll4898 [Bradyrhizobium japonicum]
  misc_feature (41)..(215): Homolog of NCBI NO: 18402794 NR Description: expressed protein [Arabidopsis thaliana]
  misc_feature (31)..(215): Homolog of NCBI NO: 32488395 NR Description: OSJNBa0043A12.25 [Oryza sativa (japonica
  misc_feature (37)..(215): Homolog of NCBI NO: 32488394 NR Description: OSJNBa0043A12.24 [Oryza sativa (japonica
AHTLRDTVIPGPSGDSPLSQPRSTPPPRQLAMAAADEAQGFRPLDEASLVAYIRATPALAASLGGRVDDLAVKEVGDGNLNFVYIVSSDAGSVVVKQALPYIRCVGDSWPMTRERAYFEASALREHGRLCPDHVPEVYHFDRAMSLIGMRYIKPPHIILRKGLIAGVEYPLLAEHMSDYMAKTLFFTSLLYNSTTEHKKQVARYCENVEMCRLTELFKHNKVGTGGG

SEQ ID NO: 68062 - protein, 196 aa, Triticum aestivum
  peptide (1)..(196): Ceres Seq. ID no. 13654519
  misc_feature (43)..(184): Homolog of NCBI NO: 30022120 NR Description: 5-methylthioribose kinase [Bacillus cereus ATCC
  misc_feature (27)..(184): Homolog of NCBI NO: 37999472 NR Description: Methylthioribose kinase (MTR kinase)
  misc_feature (27)..(184): Homolog of NCBI NO: 16078420 NR Description: ykrT [Bacillus subtilis]
  misc_feature (39)..(186): Homolog of NCBI NO: 18921366 NR Description: 5-methylthioribose kinase [Klebsiella pneumoniae]
  misc_feature (6)..(184): Homolog of NCBI NO: 16265283 NR Description: conserved hypothetical protein [Sinorhizobium
  misc_feature (10)..(184): Homolog of NCBI NO: 13476069 NR Description: hypothetical protein [Mesorhizobium loti]
  misc_feature (5)..(184): Homolog of NCBI NO: 27380009 NR Description: bll4898 [Bradyrhizobium japonicum]
  misc_feature (10)..(184): Homolog of NCBI NO: 18402794 NR Description: expressed protein [Arabidopsis thaliana]
  misc_feature (1)..(184): Homolog of NCBI NO: 32488395 NR Description: OSJNBa0043A12.25 [Oryza sativa (japonica
  misc_feature (6)..(184): Homolog of NCBI NO: 32488394 NR Description: OSJNBa0043A12.24 [Oryza sativa (japonica
MAAADEAQGFRPLDEASLVAYIRATPALAASLGGRVDDLAVKEVGDGNLNFVYIVSSDAGSVVVKQALPYIRCVGDSWPMTRERAYFEASALREHGRLCPDHVPEVYHFDRAMSLIGMRYIKPPHIILRKGLIAGVEYPLLAEHMSDYMAKTLFFTSLLYNSTTEHKKQVARYCENVEMCRLTELFKHNKVGTGGG

SEQ ID NO: 68063 - protein, 117 aa, Triticum aestivum
  peptide (1)..(117): Ceres Seq. ID no. 13654520
THSPRHRNPRPLRRFPTLSAPIHSAAAPARHGCRRRGAGLPPAGRGVAGGLHPGDPGAGRQPRRPRRRPRRQGGRRRQPQLRLHRLLRRRLRRRQAGAAVHPLRGGLVADDEGAGLL

SEQ ID NO: 68064 - DNA, 1688 bp, Triticum aestivum
  misc_feature (1)..(1688): Ceres Seq. ID no. 14301471
agcaatttggcctagactagagtttatctcttgcatttccccgcgcgtagcagcaagcacaagaggagagatcgcgcatttatttacagagctgttgggagaatccaggaggaagtcgaagtactccggtccggccaagaagggggagacagagcgggggaggacgccggggcgccgagtttggggagaggaggagatggagacggacagcccgcggagcccggaggcggagatcgggcaccgggtggaggacctgtgggaggtggcgcagccgcagctgtccccgtcggagaagctcaactcctgcttcgaggacatccccgtcgccgccttcccgcgcacccacccctcgcaagtgatcgagataccttcggatgccagccttgctgatactgttgagacattgtccaagaataaaattttgagtgcacccataagaaacgtcgatgctccagaggatgctacttggatagacaaatacatcggtattgtggaatttgctggtattgcaatgtggttgcttcatcagtctgatgcttcaggtaatggaacagctggttctgcagttggatcacctgtggtcaatctagcatctaggttaggctctttcacattcagaagaacgtcatctggcagggtagaaaccactactgattcagaatcagatgaagctgcatcagtgggtggaagcttttttgaaacccttacttcctctgagttctacaagaacacaaaggttggcgatatctcaggaagcttccgatgggcgccatttcttgccctgcagacatctgacacattcctcactatgctgcttcttctatccaagtacaggatgaagagcctccccgtggtagatatgggggggaatcagattgagaatatcattacacaatcttccgttgtgcacatgcttgcagagtgtgttggactatcttggtttgaaagctggggaactaagaaactctgtgaactgggtcttcctctgatgaagccatacagacttgttaaggtaaatgaagaccagccagtcctaaaagccttccaactaatgagggaaaagggggttggtggtgtgcctgttatggacacaaatggaacaaaagcaattggtaacattagcatcagagatgtccaatatcttcttagtgcccccaagatatacaaacaatacaggacaatctcagccaaggatttccttaccgcggtccggcaccatctccaggagcagcacgaagcgtcgccgttgctgcacgacgtgatcacatgcaaaagagacgacgtgatcaaggaaatcatactgaagctggactcgaccaagatccacaggatctacgtggtcgacgacaagggggataccgagggggtgatcacgctgagggacataatctccaagctggtgcacgagccacggcattactttggggatttcttcgacggcgtcgtccccctacccgcaaacagtaccgtatgacaaaactctgtgatagtatgtacaaaaaatgtacattatctttttgctcattccccatcttcttcttaagttgtggttgctgttgctgttgctgtggagagacctctgtggggagtactaatgaagaaccaatggggtggatgacagtgtgcgttgaataatctgagaattgcctgagctttgcgatgagaatgatgatgcctttcttctttcg

SEQ ID NO: 68065 - protein, 490 aa, Triticum aestivum
  peptide (1)..(490): Ceres Seq. ID no. 14301472
  misc_feature (117)..(174): Pfam Name: CBS domain Pfam Description: CBS domain
  misc_feature (114)..(474): Homolog of NCBI NO: 25404839 NR Description: hypothetical protein T17F3.17 [imported] -
  misc_feature (93)..(229): Homolog of NCBI NO: 34912162 NR Description: P0712E02.24 [Oryza sativa (japonica
  misc_feature (224)..(477): Homolog of NCBI NO: 34912162 NR Description: P0712E02.24 [Oryza sativa (japonica
  misc_feature (61)..(490): Homolog of NCBI NO: 19386799 NR Description: OJ1485_B09.7 [Oryza sativa (japonica
  misc_feature (73)..(176): Homolog of NCBI NO: 21592917 NR Description: unknown [Arabidopsis thaliana]
  misc_feature (216)..(490): Homolog of NCBI NO: 21592917 NR Description: unknown [Arabidopsis thaliana]
  misc_feature (73)..(176): Homolog of NCBI NO: 15228397 NR Description: CBS domain containing protein [Arabidopsis
  misc_feature (216)..(490): Homolog of NCBI NO: 15228397 NR Description: CBS domain containing protein [Arabidopsis
  misc_feature (69)..(490): Homolog of NCBI NO: 32364482 NR Description: AKIN gamma [Medicago truncatula]
  misc_feature (66)..(490): Homolog of NCBI NO: 38346640 NR Description: OSJNBa0072D21.10 [Oryza sativa (japonica
AIWPRLEFISCISPRVAASTRGEIAHLFTELLGESRRKSKYSGPAKKGETERGRTPGRRVWGEEEMETDSPRSPEAEIGHRVEDLWEVAQPQLSPSEKLNSCFEDIPVAAFPRTHPSQVIEIPSDASLADTVETLSKNKILSAPIRNVDAPEDATWIDKYIGIVEFAGIAMWLLHQSDASGNGTAGSAVGSPVVNLASRLGSFTFRRTSSGRVETTTDSESDEAASVGGSFFETLTSSEFYKNTKVGDISGSFRWAPFLALQTSDTFLTMLLLLSKYRMKSLPVVDMGGNQIENIITQSSVVHMLAECVGLSWFESWGTKKLCELGLPLMKPYRLVKVNEDQPVLKAFQLMREKGVGGVPVMDTNGTKAIGNISIRDVQYLLSAPKIYKQYRTISAKDFLTAVRHHLQEQHEASPLLHDVITCKRDDVIKEIILKLDSTKIHRIYVVDDKGDTEGVITLRDIISKLVHEPRHYFGDFFDGVVPLPANSTV

SEQ ID NO: 68066 - protein, 425 aa, Triticum aestivum
  peptide (1)..(425): Ceres Seq. ID no. 14301473
  misc_feature (52)..(109): Pfam Name: CBS domain Pfam Description: CBS domain
  misc_feature (49)..(409): Homolog of NCBI NO: 25404839 NR Description: hypothetical protein T17F3.17 [imported] -
  misc_feature (28)..(164): Homolog of NCBI NO: 34912162 NR Description: P0712E02.24 [Oryza sativa (japonica
  misc_feature (159)..(412): Homolog of NCBI NO: 34912162 NR Description: P0712E02.24 [Oryza sativa (japonica
  misc_feature (1)..(425): Homolog of NCBI NO: 19386799 NR Description: OJ1485_B09.7 [Oryza sativa (japonica
  misc_feature (8)..(111): Homolog of NCBI NO: 21592917 NR Description: unknown [Arabidopsis thaliana]
  misc_feature (151)..(425): Homolog of NCBI NO: 21592917 NR Description: unknown [Arabidopsis thaliana]
  misc_feature (8)..(111): Homolog of NCBI NO: 15228397 NR Description: CBS domain containing protein [Arabidopsis
  misc_feature (151)..(425): Homolog of NCBI NO: 15228397 NR Description: CBS domain containing protein [Arabidopsis
  misc_feature (4)..(425): Homolog of NCBI NO: 32364482 NR Description: AKIN gamma [Medicago truncatula]
  misc_feature (1)..(425): Homolog of NCBI NO: 38346640 NR Description: OSJNBa0072D21.10 [Oryza sativa (japonica
METDSPRSPEAEIGHRVEDLWEVAQPQLSPSEKLNSCFEDIPVAAFPRTHPSQVIEIPSDASLADTVETLSKNKILSAPIRNVDAPEDATWIDKYIGIVEFAGIAMWLLHQSDASGNGTAGSAVGSPVVNLASRLGSFTFRRTSSGRVETTTDSESDEAASVGGSFFETLTSSEFYKNTKVGDISGSFRWAPFLALQTSDTFLTMLLLLSKYRMKSLPVVDMGGNQIENIITQSSVVHMLAECVGLSWFESWGTKKLCELGLPLMKPYRLVKVNEDQPVLKAFQLMREKGVGGVPVMDTNGTKAIGNISIRDVQYLLSAPKIYKQYRTISAKDFLTAVRHHLQEQHEASPLLHDVITCKRDDVIKEIILKLDSTKIHRIYVVDDKGDTEGVITLRDIISKLVHEPRHYFGDFFDGVVPLPANSTV

SEQ ID NO: 68067 - protein, 320 aa, Triticum aestivum
  peptide (1)..(320): Ceres Seq. ID no. 14301474
  misc_feature (48)..(294): Homolog of NCBI NO: 34912990 NR Description: P0663E10.8 [Oryza sativa (japonica
  misc_feature (75)..(304): Homolog of NCBI NO: 18409372 NR Description: CBS domain containing protein [Arabidopsis
  misc_feature (1)..(304): Homolog of NCBI NO: 25404839 NR Description: hypothetical protein T17F3.17 [imported] -
  misc_feature (1)..(59): Homolog of NCBI NO: 34912162 NR Description: P0712E02.24 [Oryza sativa (japonica
  misc_feature (54)..(307): Homolog of NCBI NO: 34912162 NR Description: P0712E02.24 [Oryza sativa (japonica
  misc_feature (1)..(320): Homolog of NCBI NO: 19386799 NR Description: OJ1485_B09.7 [Oryza sativa (japonica
  misc_feature (46)..(320): Homolog of NCBI NO: 21592917 NR Description: unknown [Arabidopsis thaliana]
  misc_feature (46)..(320): Homolog of NCBI NO: 15228397 NR Description: CBS domain containing protein [Arabidopsis
  misc_feature (1)..(320): Homolog of NCBI NO: 32364482 NR Description: AKIN gamma [Medicago truncatula]
  misc_feature (1)..(320): Homolog of NCBI NO: 38346640 NR Description: OSJNBa0072D21.10 [Oryza sativa (japonica
MWLLHQSDASGNGTAGSAVGSPVVNLASRLGSFTFRRTSSGRVETTTDSESDEAASVGGSFFETLTSSEFYKNTKVGDISGSFRWAPFLALQTSDTFLTMLLLLSKYRMKSLPVVDMGGNQIENIITQSSVVHMLAECVGLSWFESWGTKKLCELGLPLMKPYRLVKVNEDQPVLKAFQLMREKGVGGVPVMDTNGTKAIGNISIRDVQYLLSAPKIYKQYRTISAKDFLTAVRHHLQEQHEASPLLHDVITCKRDDVIKEIILKLDSTKIHRIYVVDDKGDTEGVITLRDIISKLVHEPRHYFGDFFDGVVPLPANSTV

SEQ ID NO: 68068 - DNA, 595 bp, Triticum aestivum
  misc_feature (1)..(595): Ceres Seq. ID no. 13596380
cgcaactcctttgcacagtcaccggtctgtactgtacctgggagtataatggaacaaccaaacagtgagaaggatgagcacgagctcagccttgacctcaccctccgcgtgagctcggcagctgaggcggagcagggcggcttcttcctctgcgtctactgcgaccgcaagttccgcagctcgcaggcgcttggtggccaccagaacgcgcacaagcacgagcgcagcctcgcccaccgccggcgggagatggccgccgccacgggtgcacacggggccggaacgcgcgcgcatgcggcgcaggacgagaggcccaggtatgtttccgccggtgatttcgtcgagccttccgctgggaaggcggggaggacggaggcaagtccgtggaaggttgctgctgctcccatgactgatgatgtggacctgtcgctcaggctatgatcgatctcttcttctagctagttgagtttctctcatggaattccgacctgcgcgcgcgtcgcgccgtattttgggctcctatttcttgtgtattctccgatcaatctgactgaatgtacttaccgaaattttcttcaaatatatgtgtgccgcc

SEQ ID NO: 68069 - protein, 146 aa, Triticum aestivum
  peptide (1)..(146): Ceres Seq. ID no. 13596381
  misc_feature (49)..(71): Pfam Name: Zinc finger, C2H2 type Pfam Description: Zinc finger, C2H2 type
  misc_feature (49)..(82): Homolog of NCBI NO: 15239730 NR Description: hypothetical protein [Arabidopsis thaliana]
  misc_feature (38)..(80): Homolog of NCBI NO: 15241284 NR Description: zinc finger (C2H2 type) protein family
  misc_feature (33)..(94): Homolog of NCBI NO: 15238913 NR Description: zinc finger -related protein [Arabidopsis
  misc_feature (49)..(100): Homolog of NCBI NO: 15218939 NR Description: C2H2-type zinc finger protein -related
  misc_feature (19)..(91): Homolog of NCBI NO: 18395528 NR Description: zinc finger protein 7, ZFP7 [Arabidopsis
  misc_feature (27)..(84): Homolog of NCBI NO: 15242152 NR Description: zinc finger protein 2 (ZFP2) [Arabidopsis
  misc_feature (16)..(84): Homolog of NCBI NO: 15241084 NR Description: zinc finger protein -related [Arabidopsis
  misc_feature (18)..(92): Homolog of NCBI NO: 15238724 NR Description: ZFP3 zinc finger protein [Arabidopsis thaliana]
RNSFAQSPVCTVPGSIMEQPNSEKDEHELSLDLTLRVSSAAEAEQGGFFLCVYCDRKFRSSQALGGHQNAHKHERSLAHRRREMAAATGAHGAGTRAHAAQDERPRYVSAGDFVEPSAGKAGRTEASPWKVAAAPMTDDVDLSLRL

SEQ ID NO: 68070 - protein, 130 aa, Triticum aestivum
  peptide (1)..(130): Ceres Seq. ID no. 13596382
  misc_feature (33)..(55): Pfam Name: Zinc finger, C2H2 type Pfam Description: Zinc finger, C2H2 type
  misc_feature (33)..(66): Homolog of NCBI NO: 15239730 NR Description: hypothetical protein [Arabidopsis thaliana]
  misc_feature (22)..(64): Homolog of NCBI NO: 15241284 NR Description: zinc finger (C2H2 type) protein family
  misc_feature (17)..(78): Homolog of NCBI NO: 15238913 NR Description: zinc finger -related protein [Arabidopsis
  misc_feature (33)..(84): Homolog of NCBI NO: 15218939 NR Description: C2H2-type zinc finger protein -related
  misc_feature (3)..(75): Homolog of NCBI NO: 18395528 NR Description: zinc finger protein 7, ZFP7 [Arabidopsis
  misc_feature (11)..(68): Homolog of NCBI NO: 15242152 NR Description: zinc finger protein 2 (ZFP2) [Arabidopsis
  misc_feature (1)..(68): Homolog of NCBI NO: 15241084 NR Description: zinc finger protein -related [Arabidopsis
  misc_feature (2)..(76): Homolog of NCBI NO: 15238724 NR Description: ZFP3 zinc finger protein [Arabidopsis thaliana]
MEQPNSEKDEHELSLDLTLRVSSAAEAEQGGFFLCVYCDRKFRSSQALGGHQNAHKHERSLAHRRREMAAATGAHGAGTRAHAAQDERPRYVSAGDFVEPSAGKAGRTEASPWKVAAAPMTDDVDLSLRL

SEQ ID NO: 68071 - DNA, 1474 bp, Triticum aestivum
  misc_feature (1)..(1474): Ceres Seq. ID no. 13596370
attattcttaaccctctcgccccgcctccccgtctcctcctccggtcgcccaaccgagcaggggtgtcgccattgttgtcgcctctcacccgcaggccgcctccgcgtccgtcactaggccacgagacctaggatcccccgccccctcgctgtgacctcgccgcgatgtggtggagggcggtggccagggctcgccgccggatcccgggagcgcggcccgtgtcgacggcggcggcggggaagagcggccgcgaggtggtggtgccgcggttcggcgggccggaggtgctgcagctgaggcagggggtgcccgcgcccgatctgaagcccggcgaggtgcttgtgcgcgcgcgcgccgtctccatcaaccccctcgacttgcgaatgcgggctggctatggccgttgcatattcgagccactcctacctctcatcattggccgggacatcagtggtgaagtcgcagctacagggacttctgtgtcgtcattctatattgggcaagaagtgtttggtgccttgcatccaacagcgattagagggacatgtgctgattatgcagttctttcacaggatgagcttacttctaaaccatctacgctcactcatgtggaggccagtgcaattccctttgctgcgttgactgcgtggcgtgctttatatggtactgctggaatttctaaaggacaaagattacttgtgcttggtggaggaggagcagttgggctttctgctgttcagcttgcggtagctgcagggtgtagtgtttcagctacctgtggagcccaaagtattgagcaagttttggcagccggtgctgaaaaggctattgattacgccactgaggatactgaatcaacagttacaggaaagtttgatgctgtgttagacacaataggagtagctgaaactgaaagaattggtattaatcttctgagaagaggcggacattatatgacccttcagggagaggcagcttcactagcagatagatatggattatatgtgggacttcctgctgctaccgctactttactgaagaaacagatgcagtatcgttgttctcatgggatagagtactggtggacatacatgagagctgatcctgacggtctccatgagatccagaggctgtccggagctggaaaactacagatacctgtggagaagacttttcctatcagccaagtaagagaagctcatgaggccaaggagaaaagactggtgcctggcaaggtggttctagagttcgactagtgttagcaggggttcgtccgacgatcacggaaggaccgacgttccttcttaattgtaccatgatgtttattttttgtctttctcccaaagaaaagtcgtgcggctttgaagctctaaatttgctcgttctctaggtagtactacagggttattttgtcggggtttagtgtaaatgcagtaaataatgatatgcaatacgaagagacttatttcagtg

SEQ ID NO: 68072 - protein, 363 aa, Triticum aestivum
  peptide (1)..(363): Ceres Seq. ID no. 13596371
  misc_feature (33)..(279): Homolog of NCBI NO: 27382786 NR Description: blr7675 [Bradyrhizobium japonicum]
  misc_feature (32)..(360): Homolog of NCBI NO: 14249346 NR Description: reticulon 4 interacting protein 1
  misc_feature (1)..(360): Homolog of NCBI NO: 17887352 NR Description: NOGO-interacting mitochondrial protein [Homo
  misc_feature (309)..(360): Homolog of NCBI NO: 29827741 NR Description: putative oxidoreductase [Streptomyces avermitilis
  misc_feature (29)..(268): Homolog of NCBI NO: 29827741 NR Description: putative oxidoreductase [Streptomyces avermitilis
  misc_feature (1)..(360): Homolog of NCBI NO: 14522882 NR Description: NOGO-interacting mitochondrial protein [Homo
  misc_feature (29)..(362): Homolog of NCBI NO: 21592930 NR Description: zinc-binding dehydrogenase, putative [Arabidopsis
  misc_feature (29)..(362): Homolog of NCBI NO: 15232485 NR Description: oxidoreductase, zinc-binding dehydrogenase family
  misc_feature (1)..(341): Homolog of NCBI NO: 34909604 NR Description: putative oxidoreductase-like protein
  misc_feature (1)..(363): Homolog of NCBI NO: 30351052 NR Description: oxidoreductase [Setaria italica]
MWWRAVARARRRIPGARPVSTAAAGKSGREVVVPRFGGPEVLQLRQGVPAPDLKPGEVLVRARAVSINPLDLRMRAGYGRCIFEPLLPLIIGRDISGEVAATGTSVSSFYIGQEVFGALHPTAIRGTCADYAVLSQDELTSKPSTLTHVEASAIPFAALTAWRALYGTAGISKGQRLLVLGGGGAVGLSAVQLAVAAGCSVSATCGAQSIEQVLAAGAEKAIDYATEDTESTVTGKFDAVLDTIGVAETERIGINLLRRGGHYMTLQGEAASLADRYGLYVGLPAATATLLKKQMQYRCSHGIEYWWTYMRADPDGLHEIQRLSGAGKLQIPVEKTFPISQVREAHEAKEKRLVPGKVVLEFD

SEQ ID NO: 68073 - protein, 290 aa, Triticum aestivum
  peptide (1)..(290): Ceres Seq. ID no. 13596372
  misc_feature (1)..(206): Homolog of NCBI NO: 27382786 NR Description: blr7675 [Bradyrhizobium japonicum]
  misc_feature (1)..(287): Homolog of NCBI NO: 14249346 NR Description: reticulon 4 interacting protein 1
  misc_feature (1)..(287): Homolog of NCBI NO: 17887352 NR Description: NOGO-interacting mitochondrial protein [Homo
  misc_feature (236)..(287): Homolog of NCBI NO: 29827741 NR Description: putative oxidoreductase [Streptomyces avermitilis
  misc_feature (1)..(195): Homolog of NCBI NO: 29827741 NR Description: putative oxidoreductase [Streptomyces avermitilis
  misc_feature (1)..(287): Homolog of NCBI NO: 14522882 NR Description: NOGO-interacting mitochondrial protein [Homo
  misc_feature (1)..(289): Homolog of NCBI NO: 21592930 NR Description: zinc-binding dehydrogenase, putative [Arabidopsis
  misc_feature (1)..(289): Homolog of NCBI NO: 15232485 NR Description: oxidoreductase, zinc-binding dehydrogenase family
  misc_feature (1)..(268): Homolog of NCBI NO: 34909604 NR Description: putative oxidoreductase-like protein
  misc_feature (1)..(290): Homolog of NCBI NO: 30351052 NR Description: oxidoreductase [Setaria italica]
MRAGYGRCIFEPLLPLIIGRDISGEVAATGTSVSSFYIGQEVFGALHPTAIRGTCADYAVLSQDELTSKPSTLTHVEASAIPFAALTAWRALYGTAGISKGQRLLVLGGGGAVGLSAVQLAVAAGCSVSATCGAQSIEQVLAAGAEKAIDYATEDTESTVTGKFDAVLDTIGVAETERIGINLLRRGGHYMTLQGEAASLADRYGLYVGLPAATATLLKKQMQYRCSHGIEYWWTYMRADPDGLHEIQRLSGAGKLQIPVEKTFPISQVREAHEAKEKRLVPGKVVLEFD

SEQ ID NO: 68074 - DNA, 1599 bp, Triticum aestivum
  misc_feature (1)..(1599): Ceres Seq. ID no. 14313567
acacacgcgcgcgcgcacacgcaagaaccgcccaagccgaacacacaagcaaagggagggacagcgcgcgagatcgagatgaaggtggaggtggtggacacgacgctggtgacgccgagcgagccgacgccgcggcacacgctgtggctctccaacctcgacctcgccgtgcccaagacgcacacgccgctcgtctactactacccggcgccccccgccggcgacggcggcgagaagcaggaagagttcttcgcgccggagaggctgcgggaggcgctggcgagggcgctggtgccgttctacccgctggcagggcggatggcgacgggccccgagggccggctcgagatcgactgcaacggcgagggcgcgctgttcgtcgtcgcgcgggccgacttcaccggcgacgagatgttccgggacttcgagccctccccggaggcgcgccgcctgctcgtccccttcgccgcctccggcgacccgccctgcctcctcgccatggtccaggtgacgttcctcaagtgcggcggcgtggccgtgggcacgggcatgcaccacgtgaccatggacggcgcgggcgcgatccagttcatccggacgtggacgaccctggcgcgcggcctggacgccgcgtccgtgcacccgtccccgccggtgcacgaccgcacggtgctgcgcgcgcgctctcccccgcatgccaccttcgagcacccggtctactccccgagcaacctcaacggcctgccccgccccttcgtcacccgcgtctacgccgtgtcccccaagctcctcgccggcatcaagtccagctgcgcgcccggcgtgtccacctactgcgcgctcaccgcgcacctgtggcgcgccatgtgcgtggcccgcgggctggcccccgacgccgagtcgcggctgcgcgtgccggccaacatccggcagcgcctgcgcccgcagctgccggccaactacttcggcaacgccatcgtgcgggacctggtgacggtgcgcgtcggcgacgtgctgtcgcagccgctggggttcgtggcggagcggatcaagcgcgcggtggcgcgggtggacgacgccttcgtgcgctccgtcatcgactacctggaggtggagtcggagaagggcagccaggcggcgcgcgggcagttcatgccggagacggacctgtgggtggtgagctggctgggcatgcccatccacgacgccgacttcggctggggctgccccaagttcgtggcgccggcgcagatgttcggcagcggcacggcctacgtcacgcaggcgcccgacaaggacgacggcgtgtccgtgctgttcgcgctcgagccagagtacctgcagtgcttcgagaaggccttctacggggagtgaccgaccaaagccttctacggtgatgcgcctttcaaagagccacttgggagttgggatctcgagtccgtcgatagtgtggagtgctgtatcataacgcaacagatactgcggaagtgtcgaggttgctgcttgtttctcgcgcctttcttcactgctactatgtgacattgtgggctaactattatctatacaaagtctaaatgaaaatggcctcaggtttagctc

SEQ ID NO: 68075 - protein, 464 aa, Triticum aestivum
  peptide (1)..(464): Ceres Seq. ID no. 14313568
  misc_feature (177)..(459): Homolog of NCBI NO: 22960097 NR Description: hypothetical protein [Rhodobacter sphaeroides]
  misc_feature (10)..(450): Homolog of NCBI NO: 79833 NR Description: hypothetical 119.5K protein (uvrA region) -
  misc_feature (18)..(437): Homolog of NCBI NO: 23106243 NR Description: hypothetical protein [Azotobacter vinelandii]
TRARAHARTAQAEHTSKGRDSARDRDEGGGGGHDAGDAERADAAAHAVALQPRPRRAQDAHAARLLLPGAPRRRRRREAGRVLRAGEAAGGAGEGAGAVLPAGRADGDGPRGPARDRLQRRGRAVRRRAGRLHRRRDVPGLRALPGGAPPARPLRRLRRPALPPRHGPGDVPQVRRRGRGHGHAPRDHGRRGRDPVHPDVDDPGARPGRRVRAPVPAGARPHGAARALSPACHLRAPGLLPEQPQRPAPPLRHPRLRRVPQAPRRHQVQLRARRVHLLRAHRAPVARHVRGPRAGPRRRVAAARAGQHPAAPAPAAAGQLLRQRHRAGPGDGARRRRAVAAAGVRGGADQARGGAGGRRLRALRHRLPGGGVGEGQPGGARAVHAGDGPVGGELAGHAHPRRRLRLGLPQVRGAGADVRQRHGLRHAGARQGRRRVRAVRARARVPAVLREGLLRGVTDQSLLR

SEQ ID NO: 68076 - protein, 457 aa, Triticum aestivum
  peptide (1)..(457): Ceres Seq. ID no. 14313569
  misc_feature (27)..(455): Pfam Name: Transferase family Pfam Description: Transferase family
  misc_feature (27)..(455): Homolog of NCBI NO: 32400291 NR Description: hydroxyanthranilate hydroxycinnamoyltransferase 1
  misc_feature (27)..(455): Homolog of NCBI NO: 32400295 NR Description: hydroxyanthranilate hydroxycinnamoyltransferase 3
  misc_feature (27)..(455): Homolog of NCBI NO: 32400293 NR Description: hydroxyanthranilate hydroxycinnamoyltransferase 2
  misc_feature (27)..(455): Homolog of NCBI NO: 40644084 NR Description: hydroxycinnamoyl CoA quinate transferase
  misc_feature (27)..(455): Homolog of NCBI NO: 38345030 NR Description: OSJNBa0029H02.14 [Oryza sativa (japonica
  misc_feature (27)..(455): Homolog of NCBI NO: 40644899 NR Description: hydroxycinnamoyl CoA quinate transferase
  misc_feature (27)..(455): Homolog of NCBI NO: 21536883 NR Description: anthranilate N-benzoyltransferase [Arabidopsis
  misc_feature (27)..(455): Homolog of NCBI NO: 15239747 NR Description: anthranilate
  misc_feature (26)..(455): Homolog of NCBI NO: 6469032 NR Description: N-hydroxycinnamoyl/benzoyltransferase [Ipomoea
  misc_feature (27)..(455): Homolog of NCBI NO: 27475616 NR Description: hydroxycinnamoyl transferase [Nicotiana tabacum]
THARAHTQEPPKPNTQAKGGTAREIEMKVEVVDTTLVTPSEPTPRHTLWLSNLDLAVPKTHTPLVYYYPAPPAGDGGEKQEEFFAPERLREALARALVPFYPLAGRMATGPEGRLEIDCNGEGALFVVARADFTGDEMFRDFEPSPEARRLLVPFAASGDPPCLLAMVQVTFLKCGGVAVGTGMHHVTMDGAGAIQFIRTWTTLARGLDAASVHPSPPVHDRTVLRARSPPHATFEHPVYSPSNLNGLPRPFVTRVYAVSPKLLAGIKSSCAPGVSTYCALTAHLWRAMCVARGLAPDAESRLRVPANIRQRLRPQLPANYFGNAIVRDLVTVRVGDVLSQPLGFVAERIKRAVARVDDAFVRSVIDYLEVESEKGSQAARGQFMPETDLWVVSWLGMPIHDADFGWGCPKFVAPAQMFGSGTAYVTQAPDKDDGVSVLFALEPEYLQCFEKAFYGE

SEQ ID NO: 68077 - protein, 431 aa, Triticum aestivum
  peptide (1)..(431): Ceres Seq. ID no. 14313570
  misc_feature (1)..(429): Pfam Name: Transferase family Pfam Description: Transferase family
  misc_feature (1)..(429): Homolog of NCBI NO: 32400291 NR Description: hydroxyanthranilate hydroxycinnamoyltransferase 1
  misc_feature (1)..(429): Homolog of NCBI NO: 32400295 NR Description: hydroxyanthranilate hydroxycinnamoyltransferase 3
  misc_feature (1)..(429): Homolog of NCBI NO: 32400293 NR Description: hydroxyanthranilate hydroxycinnamoyltransferase 2
  misc_feature (1)..(429): Homolog of NCBI NO: 40644084 NR Description: hydroxycinnamoyl CoA quinate transferase
  misc_feature (1)..(429): Homolog of NCBI NO: 38345030 NR Description: OSJNBa0029H02.14 [Oryza sativa (japonica
  misc_feature (1)..(429): Homolog of NCBI NO: 40644899 NR Description: hydroxycinnamoyl CoA quinate transferase
  misc_feature (1)..(429): Homolog of NCBI NO: 21536883 NR Description: anthranilate N-benzoyltransferase [Arabidopsis
  misc_feature (1)..(429): Homolog of NCBI NO: 15239747 NR Description: anthranilate
  misc_feature (1)..(429): Homolog of NCBI NO: 6469032 NR Description: N-hydroxycinnamoyl/benzoyltransferase [Ipomoea
  misc_feature (1)..(429): Homolog of NCBI NO: 27475616 NR Description: hydroxycinnamoyl transferase [Nicotiana tabacum]
MKVEVVDTTLVTPSEPTPRHTLWLSNLDLAVPKTHTPLVYYYPAPPAGDGGEKQEEFFAPERLREALARALVPFYPLAGRMATGPEGRLEIDCNGEGALFVVARADFTGDEMFRDFEPSPEARRLLVPFAASGDPPCLLAMVQVTFLKCGGVAVGTGMHHVTMDGAGAIQFIRTWTTLARGLDAASVHPSPPVHDRTVLRARSPPHATFEHPVYSPSNLNGLPRPFVTRVYAVSPKLLAGIKSSCAPGVSTYCALTAHLWRAMCVARGLAPDAESRLRVPANIRQRLRPQLPANYFGNAIVRDLVTVRVGDVLSQPLGFVAERIKRAVARVDDAFVRSVIDYLEVESEKGSQAARGQFMPETDLWVVSWLGMPIHDADFGWGCPKFVAPAQMFGSGTAYVTQAPDKDDGVSVLFALEPEYLQCFEKAFYGE

SEQ ID NO: 68078 - DNA, 1098 bp, Triticum aestivum
  misc_feature (1)..(1098): Ceres Seq. ID no. 13589024
aaacaacctagaacatcctaatcgaaaaaaaccctttcgaaagaatccccaaatctcgcacgctccaaaggcccgaaaccctagctctctgctttcatccccgccaccgtccccatggcgccagggctcaaacgcttcaccgacgtcgcggcagacggcacgccccgcctcgacgacgccgccggcgaggagctcgtgtgcgtggagcgcgccgcctcggtcgccctcggcagccgcgcgccggagcccccgggaaccctcttcatcaccaccaggagggtgatttggctcagcggggcggagaagggcaaaggatacgcggtgggcttcctggacatcacgctccacgcagtgtcgcgcgacccggaggcgtacccctcgccgtgcctctacactcagattgaagccaaagctgactctgatgaagaggatggtgattttgactctgaagcaggtggtgactcacagctaccaaaaatctctgagatgcgtattatattggcagatgctgcccaactagattcactttttaatgccttctgccattgtgctgaactgaaccctgatcctactgctgaagaaaatgaagacagtgacttgttccatggtggggatatgaccaatggtggttggattcatggcgatgaagatgaacacatggttgatggaatcgaccctgagttttttattcccaacccgataggtcaaaatggtggagatgacctcagttcttcagtacttgagcttcaaatcaatgaccagcgtttcgaggatgcggatgaagaggaggcccatgaaaatgggcattagaagcagatatatgctcgttttacttatcatgatcctcgtgaggaccatgtcattagtttggttgaagattgctgtagatgcagcttggttcgcctcatgctgttgtgtcccacactttccttttgtcctttaatagacgctgctataggatcgaggactctgagggcaaccgtgtagagttgcgtcgatggtaacttttatgggagaaggtcttgcttactggtcaagaatgtaacatgtagagcttggtggagaatccgattgatggatttcaataacttttgatct

SEQ ID NO: 68079 - protein, 231 aa, Triticum aestivum
  peptide (1)..(231): Ceres Seq. ID no. 13589025
  misc_feature (44)..(113): Pfam Name: Nucleotide-sensitive chloride conductance Pfam Description: Nucleotide-sensitive chloride conductance
  misc_feature (47)..(165): Homolog of NCBI NO: 13431571 NR Description: Chloride conductance regulatory protein ICln (Chloride channel, nucleotide sensitive 1A) (Chloride ion current
  misc_feature (130)..(231): Homolog of NCBI NO: 19881624 NR Description: Hypothetical protein [Oryza sativa]
  misc_feature (47)..(165): Homolog of NCBI NO: 7513563 NR Description: swelling-induced chloride conductance regulatory
  misc_feature (47)..(165): Homolog of NCBI NO: 2197127 NR Description: swelling-induced chloride conductance regulatory
  misc_feature (47)..(165): Homolog of NCBI NO: 1095482 NR Description: Cl current-related protein
  misc_feature (47)..(165): Homolog of NCBI NO: 1060971 NR Description: chloride channel [Oryctolagus cuniculus]
  misc_feature (95)..(231): Homolog of NCBI NO: 21671879 NR Description: Hypothetical protein [Oryza sativa (japonica
  misc_feature (68)..(231): Homolog of NCBI NO: 37531488 NR Description: hypothetical protein [Oryza sativa (japonica
  misc_feature (1)..(97): Homolog of NCBI NO: 37531484 NR Description: unknown protein [Oryza sativa (japonica
  misc_feature (1)..(229): Homolog of NCBI NO: 15241766 NR Description: expressed protein [Arabidopsis thaliana]
MAPGLKRFTDVAADGTPRLDDAAGEELVCVERAASVALGSRAPEPPGTLFITTRRVIWLSGAEKGKGYAVGFLDITLHAVSRDPEAYPSPCLYTQIEAKADSDEEDGDFDSEAGGDSQLPKISEMRIILADAAQLDSLFNAFCHCAELNPDPTAEENEDSDLFHGGDMTNGGWIHGDEDEHMVDGIDPEFFIPNPIGQNGGDDLSSSVLELQINDQRFEDADEEEAHENGH

SEQ ID NO: 68080 - DNA, 1859 bp, Triticum aestivum
  misc_feature (1)..(1859): Ceres Seq. ID no. 13654528
attcttcttctctctccccaccgcctcccccttcctcgtcctcctctctcagtccgaagccgattacttagcagcttgccttcgtctttctctcctgcggttcctggagctacgtcttctcggcccctgccctttggttcgccgctccgctcccccccttctgccgcaaagggggacactcatggcgagtctagtagttctggcatcgctgcttgccgtaattgggctcgcgcagggggaggcgcaatgtgcgcggtacagcgggcggccgcggccacatagcgtgaccatcactgagtttggggccgtcggcgacggcctgaccgtcaatacggtgcccttccagaacgccatcttctacctgcggtcctttgccgacaagggcggcgcacagctgtacgtgcccaaggggcggtggctcaccggcagcttcaacctcaccagccacctcacccttttcctggagaaggacgctgtcatcatcggcaccgaggatgtgacacaatggccaattgtggaacctttgccatcatatggccaaggaattgatcttccgggtgcaaggcatcgcagcttaataaatgggcacaatgttaccgatgtcataattacagggaacagtggaatcgtagacggccagggtttgatatggtggaattggtttcgctcaaataaattgaactatagccggcctcatcttgtggagtttgaggattcggaagaaattgtgatttcgaacttgacatttttagattctccagcatggggtatacatcctgtgtattgcagcaatgtaacaatccgtaatgtcacaatcgagactggattggatgctccactcaccaatggaattgtcccagattcatgctcgaatatgtgcattgaggacagcagaattagcgtcggtcatgatgccatctcattaaaaagtgggtgggacaactatggcattacatttggaaggccaacctcagacattcacattagtagagtggatctgcaagcctcactgggagctgctcttgcatttggcagtgagatgtctggtgggatctcggatgttcatgttgatcaccttcatattcatggttcatccaaaggtatatccttcaggaccgcaccaggccgtggtggttatataagggatgcgatagtatcagatgtccaaatggaagacgtccatgttgcaatcgagttcaccggcgattggtcaagccatcctgatgaacattttgatttgtctgcactcccggagatcagtggaatcaccttaaaagacatggttggaaaaaacatttcgtttgcaggagttttgtcgggaatcgatggcgatcctttcaccaatatctgcctctccaatatcaatttcaccatagctgattcagcgcattctgcctcttggtcttgctccaacatttctggatactccgagtcggtatttcccgaggcttgttccgacctccacagtcaatcatcaaattcctccatctgctcatccacccttagctaccatgcccttgcgacagcgtaaatgcatatagcacccaatattcatcctttcatgtttctgtccatgtacaatctggagacatctagctctagcttcatcgccatctttcccccaaaaaaattctcttccgttataggtgcatcaaagaatcatcgggcttcgtacagtcagctttgaggctcataatacaaaattttggctggcgtccttgatgagtccagagaggtgtttccttgtacagttacatttgttcattcaatctgtaagaaattttgtccggtaggttgtcgagtccaaagagttggtttatattgctgtttattttattgccatatataaaataaacatt

SEQ ID NO: 68081 - protein, 509 aa, Triticum aestivum
  peptide (1)..(509): Ceres Seq. ID no. 13654529
  misc_feature (127)..(484): Pfam Name: Glycosyl hydrolases family 28 Pfam Description: Glycosyl hydrolases family 28
  misc_feature (123)..(487): Homolog of NCBI NO: 21593399 NR Description: polygalacturonase-like protein [Arabidopsis
  misc_feature (126)..(509): Homolog of NCBI NO: 34393209 NR Description: putative polygalacturonase
  misc_feature (79)..(502): Homolog of NCBI NO: 11263971 NR Description: hypothetical protein T17J13.70 - Arabidopsis
  misc_feature (79)..(502): Homolog of NCBI NO: 18412253 NR Description: polygalacturonase, putative [Arabidopsis
  misc_feature (64)..(487): Homolog of NCBI NO: 30679999 NR Description: polygalacturonase, putative [Arabidopsis
  misc_feature (64)..(492): Homolog of NCBI NO: 22327662 NR Description: expressed protein [Arabidopsis thaliana]
  misc_feature (91)..(507): Homolog of NCBI NO: 40714685 NR Description: putative polygalacturonase
  misc_feature (65)..(509): Homolog of NCBI NO: 21553827 NR Description: polygalacturonase, putative [Arabidopsis thaliana]
  misc_feature (65)..(509): Homolog of NCBI NO: 15228881 NR Description: polygalacturonase, putative [Arabidopsis
  misc_feature (65)..(509): Homolog of NCBI NO: 7939578 NR Description: polygalacturonase-like protein [Arabidopsis
FFFSLPTASPFLVLLSQSEADYLAACLRLSLLRFLELRLLGPCPLVRRSAPPLLPQRGTLMASLVVLASLLAVIGLAQGEAQCARYSGRPRPHSVTITEFGAVGDGLTVNTVPFQNAIFYLRSFADKGGAQLYVPKGRWLTGSFNLTSHLTLFLEKDAVIIGTEDVTQWPIVEPLPSYGQGIDLPGARHRSLINGHNVTDVIITGNSGIVDGQGLIWWNWFRSNKLNYSRPHLVEFEDSEEIVISNLTFLDSPAWGIHPVYCSNVTIRNVTIETGLDAPLTNGIVPDSCSNMCIEDSRISVGHDAISLKSGWDNYGITFGRPTSDIHISRVDLQASLGAALAFGSEMSGGISDVHVDHLHIHGSSKGISFRTAPGRGGYIRDAIVSDVQMEDVHVAIEFTGDWSSHPDEHFDLSALPEISGITLKDMVGKNISFAGVLSGIDGDPFTNICLSNINFTIADSAHSASWSCSNISGYSESVFPEACSDLHSQSSNSSICSSTLSYHALATA

SEQ ID NO: 68082 - protein, 449 aa, Triticum aestivum
  peptide (1)..(449): Ceres Seq. ID no. 13654530
  misc_feature (67)..(424): Pfam Name: Glycosyl hydrolases family 28 Pfam Description: Glycosyl hydrolases family 28
  misc_feature (63)..(427): Homolog of NCBI NO: 21593399 NR Description: polygalacturonase-like protein [Arabidopsis
  misc_feature (66)..(449): Homolog of NCBI NO: 34393209 NR Description: putative polygalacturonase
  misc_feature (19)..(442): Homolog of NCBI NO: 11263971 NR Description: hypothetical protein T17J13.70 - Arabidopsis
  misc_feature (19)..(442): Homolog of NCBI NO: 18412253 NR Description: polygalacturonase, putative [Arabidopsis
  misc_feature (4)..(427): Homolog of NCBI NO: 30679999 NR Description: polygalacturonase, putative [Arabidopsis
  misc_feature (4)..(432): Homolog of NCBI NO: 22327662 NR Description: expressed protein [Arabidopsis thaliana]
  misc_feature (31)..(447): Homolog of NCBI NO: 40714685 NR Description: putative polygalacturonase
  misc_feature (5)..(449): Homolog of NCBI NO: 21553827 NR Description: polygalacturonase, putative [Arabidopsis thaliana]
  misc_feature (5)..(449): Homolog of NCBI NO: 15228881 NR Description: polygalacturonase, putative [Arabidopsis
  misc_feature (5)..(449): Homolog of NCBI NO: 7939578 NR Description: polygalacturonase-like protein [Arabidopsis
MASLVVLASLLAVIGLAQGEAQCARYSGRPRPHSVTITEFGAVGDGLTVNTVPFQNAIFYLRSFADKGGAQLYVPKGRWLTGSFNLTSHLTLFLEKDAVIIGTEDVTQWPIVEPLPSYGQGIDLPGARHRSLINGHNVTDVIITGNSGIVDGQGLIWWNWFRSNKLNYSRPHLVEFEDSEEIVISNLTFLDSPAWGIHPVYCSNVTIRNVTIETGLDAPLTNGIVPDSCSNMCIEDSRISVGHDAISLKSGWDNYGITFGRPTSDIHISRVDLQASLGAALAFGSEMSGGISDVHVDHLHIHGSSKGISFRTAPGRGGYIRDAIVSDVQMEDVHVAIEFTGDWSSHPDEHFDLSALPEISGITLKDMVGKNISFAGVLSGIDGDPFTNICLSNINFTIADSAHSASWSCSNISGYSESVFPEACSDLHSQSSNSSICSSTLSYHALATA

SEQ ID NO: 68083 - DNA, 1008 bp, Triticum aestivum
  misc_feature (1)..(1008): Ceres Seq. ID no. 13654531
aaccgccgccgtctgcccgtctgcacgcccatggccaccctcgcgccacgccccgacctcctcctcgtcgctctgagaaggtcccgcgctaggacgcttcgcgtccgcgccgccgccgtcccacgtgcccgccgtcctccggtgccaccgcaggcagcgcggcgcgtcttcctcggcctcggcgccgctttcgtcgaccagctcgcccgcatggcctccggtggtgccccgtcccgctcgttcgtggccgcggcgcggccaaggcagggggtctccccggtcgaagagattttgaagaatgtggagtggccggacgagttccctttcaagcccgacgacttcggccgcttcgacgagtcatcagatactgtgttctattcggctccccgttttgtcacgcacattgacgacccagcaatcagagcgctcacaaaatactactcgcaagttcttcctccaagcaacactccaggcgtggccatcctggacatgtgcagtagctgggtgagccattatccagctgggtacaagcaagagaagatcgtagggatgggtatgaatgaaaacgagctgaaaaagaatccggttttgacacagtatgttgtgcaagacctcaatttgaatccgaagcttccttttgacgataacacctttgatgttataacgaacgtggttagtgtagactacttgacaaaaccaatggatgtttttaaagagatgagacgaatacttaaaccatctggattagctatcatgagcttttcaaatcgctgcttttggacaaaagctatatccatttggacatcaactggtgatgctgaccatgcttggatagttggtgcatactaccattatgctggagggttcgagccccctgaggctgttgatatatctcccaatccaggacaaacagatccgatgtacattgtttgctctagaaagaaaactgcttaattaaatatattttgtatcggaattttgcttaaaagaccaaatactagctgacgc

SEQ ID NO: 68084 - protein, 317 aa, Triticum aestivum
  peptide (1)..(317): Ceres Seq. ID no. 13654532
  misc_feature (111)..(315): Homolog of NCBI NO: 22298320 NR Description: ORF_ID:tlr0778~hypothetical protein
  misc_feature (116)..(299): Homolog of NCBI NO: 15232158 NR Description: expressed protein [Arabidopsis thaliana]
  misc_feature (110)..(295): Homolog of NCBI NO: 23129867 NR Description: hypothetical protein [Nostoc punctiforme]
  misc_feature (110)..(315): Homolog of NCBI NO: 17232182 NR Description: hypothetical protein [Nostoc sp. PCC 7120]
  misc_feature (161)..(314): Homolog of NCBI NO: 32394624 NR Description: methyltrasferase [Griffithsia japonica]
  misc_feature (111)..(314): Homolog of NCBI NO: 22970815 NR Description: hypothetical protein [Chloroflexus aurantiacus]
  misc_feature (54)..(314): Homolog of NCBI NO: 21536833 NR Description: unknown [Arabidopsis thaliana]
  misc_feature (73)..(314): Homolog of NCBI NO: 14030675 NR Description: AT4g29590/T16L4_100 [Arabidopsis thaliana]
  misc_feature (54)..(314): Homolog of NCBI NO: 15233624 NR Description: expressed protein [Arabidopsis thaliana]
  misc_feature (11)..(317): Homolog of NCBI NO: 34910520 NR Description: B1142C05.17 [Oryza sativa (japonica
NRRRLPVCTPMATLAPRPDLLLVALRRSRARTLRVRAAAVPRARRPPVPPQAARRVFLGLGAAFVDQLARMASGGAPSRSFVAAARPRQGVSPVEEILKNVEWPDEFPFKPDDFGRFDESSDTVFYSAPRFVTHIDDPAIRALTKYYSQVLPPSNTPGVAILDMCSSWVSHYPAGYKQEKIVGMGMNENELKKNPVLTQYVVQDLNLNPKLPFDDNTFDVITNVVSVDYLTKPMDVFKEMRRILKPSGLAIMSFSNRCFWTKAISIWTSTGDADHAWIVGAYYHYAGGFEPPEAVDISPNPGQTDPMYIVCSRKKTA

SEQ ID NO: 68085 - protein, 307 aa, Triticum aestivum
  peptide (1)..(307): Ceres Seq. ID no. 13654533
  misc_feature (101)..(305): Homolog of NCBI NO: 22298320 NR Description: ORF_ID:tlr0778~hypothetical protein
  misc_feature (106)..(289): Homolog of NCBI NO: 15232158 NR Description: expressed protein [Arabidopsis thaliana]
  misc_feature (100)..(285): Homolog of NCBI NO: 23129867 NR Description: hypothetical protein [Nostoc punctiforme]
  misc_feature (100)..(305): Homolog of NCBI NO: 17232182 NR Description: hypothetical protein [Nostoc sp. PCC 7120]
  misc_feature (151)..(304): Homolog of NCBI NO: 32394624 NR Description: methyltrasferase [Griffithsia japonica]
  misc_feature (101)..(304): Homolog of NCBI NO: 22970815 NR Description: hypothetical protein [Chloroflexus aurantiacus]
  misc_feature (44)..(304): Homolog of NCBI NO: 21536833 NR Description: unknown [Arabidopsis thaliana]
  misc_feature (63)..(304): Homolog of NCBI NO: 14030675 NR Description: AT4g29590/T16L4_100 [Arabidopsis thaliana]
  misc_feature (44)..(304): Homolog of NCBI NO: 15233624 NR Description: expressed protein [Arabidopsis thaliana]
  misc_feature (1)..(307): Homolog of NCBI NO: 34910520 NR Description: B1142C05.17 [Oryza sativa (japonica
MATLAPRPDLLLVALRRSRARTLRVRAAAVPRARRPPVPPQAARRVFLGLGAAFVDQLARMASGGAPSRSFVAAARPRQGVSPVEEILKNVEWPDEFPFKPDDFGRFDESSDTVFYSAPRFVTHIDDPAIRALTKYYSQVLPPSNTPGVAILDMCSSWVSHYPAGYKQEKIVGMGMNENELKKNPVLTQYVVQDLNLNPKLPFDDNTFDVITNVVSVDYLTKPMDVFKEMRRILKPSGLAIMSFSNRCFWTKAISIWTSTGDADHAWIVGAYYHYAGGFEPPEAVDISPNPGQTDPMYIVCSRKKTA

SEQ ID NO: 68086 - protein, 247 aa, Triticum aestivum
  peptide (1)..(247): Ceres Seq. ID no. 13654534
  misc_feature (41)..(245): Homolog of NCBI NO: 22298320 NR Description: ORF_ID:tlr0778~hypothetical protein
  misc_feature (46)..(229): Homolog of NCBI NO: 15232158 NR Description: expressed protein [Arabidopsis thaliana]
  misc_feature (40)..(225): Homolog of NCBI NO: 23129867 NR Description: hypothetical protein [Nostoc punctiforme]
  misc_feature (40)..(245): Homolog of NCBI NO: 17232182 NR Description: hypothetical protein [Nostoc sp. PCC 7120]
  misc_feature (91)..(244): Homolog of NCBI NO: 32394624 NR Description: methyltrasferase [Griffithsia japonica]
  misc_feature (41)..(244): Homolog of NCBI NO: 22970815 NR Description: hypothetical protein [Chloroflexus aurantiacus]
  misc_feature (1)..(244): Homolog of NCBI NO: 21536833 NR Description: unknown [Arabidopsis thaliana]
  misc_feature (3)..(244): Homolog of NCBI NO: 14030675 NR Description: AT4g29590/T16L4_100 [Arabidopsis thaliana]
  misc_feature (1)..(244): Homolog of NCBI NO: 15233624 NR Description: expressed protein [Arabidopsis thaliana]
  misc_feature (1)..(247): Homolog of NCBI NO: 34910520 NR Description: B1142C05.17 [Oryza sativa (japonica
MASGGAPSRSFVAAARPRQGVSPVEEILKNVEWPDEFPFKPDDFGRFDESSDTVFYSAPRFVTHIDDPAIRALTKYYSQVLPPSNTPGVAILDMCSSWVSHYPAGYKQEKIVGMGMNENELKKNPVLTQYVVQDLNLNPKLPFDDNTFDVITNVVSVDYLTKPMDVFKEMRRILKPSGLAIMSFSNRCFWTKAISIWTSTGDADHAWIVGAYYHYAGGFEPPEAVDISPNPGQTDPMYIVCSRKKTA

SEQ ID NO: 68087 - DNA, 802 bp, Triticum aestivum
  misc_feature (1)..(802): Ceres Seq. ID no. 12614534
acggcgaaacaccccagaaatcccacccgtctccacccagataatcgcgagagatatttcgtcccggacgcgtccgccccgacgaccgaccgacaaacagcgcaaaagtaggagggagaggatgagcaccatggcgatgtcggcgctgaacccggacgcgcccatgttcatcccggcggcgttcaagaaggtggaggactactcgcccgagtggtgggagctcgtcaagaccaccgcctggttccgcgaccactggttccgccagcaccagctctacgaggacctcgccgacaacgtggacgtggacgacgtcgccgccctcctccccgacgactccgtcgacctgctcgacgccgacgacctcttctactccccgccgtcgccccagccccagcccgacttctaccactacaaaccagcagggttcggcggcgacatggacgcggtgctcaagacgctgagcctgaactcgccgaggggcggcggccccgcagcagcctgggcgccgatgaggcacgccgagaagccagcgcagcacgtcagccccagggccggcggtgccgcccgccgcgccatccaccagcctcgctagagctaaacgagtgctgctgccgccgctgctgctgtgtagtgtaaccttgagttcagttcagtcgggttcagtctagtctctccctgcatctgtgtatacagctgaaaaatgaaggggaaaacaaactgcaggcccctgcttgctagctagtgatttcccttcccttgtagcttccctcccgtgttcagaaatgggtcaagaacaaaagct

SEQ ID NO: 68088 - protein, 196 aa, Triticum aestivum
  peptide (1)..(196): Ceres Seq. ID no. 12614535
  misc_feature (46)..(101): Homolog of NCBI NO: 18414176 NR Description: Expressed protein
  misc_feature (46)..(101): Homolog of NCBI NO: 21592596 NR Description: unknown [Arabidopsis thaliana]
  misc_feature (47)..(196): Homolog of NCBI NO: 8489786 NR Description: dehydration-induced protein ERD15 [Lycopersicon
  misc_feature (47)..(196): Homolog of NCBI NO: 21592689 NR Description: ERD15 protein [Arabidopsis thaliana]
  misc_feature (47)..(196): Homolog of NCBI NO: 15227351 NR Description: ERD15 protein
  misc_feature (41)..(196): Homolog of NCBI NO: 32352142 NR Description: hypothetical protein [Oryza sativa (japonica
  misc_feature (46)..(196): Homolog of NCBI NO: 34899128 NR Description: P0496C02.30 [Oryza sativa (japonica
  misc_feature (41)..(196): Homolog of NCBI NO: 34395186 NR Description: unknown protein [Oryza sativa (japonica
RRNTPEIPPVSTQIIARDISSRTRPPRRPTDKQRKSRRERMSTMAMSALNPDAPMFIPAAFKKVEDYSPEWWELVKTTAWFRDHWFRQHQLYEDLADNVDVDDVAALLPDDSVDLLDADDLFYSPPSPQPQPDFYHYKPAGFGGDMDAVLKTLSLNSPRGGGPAAAWAPMRHAEKPAQHVSPRAGGAARRAIHQPR

SEQ ID NO: 68089 - protein, 156 aa, Triticum aestivum
  peptide (1)..(156): Ceres Seq. ID no. 12614536
  misc_feature (6)..(61): Homolog of NCBI NO: 18414176 NR Description: Expressed protein
  misc_feature (6)..(61): Homolog of NCBI NO: 21592596 NR Description: unknown [Arabidopsis thaliana]
  misc_feature (7)..(156): Homolog of NCBI NO: 8489786 NR Description: dehydration-induced protein ERD15 [Lycopersicon
  misc_feature (7)..(156): Homolog of NCBI NO: 21592689 NR Description: ERD15 protein [Arabidopsis thaliana]
  misc_feature (7)..(156): Homolog of NCBI NO: 15227351 NR Description: ERD15 protein
  misc_feature (1)..(156): Homolog of NCBI NO: 32352142 NR Description: hypothetical protein [Oryza sativa (japonica
  misc_feature (6)..(156): Homolog of NCBI NO: 34899128 NR Description: P0496C02.30 [Oryza sativa (japonica
  misc_feature (1)..(156): Homolog of NCBI NO: 34395186 NR Description: unknown protein [Oryza sativa (japonica
MSTMAMSALNPDAPMFIPAAFKKVEDYSPEWWELVKTTAWFRDHWFRQHQLYEDLADNVDVDDVAALLPDDSVDLLDADDLFYSPPSPQPQPDFYHYKPAGFGGDMDAVLKTLSLNSPRGGGPAAAWAPMRHAEKPAQHVSPRAGGAARRAIHQPR

SEQ ID NO: 68090 - protein, 153 aa, Triticum aestivum
  peptide (1)..(153): Ceres Seq. ID no. 12614537
  misc_feature (3)..(58): Homolog of NCBI NO: 18414176 NR Description: Expressed protein
  misc_feature (3)..(58): Homolog of NCBI NO: 21592596 NR Description: unknown [Arabidopsis thaliana]
  misc_feature (4)..(153): Homolog of NCBI NO: 8489786 NR Description: dehydration-induced protein ERD15 [Lycopersicon
  misc_feature (4)..(153): Homolog of NCBI NO: 21592689 NR Description: ERD15 protein [Arabidopsis thaliana]
  misc_feature (4)..(153): Homolog of NCBI NO: 15227351 NR Description: ERD15 protein
  misc_feature (1)..(153): Homolog of NCBI NO: 32352142 NR Description: hypothetical protein [Oryza sativa (japonica
  misc_feature (3)..(153): Homolog of NCBI NO: 34899128 NR Description: P0496C02.30 [Oryza sativa (japonica
  misc_feature (1)..(153): Homolog of NCBI NO: 34395186 NR Description: unknown protein [Oryza sativa (japonica
MAMSALNPDAPMFIPAAFKKVEDYSPEWWELVKTTAWFRDHWFRQHQLYEDLADNVDVDDVAALLPDDSVDLLDADDLFYSPPSPQPQPDFYHYKPAGFGGDMDAVLKTLSLNSPRGGGPAAAWAPMRHAEKPAQHVSPRAGGAARRAIHQPR

SEQ ID NO: 68091 - DNA, 588 bp, Triticum aestivum
  misc_feature (1)..(588): Ceres Seq. ID no. 12624963
agttcactcaaacacagccacgcaacactatcactcaaacacagccgcacaagctagacttacctcctcagtagtataccggagcctcccagctagcaatatggcaaagtgcatcgccgtcgcgctcctgctactggtggcgctcgcgtactgcgacgggagggagctgaaccagaaggaccaggcactggcaacggcacgcggtgccggtgccgccggtggcggcgttggcgaggagaagattttggggttgcctgacctgccgcctgtgggaaccgttaccggtaccagcaccactaacggcccgctggtggcgcttcctgccattcccgggatccctgctcacccatgatcacctctagttcatgttctggcttacaagatgaagctcacctcgtgactttagacttcaaggctgtagcttaacatcgcccggaaggcaaacaccggcgtttcgctgatgtccatgttccttttaatgggcgtctgtatcaactatcctcgtctgtaattcttttcggtccgctttcctgtatttttcgatccttgatgtgctacatgtataaatgctactttcttcgcagtgtt

SEQ ID NO: 68092 - protein, 116 aa, Triticum aestivum
  peptide (1)..(116): Ceres Seq. ID no. 12624964
  misc_feature (52)..(112): Homolog of NCBI NO: 12054814 NR Description: Lt1.1 protein [Triticum aestivum]
  misc_feature (34)..(116): Homolog of NCBI NO: 8468624 NR Description: cold-responsive protein [Triticum aestivum]
  misc_feature (43)..(116): Homolog of NCBI NO: 422007 NR Description: acclimation protein - rye (fragment)
  misc_feature (34)..(115): Homolog of NCBI NO: 7489365 NR Description: acclimation protein 2 - barley
  misc_feature (34)..(116): Homolog of NCBI NO: 7690288 NR Description: low temperature induced protein [Hordeum vulgare]
  misc_feature (34)..(116): Homolog of NCBI NO: 422006 NR Description: acclimation protein - rye
  misc_feature (34)..(116): Homolog of NCBI NO: 7489410 NR Description: probable acclimation protein - barley
VHSNTATQHYHSNTAAQARLTSSVVYRSLPASNMAKCIAVALLLLVALAYCDGRELNQKDQALATARGAGAAGGGVGEEKILGLPDLPPVGTVTGTSTTNGPLVALPAIPGIPAHP

SEQ ID NO: 68093 - protein, 83 aa, Triticum aestivum
  peptide (1)..(83): Ceres Seq. ID no. 12624965
  misc_feature (19)..(79): Homolog of NCBI NO: 12054814 NR Description: Lt1.1 protein [Triticum aestivum]
  misc_feature (1)..(83): Homolog of NCBI NO: 8468624 NR Description: cold-responsive protein [Triticum aestivum]
  misc_feature (10)..(83): Homolog of NCBI NO: 422007 NR Description: acclimation protein - rye (fragment)
  misc_feature (1)..(82): Homolog of NCBI NO: 7489365 NR Description: acclimation protein 2 - barley
  misc_feature (1)..(83): Homolog of NCBI NO: 7690288 NR Description: low temperature induced protein [Hordeum vulgare]
  misc_feature (1)..(83): Homolog of NCBI NO: 422006 NR Description: acclimation protein - rye
  misc_feature (1)..(83): Homolog of NCBI NO: 7489410 NR Description: probable acclimation protein - barley
MAKCIAVALLLLVALAYCDGRELNQKDQALATARGAGAAGGGVGEEKILGLPDLPPVGTVTGTSTTNGPLVALPAIPGIPAHP

SEQ ID NO: 68094 - DNA, 1400 bp, Triticum aestivum
  misc_feature (1)..(1400): Ceres Seq. ID no. 13654468
atcgaataattaatcccgaggcgtcttgaaaaatatatcccaggatggcgatgtcgacggcgacgcggatgctggcgcgccgcgccgcccccgccctcctccgctccgccgccagccccggcctcctccgctcccccgccgccggcacaggccccagccccgccctcgcgctgccggcgctgctgcaggcgcaaggccggtggtaccgcgcatcaggaggggacccgtcaccgtcgttctacgagccgccgccgaccccggccaacctgggcctgagcatcgtcccggagaagaaggcgttcgtggtggagcgctttggcaagtacctcaagacactgtcgtcggggatccacctcctgatgcccggcgtggaccgcatcgcctacgtgcactcgctcaaggaggaggcaatccccatcccggacaactcggcaatcacaaaggacaacgtctcgatacagatcggaggagtgctatacgtcaagatcgtcgacccctacaaggcctcgtacggcgtggagaaccccatctatgctgtcatccagcttgcgcagacaaccatgaggagtgaacttggcaagattaccctcgacaagacctttgaggagagggacacgctcaacaccaacattgtgaagtcaatcaatgaggcagcagaaacttggggtttgaagtgtcttcgctacgaaatcagggacatcactcctccagatggagtcaagaaggccatggagatgcaggcagcagcagagcgcaagaaacgtgctcagatcctcgagtctgaaggtgctatgatggagaatgcaaacaaagcaaagggtgaagctgaagcgattcttgccaggtcacaggccactgctgaagggatcaggatggtctcggagtcgtttaaaactgaangcagcacagaggctggcagcttgaggattgctgaacagtacatcagagcattcagtgaactggctagaaatacgaacacgatgcttcttcccagagacgcagtcacaccggggccaatgattgctcagggccctccagatatgcacccacacgtacaagcagaaactgaccctgggaagccccagccccagccagcggggggcggtggcggcagaagaggctgatttgcccctcgggatgccatccatgagcgacctcggggcctttccgcacaagaagtaaagtagtgagtgtggaatcttgttgatgaggccctttttttttcttcttcttttctgttagggaggaatgaatagctagactggatagatagattggtagggaggcagcgcaactttgtcatgagtgaagatttactgattaggtcggtcgtttggtcggataaaacacaatactctgttggttagggacagctttgagagcaagctttttgtctgtct

SEQ ID NO: 68095 - protein, 359 aa, Triticum aestivum
  peptide (1)..(359): Ceres Seq. ID no. 13654469
  misc_feature (73)..(312): Homolog of NCBI NO: 23028719 NR Description: hypothetical protein [Microbulbifer degradans
  misc_feature (74)..(328): Homolog of NCBI NO: 16805265 NR Description: band 7-related protein; conserved protein,
  misc_feature (73)..(328): Homolog of NCBI NO: 23491123 NR Description: SPFH domain / Band 7 family, putative [Plasmodium
  misc_feature (1)..(270): Homolog of NCBI NO: 21554125 NR Description: stomatin-like protein [Arabidopsis thaliana]
  misc_feature (1)..(270): Homolog of NCBI NO: 15239547 NR Description: expressed protein [Arabidopsis thaliana]
  misc_feature (24)..(270): Homolog of NCBI NO: 18417021 NR Description: expressed protein [Arabidopsis thaliana]
  misc_feature (24)..(270): Homolog of NCBI NO: 7487517 NR Description: hypothetical protein T29A15.70 - Arabidopsis
  misc_feature (15)..(327): Homolog of NCBI NO: 23394406 NR Description: unknown [Phytophthora infestans]
  misc_feature (17)..(295): Homolog of NCBI NO: 7716464 NR Description: stomatin-like protein [Zea mays]
  misc_feature (41)..(337): Homolog of NCBI NO: 34905182 NR Description: P0498E12.9 [Oryza sativa (japonica
  misc_feature (286)..(286): Xaa is any aa, unknown or other
MAMSTATRMLARRAAPALLRSAASPGLLRSPAAGTGPSPALALPALLQAQGRWYRASGGDPSPSFYEPPPTPANLGLSIVPEKKAFVVERFGKYLKTLSSGIHLLMPGVDRIAYVHSLKEEAIPIPDNSAITKDNVSIQIGGVLYVKIVDPYKASYGVENPIYAVIQLAQTTMRSELGKITLDKTFEERDTLNTNIVKSINEAAETWGLKCLRYEIRDITPPDGVKKAMEMQAAAERKKRAQILESEGAMMENANKAKGEAEAILARSQATAEGIRMVSESFKTEXSTEAGSLRIAEQYIRAFSELARNTNTMLLPRDAVTPGPMIAQGPPDMHPHVQAETDPGKPQPQPAGGGGGRRG

SEQ ID NO: 68096 - protein, 357 aa, Triticum aestivum
  peptide (1)..(357): Ceres Seq. ID no. 13654470
  misc_feature (71)..(310): Homolog of NCBI NO: 23028719 NR Description: hypothetical protein [Microbulbifer degradans
  misc_feature (72)..(326): Homolog of NCBI NO: 16805265 NR Description: band 7-related protein; conserved protein,
  misc_feature (71)..(326): Homolog of NCBI NO: 23491123 NR Description: SPFH domain / Band 7 family, putative [Plasmodium
  misc_feature (1)..(268): Homolog of NCBI NO: 21554125 NR Description: stomatin-like protein [Arabidopsis thaliana]
  misc_feature (1)..(268): Homolog of NCBI NO: 15239547 NR Description: expressed protein [Arabidopsis thaliana]
  misc_feature (22)..(268): Homolog of NCBI NO: 18417021 NR Description: expressed protein [Arabidopsis thaliana]
  misc_feature (22)..(268): Homolog of NCBI NO: 7487517 NR Description: hypothetical protein T29A15.70 - Arabidopsis
  misc_feature (13)..(325): Homolog of NCBI NO: 23394406 NR Description: unknown [Phytophthora infestans]
  misc_feature (15)..(293): Homolog of NCBI NO: 7716464 NR Description: stomatin-like protein [Zea mays]
  misc_feature (39)..(335): Homolog of NCBI NO: 34905182 NR Description: P0498E12.9 [Oryza sativa (japonica
  misc_feature (284)..(284): Xaa is any aa, unknown or other
MSTATRMLARRAAPALLRSAASPGLLRSPAAGTGPSPALALPALLQAQGRWYRASGGDPSPSFYEPPPTPANLGLSIVPEKKAFVVERFGKYLKTLSSGIHLLMPGVDRIAYVHSLKEEAIPIPDNSAITKDNVSIQIGGVLYVKIVDPYKASYGVENPIYAVIQLAQTTMRSELGKITLDKTFEERDTLNTNIVKSINEAAETWGLKCLRYEIRDITPPDGVKKAMEMQAAAERKKRAQILESEGAMMENANKAKGEAEAILARSQATAEGIRMVSESFKTEXSTEAGSLRIAEQYIRAFSELARNTNTMLLPRDAVTPGPMIAQGPPDMHPHVQAETDPGKPQPQPAGGGGGRRG

SEQ ID NO: 68097 - protein, 351 aa, Triticum aestivum
  peptide (1)..(351): Ceres Seq. ID no. 13654471
  misc_feature (65)..(304): Homolog of NCBI NO: 23028719 NR Description: hypothetical protein [Microbulbifer degradans
  misc_feature (66)..(320): Homolog of NCBI NO: 16805265 NR Description: band 7-related protein; conserved protein,
  misc_feature (65)..(320): Homolog of NCBI NO: 23491123 NR Description: SPFH domain / Band 7 family, putative [Plasmodium
  misc_feature (1)..(262): Homolog of NCBI NO: 21554125 NR Description: stomatin-like protein [Arabidopsis thaliana]
  misc_feature (1)..(262): Homolog of NCBI NO: 15239547 NR Description: expressed protein [Arabidopsis thaliana]
  misc_feature (16)..(262): Homolog of NCBI NO: 18417021 NR Description: expressed protein [Arabidopsis thaliana]
  misc_feature (16)..(262): Homolog of NCBI NO: 7487517 NR Description: hypothetical protein T29A15.70 - Arabidopsis
  misc_feature (7)..(319): Homolog of NCBI NO: 23394406 NR Description: unknown [Phytophthora infestans]
  misc_feature (9)..(287): Homolog of NCBI NO: 7716464 NR Description: stomatin-like protein [Zea mays]
  misc_feature (33)..(329): Homolog of NCBI NO: 34905182 NR Description: P0498E12.9 [Oryza sativa (japonica
  misc_feature (278)..(278): Xaa is any aa, unknown or other
MLARRAAPALLRSAASPGLLRSPAAGTGPSPALALPALLQAQGRWYRASGGDPSPSFYEPPPTPANLGLSIVPEKKAFVVERFGKYLKTLSSGIHLLMPGVDRIAYVHSLKEEAIPIPDNSAITKDNVSIQIGGVLYVKIVDPYKASYGVENPIYAVIQLAQTTMRSELGKITLDKTFEERDTLNTNIVKSINEAAETWGLKCLRYEIRDITPPDGVKKAMEMQAAAERKKRAQILESEGAMMENANKAKGEAEAILARSQATAEGIRMVSESFKTEXSTEAGSLRIAEQYIRAFSELARNTNTMLLPRDAVTPGPMIAQGPPDMHPHVQAETDPGKPQPQPAGGGGGRRG

SEQ ID NO: 68098 - DNA, 897 bp, Triticum aestivum
  misc_feature (1)..(897): Ceres Seq. ID no. 12583993
ccacacccaagaagcgctccatagctacaccaccaccaagctgatagcaagcaagcaagcattgacaaatccaccatggcgaggcttcagctttccgtcgtggcggcctgcgccgtcctcctcgcgctcgccgccccctccctcgccggcgaccccgacatgctccaggacgtctgcgtcgccgacctggcatccccgatcaagatcaacgggttcccatgcaaggcgaacatcacggccgacgacttcttcttcgccggactcaagaaggccggcaacaccaacaacccggctggttcggtcgtcactgcggctaacgtgctgtcattccccggggtgaacacgctcggcgtgtccatggcgcgcatcgactacgccgtgggagggcagaacccgccacacacccacccgcgcgccaccgagatcatcttcgtcaccgagggaaccctggaggtgggattcatcaccaccgctaacaagctcttcactaaggtcgtcaccgtcggagaggtgttcgtcttcccgcgagggctcgtgcacttccagcagaacaggggcaactgctctgcctccgtcatcgccgccttcaacagccagcttcagggcacccaagccatcgccaccacgctcttggctgccacaccaccagtgccaaccgacgtgctggccaaggccttcagggttgataacgaagacatcgacgccgtcaaggccaggttcaactagggagcctctgccgtctcgcaactctccatccatttcggaagaaaagaatcgtttgtttgttactgaataaatggtattcaagtcatcaagtgagctgtagcgtgtagttgatttgttgttgtgtatgttacatttgttcatctttgagataataaaacttgcttctgtttc

SEQ ID NO: 68099 - protein, 216 aa, Triticum aestivum
  peptide (1)..(216): Ceres Seq. ID no. 12583994
  misc_feature (61)..(209): Pfam Name: Cupin Pfam Description: Cupin
  misc_feature (15)..(215): Homolog of NCBI NO: 15228673 NR Description: germin-like protein (GLP10); protein id:
  misc_feature (24)..(215): Homolog of NCBI NO: 18203447 NR Description: Nectarin 1 precursor (Superoxide dismutase [Mn])
  misc_feature (3)..(215): Homolog of NCBI NO: 7447345 NR Description: probable germin protein - tomato
  misc_feature (2)..(214): Homolog of NCBI NO: 18202917 NR Description: Germin-like protein subfamily 2 member 2
  misc_feature (22)..(215): Homolog of NCBI NO: 15217561 NR Description: germin-like protein
  misc_feature (7)..(215): Homolog of NCBI NO: 27805638 NR Description: Nectarin 1 precursor (Superoxide dismutase [Mn])
  misc_feature (8)..(215): Homolog of NCBI NO: 34904670 NR Description: putative germin protein [Oryza sativa (japonica
  misc_feature (1)..(215): Homolog of NCBI NO: 31712108 NR Description: germin-like protein [Oryza sativa (japonica
  misc_feature (1)..(215): Homolog of NCBI NO: 34906612 NR Description: germin(oxalate oxidase)-like protein
  misc_feature (1)..(215): Homolog of NCBI NO: 34902528 NR Description: probable germin protein 4
MARLQLSVVAACAVLLALAAPSLAGDPDMLQDVCVADLASPIKINGFPCKANITADDFFFAGLKKAGNTNNPAGSVVTAANVLSFPGVNTLGVSMARIDYAVGGQNPPHTHPRATEIIFVTEGTLEVGFITTANKLFTKVVTVGEVFVFPRGLVHFQQNRGNCSASVIAAFNSQLQGTQAIATTLLAATPPVPTDVLAKAFRVDNEDIDAVKARFN

SEQ ID NO: 68100 - protein, 188 aa, Triticum aestivum
  peptide (1)..(188): Ceres Seq. ID no. 12583995
  misc_feature (33)..(181): Pfam Name: Cupin Pfam Description: Cupin
  misc_feature (1)..(187): Homolog of NCBI NO: 15228673 NR Description: germin-like protein (GLP10); protein id:
  misc_feature (1)..(187): Homolog of NCBI NO: 18203447 NR Description: Nectarin 1 precursor (Superoxide dismutase [Mn])
  misc_feature (1)..(187): Homolog of NCBI NO: 7447345 NR Description: probable germin protein - tomato
  misc_feature (1)..(186): Homolog of NCBI NO: 18202917 NR Description: Germin-like protein subfamily 2 member 2
  misc_feature (1)..(187): Homolog of NCBI NO: 15217561 NR Description: germin-like protein
  misc_feature (1)..(187): Homolog of NCBI NO: 27805638 NR Description: Nectarin 1 precursor (Superoxide dismutase [Mn])
  misc_feature (1)..(187): Homolog of NCBI NO: 34904670 NR Description: putative germin protein [Oryza sativa (japonica
  misc_feature (1)..(187): Homolog of NCBI NO: 31712108 NR Description: germin-like protein [Oryza sativa (japonica
  misc_feature (1)..(187): Homolog of NCBI NO: 34906612 NR Description: germin(oxalate oxidase)-like protein
  misc_feature (1)..(187): Homolog of NCBI NO: 34902528 NR Description: probable germin protein 4
MLQDVCVADLASPIKINGFPCKANITADDFFFAGLKKAGNTNNPAGSVVTAANVLSFPGVNTLGVSMARIDYAVGGQNPPHTHPRATEIIFVTEGTLEVGFITTANKLFTKVVTVGEVFVFPRGLVHFQQNRGNCSASVIAAFNSQLQGTQAIATTLLAATPPVPTDVLAKAFRVDNEDIDAVKARFN

SEQ ID NO: 68101 - protein, 122 aa, Triticum aestivum
  peptide (1)..(122): Ceres Seq. ID no. 12583996
  misc_feature (1)..(115): Pfam Name: Cupin Pfam Description: Cupin
  misc_feature (1)..(121): Homolog of NCBI NO: 15228673 NR Description: germin-like protein (GLP10); protein id:
  misc_feature (1)..(121): Homolog of NCBI NO: 18203447 NR Description: Nectarin 1 precursor (Superoxide dismutase [Mn])
  misc_feature (1)..(121): Homolog of NCBI NO: 7447345 NR Description: probable germin protein - tomato
  misc_feature (1)..(120): Homolog of NCBI NO: 18202917 NR Description: Germin-like protein subfamily 2 member 2
  misc_feature (1)..(121): Homolog of NCBI NO: 15217561 NR Description: germin-like protein
  misc_feature (1)..(121): Homolog of NCBI NO: 27805638 NR Description: Nectarin 1 precursor (Superoxide dismutase [Mn])
  misc_feature (1)..(121): Homolog of NCBI NO: 34904670 NR Description: putative germin protein [Oryza sativa (japonica
  misc_feature (1)..(121): Homolog of NCBI NO: 31712108 NR Description: germin-like protein [Oryza sativa (japonica
  misc_feature (1)..(121): Homolog of NCBI NO: 34906612 NR Description: germin(oxalate oxidase)-like protein
  misc_feature (1)..(121): Homolog of NCBI NO: 34902528 NR Description: probable germin protein 4
MARIDYAVGGQNPPHTHPRATEIIFVTEGTLEVGFITTANKLFTKVVTVGEVFVFPRGLVHFQQNRGNCSASVIAAFNSQLQGTQAIATTLLAATPPVPTDVLAKAFRVDNEDIDAVKARFN

SEQ ID NO: 68102 - DNA, 1401 bp, Triticum aestivum
  misc_feature (1)..(1401): Ceres Seq. ID no. 12625108
aacttcaaccccccacgccactcgccaacgcctccgccgtccactcgccttctcgccgccacttgctctgctcaccgcgagcgcgtgcgtgcgtgcgcgcccccggagcgacgatggccgccgcactgccaccgtcgccgcccgccgccctcgcggcgctgctgctcctggtgatgctttcgccggccgcggcgcgcgtccctggcgtgtacaccggcggcgactggcagagcgcgcacgccaccttctacggcggcagcgacgcctccggcaccatgggcggcgcgtgcgggtacgggaacctgtacagccaagggtacggggtgaacaacgcggcgctgagcacggcgctgttcaacgaggggcagaggtgcggcgcctgcttcgagatccggtgcgagaaccagcctgggtgggcgtggtgcctcccggggaggccgtccatcgtcgtcaccgccaccaacttctgcccgcccaactacgcgctcccctccgacgacggcggctggtgcaacccgccccgcccccacttcgacctcgccatgcccatgttcctccacatggcgcagtaccgcgccggcatcgtccccgtctcctaccgccgggtggcgtgccggaagtctggcggggtgcggttcacgatcaacgggttcaggtacttcaacctggtgctgatcacgaacgtggcgggggcgggggacctggtgcgggccagcgtgaaggggtccagcaccgggtggatgcccatgtcccgcaactggggccagaactggcagtccaacgccatcctcgtcggccaggccctctccttccgcgtcaccgccagcgaccgccgcacctccacctcctggaacgccgcgccgcagagctggcgcttcggacagaccttcgagggcaagaacttcagggtctgatcccaccgtgaccttcccttcctcttctccggcgacggtcggcggcatgggcgggaggttcatcgtcttatatataaacgagtactactactacatactagtgggtgagtaattactacagtgagcgagtgagcggtctgtgttggtgtgtttttcccgtccttggtgcgtggcctgtgaatgcatatgcaaggtgcaagcaggttgataccagtagtagcagtaaaagtctagtcttgattagggtaaagaggtgatggttgctgggtactgaagtgtggagtggtggctgaagtggctgcaaagctgcagctgaagatgggagcggcgagtgtagcccgcagctgctgcttctccggtgtcgtcccgtcccgtgtcgtgtcatctttgtctccatggcacgctgctggctgttactagtactatttatcaatcgatcaatcatggacctgatttatatgtctatctatcagcttgatgattccct

SEQ ID NO: 68103 - protein, 307 aa, Triticum aestivum
  peptide (1)..(307): Ceres Seq. ID no. 12625109
TSTPHATRQRLRRPLAFSPPLALLTASACVRARPRSDDGRRTATVAARRPRGAAAPGDAFAGRGARPWRVHRRRLAERARHLLRRQRRLRHHGRRVRVREPVQPRVRGEQRGAEHGAVQRGAEVRRLLRDPVREPAWVGVVPPGEAVHRRHRHQLLPAQLRAPLRRRRLVQPAPPPLRPRHAHVPPHGAVPRRHRPRLLPPGGVPEVWRGAVHDQRVQVLQPGADHERGGGGGPGAGQREGVQHRVDAHVPQLGPELAVQRHPRRPGPLLPRHRQRPPHLHLLERRAAELALRTDLRGQELQGLIPP

SEQ ID NO: 68104 - protein, 303 aa, Triticum aestivum
  peptide (1)..(303): Ceres Seq. ID no. 12625110
  misc_feature (210)..(287): Pfam Name: Pollen allergen Pfam Description: Pollen allergen
  misc_feature (65)..(303): Homolog of NCBI NO: 7488994 NR Description: expansin 1 - tomato
  misc_feature (45)..(303): Homolog of NCBI NO: 13898655 NR Description: expansin [Prunus cerasus]
  misc_feature (48)..(303): Homolog of NCBI NO: 29467509 NR Description: expansin [Pyrus communis]
  misc_feature (53)..(303): Homolog of NCBI NO: 40217878 NR Description: expansin-2 [Petunia x hybrida]
  misc_feature (48)..(303): Homolog of NCBI NO: 20502782 NR Description: expansin 10 precursor [Rumex palustris]
  misc_feature (48)..(303): Homolog of NCBI NO: 20502786 NR Description: expansin 12 precursor [Rumex palustris]
  misc_feature (44)..(303): Homolog of NCBI NO: 16923359 NR Description: alpha-expansin 6 precursor [Cucumis sativus]
  misc_feature (48)..(303): Homolog of NCBI NO: 20502784 NR Description: expansin 11 precursor [Rumex palustris]
  misc_feature (50)..(303): Homolog of NCBI NO: 1076531 NR Description: pollen allergen homolog, hypothetical (clone
  misc_feature (42)..(303): Homolog of NCBI NO: 34897422 NR Description: alpha-expansin [Oryza sativa (japonica
LQPPTPLANASAVHSPSRRHLLCSPRARACVRAPGATMAAALPPSPPAALAALLLLVMLSPAAARVPGVYTGGDWQSAHATFYGGSDASGTMGGACGYGNLYSQGYGVNNAALSTALFNEGQRCGACFEIRCENQPGWAWCLPGRPSIVVTATNFCPPNYALPSDDGGWCNPPRPHFDLAMPMFLHMAQYRAGIVPVSYRRVACRKSGGVRFTINGFRYFNLVLITNVAGAGDLVRASVKGSSTGWMPMSRNWGQNWQSNAILVGQALSFRVTASDRRTSTSWNAAPQSWRFGQTFEGKNFRV

SEQ ID NO: 68105 - protein, 266 aa, Triticum aestivum
  peptide (1)..(266): Ceres Seq. ID no. 12625111
  misc_feature (173)..(250): Pfam Name: Pollen allergen Pfam Description: Pollen allergen
  misc_feature (28)..(266): Homolog of NCBI NO: 7488994 NR Description: expansin 1 - tomato
  misc_feature (8)..(266): Homolog of NCBI NO: 13898655 NR Description: expansin [Prunus cerasus]
  misc_feature (11)..(266): Homolog of NCBI NO: 29467509 NR Description: expansin [Pyrus communis]
  misc_feature (16)..(266): Homolog of NCBI NO: 40217878 NR Description: expansin-2 [Petunia x hybrida]
  misc_feature (11)..(266): Homolog of NCBI NO: 20502782 NR Description: expansin 10 precursor [Rumex palustris]
  misc_feature (11)..(266): Homolog of NCBI NO: 20502786 NR Description: expansin 12 precursor [Rumex palustris]
  misc_feature (7)..(266): Homolog of NCBI NO: 16923359 NR Description: alpha-expansin 6 precursor [Cucumis sativus]
  misc_feature (11)..(266): Homolog of NCBI NO: 20502784 NR Description: expansin 11 precursor [Rumex palustris]
  misc_feature (13)..(266): Homolog of NCBI NO: 1076531 NR Description: pollen allergen homolog, hypothetical (clone
  misc_feature (5)..(266): Homolog of NCBI NO: 34897422 NR Description: alpha-expansin [Oryza sativa (japonica
MAAALPPSPPAALAALLLLVMLSPAAARVPGVYTGGDWQSAHATFYGGSDASGTMGGACGYGNLYSQGYGVNNAALSTALFNEGQRCGACFEIRCENQPGWAWCLPGRPSIVVTATNFCPPNYALPSDDGGWCNPPRPHFDLAMPMFLHMAQYRAGIVPVSYRRVACRKSGGVRFTINGFRYFNLVLITNVAGAGDLVRASVKGSSTGWMPMSRNWGQNWQSNAILVGQALSFRVTASDRRTSTSWNAAPQSWRFGQTFEGKNFRV

SEQ ID NO: 68106 - DNA, 1030 bp, Triticum aestivum
  misc_feature (1)..(1030): Ceres Seq. ID no. 13582815
aacccaatatacacggagaagagatcgtcatcatccgccaaaccagatcggctcggctgcttcctcttcttcaacttcgcagaatcgctggtcttctcgtcctctagttaagtccctcgacagcaatgggaggaggcaacgacggtcatgggtacccacccggtggccaggggggataccctccgcaagggtacccgccgcagcagggaggttaccctccacagcaaggatacccgcctgcacctggagcttacccacctgcacctggggcataccctcctgcacctggggcataccctcctgcgcccggagcgggtggcagtgacggggagaaggggctcctctccaacatcatgcacggtgttgccggtgctcatggtggtggccatggctacccatctggtggccacgggtaccccccgcagcagcatggataccctcagcaaggctaccctcctcagcatggctacccaccgcaacagcatggctaccctccacagcagcatggctatccccctgctggctaccctggctcatctggtcacagtggtagccatggaggaggaggcatgggcatgggcggcatgctagctggaggcgcagcagctgctgccgccgcttacggagcacacaagatttctcacggcggccacggtggaggtggacacatgatgggaggcatgatgggcggccatggaggctatggcggcgggtacggccaccacggcggcaagttcaagcacgggaagcacggccacggcaagttcaagcacggcaagcatgggaagcacggcatgttcggcggcggcggaaagttcaagaagtggaagtaatgcgctagctagtagcttcaccatggctgatgaatcaaaaaaatacctaaactcttcgtgtaggcttccagaacttggtttggtcagggaaagcctttgagatgtatctaagcagggtgtggtgtggttgctgcccggatctcgtggagcttccatcctttcctctatatgatttggcactctagtctgcgtctgtg

SEQ ID NO: 68107 - protein, 235 aa, Triticum aestivum; identical to SEQ ID NO: 51294
  peptide (1)..(235): Ceres Seq. ID no. 13582816
  misc_feature (1)..(229): Pfam Name: Dehydrin Pfam Description: Dehydrin
  misc_feature (87)..(235): Homolog of NCBI NO: 21553447 NR Description: putative glycine and proline-rich protein
  misc_feature (87)..(235): Homolog of NCBI NO: 18398103 NR Description: proline-rich protein family [Arabidopsis
  misc_feature (65)..(235): Homolog of NCBI NO: 15238005 NR Description: glycine/proline-rich protein [Arabidopsis
  misc_feature (43)..(228): Homolog of NCBI NO: 18422542 NR Description: proline-rich protein family [Arabidopsis
  misc_feature (64)..(235): Homolog of NCBI NO: 13543234 NR Description: Unknown (protein for MGC:12025) [Mus musculus]
  misc_feature (64)..(227): Homolog of NCBI NO: 8099125 NR Description: rice EST C27893 corresponds to a region of the
  misc_feature (86)..(235): Homolog of NCBI NO: 15234178 NR Description: glycine/proline-rich protein [Arabidopsis
  misc_feature (60)..(235): Homolog of NCBI NO: 13543234 NR Description: Unknown (protein for MGC:12025) [Mus musculus]
  misc_feature (67)..(235): Homolog of NCBI NO: 6478148 NR Description: putative glycine and proline-rich protein
  misc_feature (67)..(235): Homolog of NCBI NO: 33668156 NR Description: GPRP [Oryza sativa (indica cultivar-group)]

SEQ ID NO: 68108 - protein, 159 aa, Triticum aestivum; identical to SEQ ID NO: 51295
  peptide (1)..(159): Ceres Seq. ID no. 13582817
  misc_feature (1)..(153): Pfam Name: Dehydrin Pfam Description: Dehydrin
  misc_feature (11)..(159): Homolog of NCBI NO: 21553447 NR Description: putative glycine and proline-rich protein
  misc_feature (11)..(159): Homolog of NCBI NO: 18398103 NR Description: proline-rich protein family [Arabidopsis
  misc_feature (1)..(159): Homolog of NCBI NO: 15238005 NR Description: glycine/proline-rich protein [Arabidopsis
  misc_feature (1)..(152): Homolog of NCBI NO: 18422542 NR Description: proline-rich protein family [Arabidopsis
  misc_feature (1)..(159): Homolog of NCBI NO: 13543234 NR Description: Unknown (protein for MGC:12025) [Mus musculus]
  misc_feature (1)..(151): Homolog of NCBI NO: 8099125 NR Description: rice EST C27893 corresponds to a region of the
  misc_feature (10)..(159): Homolog of NCBI NO: 15234178 NR Description: glycine/proline-rich protein [Arabidopsis
  misc_feature (1)..(159): Homolog of NCBI NO: 13543234 NR Description: Unknown (protein for MGC:12025) [Mus musculus]
  misc_feature (1)..(159): Homolog of NCBI NO: 6478148 NR Description: putative glycine and proline-rich protein
  misc_feature (1)..(159): Homolog of NCBI NO: 33668156 NR Description: GPRP [Oryza sativa (indica cultivar-group)]

SEQ ID NO: 68109 - protein, 147 aa, Triticum aestivum; identical to SEQ ID NO: 51296
  peptide (1)..(147): Ceres Seq. ID no. 13582818

SEQ ID NO: 68110 - DNA, 1289 bp, Triticum aestivum
  misc_feature (1)..(1289): Ceres Seq. ID no. 14313540
atcttttccaagcgcagaggcaaagttgtgcacgaggagggcgtgcggcatcggccaactgcagcgcagcggcgccggcggatcttctctccccgcgccgtcccggagtgctccgtccgtgccagtaagcaaaacctacaggattagaagaagccacaatggaaggaagcatcagcggtccgtcagagaaaagggttgccgtggtgaccggagggaaccgggggatggggctggagatatgccggcagcttgcggggcacgggctcgccgtcgtcttgacggcgagggacgacaagaggggcgctgaggcagccgaaacgctccgggaggaggggctatcggacgtcgcgtttcatcagctggagatcagcgagcccgccagtgccgctcgtctggctgctttcgtaaagaagaagttcggcaagcttgacatactggtcaacaatgccggagtgctcggggtgaccacggacgtcggcgacccggcgacccttcaggaaacgcttgcaggcaaggatgggatggagagagccgaatggctgaggcaacggaccacacagaccacccaggatgcagaggactgcctgaggatcaactaccacggcaacaagaccgtcacggaagccctcctcccgctcctccgatcatcctccgacggcagaattgtcaacgtaacctcagcctgggggctgctcaggtatttcagcggcgacgagctccggcgggagctggacgacgtcgcaaacctcacgacgcagcggctcgacgagatgtcggacctgttcctcgaggacctgggcaagggcaatggcgcgctggagcgccgcgggtggccggccgacccggtctacgcggcctacatggcgtccaaggcgctggtgtgcgcctacaccagggtgatcgccagggaggagggcgccgcgctgcgggtcaactgcgtgcaccccggatacgtcgtcaccgggatgaacgactacaccggcgtgctcacggccgcggagggcgccgccgccgcggttgcagttgcactcgcggagaaggggggcgtcaccggcgcctacttcgaccgcactgaactcggagcgtcctttgtgtgatttctccgtggagcagttgtgacataagtatatctagaattatgttatctttgcaataacacaatgtcatgagttgttccagatatggagaattatgttgtgttcacttttttttctctccgctctcagaagtactctccgttcactattatatgatgttctaacttttttataaatcagatgtttttagac

SEQ ID NO: 68111 - protein, 312 aa, Triticum aestivum
  peptide (1)..(312): Ceres Seq. ID no. 14313541
  misc_feature (12)..(307): Homolog of NCBI NO: 25518668 NR Description: hypothetical protein T1N6.22 - Arabidopsis
  misc_feature (12)..(307): Homolog of NCBI NO: 15233062 NR Description: short-chain dehydrogenase/reductase family
  misc_feature (9)..(307): Homolog of NCBI NO: 18378884 NR Description: short-chain dehydrogenase/reductase family
  misc_feature (12)..(307): Homolog of NCBI NO: 15224100 NR Description: short-chain dehydrogenase/reductase family
  misc_feature (11)..(311): Homolog of NCBI NO: 33146492 NR Description: carbonyl reductase -like protein
  misc_feature (1)..(312): Homolog of NCBI NO: 38346769 NR Description: OSJNBa0081C01.20 [Oryza sativa (japonica
  misc_feature (1)..(312): Homolog of NCBI NO: 38346768 NR Description: OSJNBa0081C01.19 [Oryza sativa (japonica
  misc_feature (1)..(312): Homolog of NCBI NO: 38346774 NR Description: OSJNBa0081C01.25 [Oryza sativa (japonica
  misc_feature (1)..(312): Homolog of NCBI NO: 38346767 NR Description: OSJNBa0081C01.18 [Oryza sativa (japonica
  misc_feature (1)..(312): Homolog of NCBI NO: 38346772 NR Description: OSJNBa0081C01.23 [Oryza sativa (japonica
MEGSISGPSEKRVAVVTGGNRGMGLEICRQLAGHGLAVVLTARDDKRGAEAAETLREEGLSDVAFHQLEISEPASAARLAAFVKKKFGKLDILVNNAGVLGVTTDVGDPATLQETLAGKDGMERAEWLRQRTTQTTQDAEDCLRINYHGNKTVTEALLPLLRSSSDGRIVNVTSAWGLLRYFSGDELRRELDDVANLTTQRLDEMSDLFLEDLGKGNGALERRGWPADPVYAAYMASKALVCAYTRVIAREEGAALRVNCVHPGYVVTGMNDYTGVLTAAEGAAAAVAVALAEKGGVTGAYFDRTELGASFV

SEQ ID NO: 68112 - protein, 290 aa, Triticum aestivum
  peptide (1)..(290): Ceres Seq. ID no. 14313542
  misc_feature (1)..(285): Homolog of NCBI NO: 25518668 NR Description: hypothetical protein T1N6.22 - Arabidopsis
  misc_feature (1)..(285): Homolog of NCBI NO: 15233062 NR Description: short-chain dehydrogenase/reductase family
  misc_feature (1)..(285): Homolog of NCBI NO: 18378884 NR Description: short-chain dehydrogenase/reductase family
  misc_feature (1)..(285): Homolog of NCBI NO: 15224100 NR Description: short-chain dehydrogenase/reductase family
  misc_feature (1)..(289): Homolog of NCBI NO: 33146492 NR Description: carbonyl reductase -like protein
  misc_feature (1)..(290): Homolog of NCBI NO: 38346769 NR Description: OSJNBa0081C01.20 [Oryza sativa (japonica
  misc_feature (1)..(290): Homolog of NCBI NO: 38346768 NR Description: OSJNBa0081C01.19 [Oryza sativa (japonica
  misc_feature (1)..(290): Homolog of NCBI NO: 38346774 NR Description: OSJNBa0081C01.25 [Oryza sativa (japonica
  misc_feature (1)..(290): Homolog of NCBI NO: 38346767 NR Description: OSJNBa0081C01.18 [Oryza sativa (japonica
  misc_feature (1)..(290): Homolog of NCBI NO: 38346772 NR Description: OSJNBa0081C01.23 [Oryza sativa (japonica
MGLEICRQLAGHGLAVVLTARDDKRGAEAAETLREEGLSDVAFHQLEISEPASAARLAAFVKKKFGKLDILVNNAGVLGVTTDVGDPATLQETLAGKDGMERAEWLRQRTTQTTQDAEDCLRINYHGNKTVTEALLPLLRSSSDGRIVNVTSAWGLLRYFSGDELRRELDDVANLTTQRLDEMSDLFLEDLGKGNGALERRGWPADPVYAAYMASKALVCAYTRVIAREEGAALRVNCVHPGYVVTGMNDYTGVLTAAEGAAAAVAVALAEKGGVTGAYFDRTELGASFV

SEQ ID NO: 68113 - protein, 191 aa, Triticum aestivum
  peptide (1)..(191): Ceres Seq. ID no. 14313543
  misc_feature (1)..(186): Homolog of NCBI NO: 25518668 NR Description: hypothetical protein T1N6.22 - Arabidopsis
  misc_feature (1)..(186): Homolog of NCBI NO: 15233062 NR Description: short-chain dehydrogenase/reductase family
  misc_feature (1)..(186): Homolog of NCBI NO: 18378884 NR Description: short-chain dehydrogenase/reductase family
  misc_feature (1)..(186): Homolog of NCBI NO: 15224100 NR Description: short-chain dehydrogenase/reductase family
  misc_feature (1)..(190): Homolog of NCBI NO: 33146492 NR Description: carbonyl reductase -like protein
  misc_feature (1)..(191): Homolog of NCBI NO: 38346769 NR Description: OSJNBa0081C01.20 [Oryza sativa (japonica
  misc_feature (1)..(191): Homolog of NCBI NO: 38346768 NR Description: OSJNBa0081C01.19 [Oryza sativa (japonica
  misc_feature (1)..(191): Homolog of NCBI NO: 38346774 NR Description: OSJNBa0081C01.25 [Oryza sativa (japonica
  misc_feature (1)..(191): Homolog of NCBI NO: 38346767 NR Description: OSJNBa0081C01.18 [Oryza sativa (japonica
  misc_feature (1)..(191): Homolog of NCBI NO: 38346772 NR Description: OSJNBa0081C01.23 [Oryza sativa (japonica
MERAEWLRQRTTQTTQDAEDCLRINYHGNKTVTEALLPLLRSSSDGRIVNVTSAWGLLRYFSGDELRRELDDVANLTTQRLDEMSDLFLEDLGKGNGALERRGWPADPVYAAYMASKALVCAYTRVIAREEGAALRVNCVHPGYVVTGMNDYTGVLTAAEGAAAAVAVALAEKGGVTGAYFDRTELGASFV

SEQ ID NO: 68114 - DNA, 1603 bp, Triticum aestivum
  misc_feature (1)..(1603): Ceres Seq. ID no. 13662301
ctcttgtctatgcagcttgcttcccctatctattttctagagggagggggagagagggacaaccaagatccaaatcttggccagcgactcgatcggatctccagccgacgccggcgaccatggctcgccatcacctccttctcttcctccctcttctcgcgcttgccttctcctttgtcatcgccgcccctgagagacagggagatgccgcggccttcatcgatggcgcatcgcaccgctacctgagggatcagccagaggaccaggccacgtccatgtcacttggtgaagtttctgcagctgtttctgtcttgcttggttttgcaccacctgccattcttcctgcaccttcttctgcaaagttaaacaagctgctactcccaaacccatttgacagacctcgttctgttttcttgatgcaacttgatggatcccatgactatgttaatggcttcatatctgatgccggcagtatttacaaaaccaagattgatggtgcaaaaagtgctgctatagagctttcagataaggatgaattgattgtcattcgttcggatgaatcttctggattagatgttcttgataacgaactcgccaacttggcaacctggttggcgggatcctatcagaaagctgatagcaaattaaacattcccttgaagagtggaaacagtcttactttgttcctcactaaggaagcagacgttgaatttgcatccagcttgatctcccttcttaaaaccatcgaaaggggtattcaggttcacgaagatttctcaggaggcatggtgagccctgcagagttattagtatgccacttcacgggcattaaggctctggaagatgaatatggttccgcagaaattgttaagcagggagctgaagtagttcagacagctctcacaaaagcatttgatcaattgcagggagcatataatggaaaaattgttggactggtaatatccgctaaggaggcttcaacatccttggcatccatcatcgatgcaccgtcttcattgcatatctcaagacggcttgcagaagcatctaaaactaatgctacagcttctatagctgctatatatcttgttagattgagtcttgcatggattacagggatcatccttctcgtctcaactctcattgggatttgcttgctcatgaacatgccgcttacgagggacacactcctatattcaaatgccaagattgattagtttgtgctacatacgaattttcacacgatgacatgaaagttttcaacagtcatgcttggtttttcctttggatcctggggtttacagtaggaacgtgagtgtgggcttgctgttcatgcagtgtagcataaaaatactgttgctatgtccttcatttagaatcatactgccactgcctgtttgggcttctcatgtttttccgtaaataaataacaatattcgagtggggtttattttgttaatatcggtcatgattgtatttttgcaaaaagcagtatctgaataaattcgccactcgaatattcattgggatatattttgtcttcatatatgacgttaaatgatttattgagttgaaatttcatataaattgattaatcatatgt

SEQ ID NO: 68115 - protein, 404 aa, Triticum aestivum
  peptide (1)..(404): Ceres Seq. ID no. 13662302
  misc_feature (292)..(404): Homolog of NCBI NO: 40716478 NR Description: putative membrane protein type I [Musa acuminata]
  misc_feature (66)..(404): Homolog of NCBI NO: 15230073 NR Description: type 1 membrane protein -related [Arabidopsis
LVYAACFPYLFSRGRGREGQPRSKSWPATRSDLQPTPATMARHHLLLFLPLLALAFSFVIAAPERQGDAAAFIDGASHRYLRDQPEDQATSMSLGEVSAAVSVLLGFAPPAILPAPSSAKLNKLLLPNPFDRPRSVFLMQLDGSHDYVNGFISDAGSIYKTKIDGAKSAAIELSDKDELIVIRSDESSGLDVLDNELANLATWLAGSYQKADSKLNIPLKSGNSLTLFLTKEADVEFASSLISLLKTIERGIQVHEDFSGGMVSPAELLVCHFTGIKALEDEYGSAEIVKQGAEVVQTALTKAFDQLQGAYNGKIVGLVISAKEASTSLASIIDAPSSLHISRRLAEASKTNATASIAAIYLVRLSLAWITGIILLVSTLIGICLLMNMPLTRDTLLYSNAKID

SEQ ID NO: 68116 - protein, 365 aa, Triticum aestivum
  peptide (1)..(365): Ceres Seq. ID no. 13662303
  misc_feature (253)..(365): Homolog of NCBI NO: 40716478 NR Description: putative membrane protein type I [Musa acuminata]
  misc_feature (27)..(365): Homolog of NCBI NO: 15230073 NR Description: type 1 membrane protein -related [Arabidopsis
MARHHLLLFLPLLALAFSFVIAAPERQGDAAAFIDGASHRYLRDQPEDQATSMSLGEVSAAVSVLLGFAPPAILPAPSSAKLNKLLLPNPFDRPRSVFLMQLDGSHDYVNGFISDAGSIYKTKIDGAKSAAIELSDKDELIVIRSDESSGLDVLDNELANLATWLAGSYQKADSKLNIPLKSGNSLTLFLTKEADVEFASSLISLLKTIERGIQVHEDFSGGMVSPAELLVCHFTGIKALEDEYGSAEIVKQGAEVVQTALTKAFDQLQGAYNGKIVGLVISAKEASTSLASIIDAPSSLHISRRLAEASKTNATASIAAIYLVRLSLAWITGIILLVSTLIGICLLMNMPLTRDTLLYSNAKID

SEQ ID NO: 68117 - protein, 313 aa, Triticum aestivum
  peptide (1)..(313): Ceres Seq. ID no. 13662304
  misc_feature (201)..(313): Homolog of NCBI NO: 40716478 NR Description: putative membrane protein type I [Musa acuminata]
  misc_feature (1)..(313): Homolog of NCBI NO: 15230073 NR Description: type 1 membrane protein -related [Arabidopsis
MSLGEVSAAVSVLLGFAPPAILPAPSSAKLNKLLLPNPFDRPRSVFLMQLDGSHDYVNGFISDAGSIYKTKIDGAKSAAIELSDKDELIVIRSDESSGLDVLDNELANLATWLAGSYQKADSKLNIPLKSGNSLTLFLTKEADVEFASSLISLLKTIERGIQVHEDFSGGMVSPAELLVCHFTGIKALEDEYGSAEIVKQGAEVVQTALTKAFDQLQGAYNGKIVGLVISAKEASTSLASIIDAPSSLHISRRLAEASKTNATASIAAIYLVRLSLAWITGIILLVSTLIGICLLMNMPLTRDTLLYSNAKID

SEQ ID NO: 68118 - DNA, 1179 bp, Triticum aestivum
  misc_feature (1)..(1179): Ceres Seq. ID no. 13598708
acacacagcgacctactatctcataagcctataccatccgttgagccacacccaactccgccatggcgaacccctccaatttccagatcactccccgcgccgcgttcgtggagagcaacgagctcaacttccgcagtctgtacctgttccacacttccctcggcgcaaaccagacccagtccaccgtaatagacccgaatgctagtaccggtttgggtcagacggctgttaacaactgggcgatatgtgatagccctagccccggtgccaccgtcgttgcacgtgcacatggcctgcatatctatgccggtaactggcagaacaccttcagcataacctttgaagttgaaaggtttaaggggtcaacgcttcaggtgatggggatatctgttgaggaaggtgagtgggctattgttggtggcacaggacagttcgcaatggcaaacggtgtcatatacaaaaagttccatgagcagaggagcgacggtaacatcatagaactcactgtccacgcgttctgtccagtgctgaaaggctcgccgagccttctcacaaagcttgggccatggggtggaagtggagggtcagataaagacatcgttgaggcaccaaggcgtctagagagcatcacagttagcagcggctcgattattgattcaatcaaattttcttatgttgaccaagctggccagaagcacacaagtggaccctggggaggatccggaggaaatccgaacacgatcgtactcggggcttctgagtttgtgaaggaagtttctggaacatacggcatttatgacgcagaccaacacaacataataatgtcactgaaattcatcaccaatgtgaaggcttatgggcctttcggagaagcgaatggaacccctttcaccatacctgtggaaaacaatagcagcatagtgggcttcttcgggcgtagtgggatatatctcgatgcgcttggtgtctacgtgcgcccgctctaagcaacaacagctaatgttcttattttcggcgtttgtttctcatttcaaataagaagatgggatcgttgtcctttctcatccggaagatcctatgtagccacccggacttttaggtccctttgttgtgatgaataaaaatatcagttttcttacaaaaaaaaaaaaaaaaaagcttatcgataccgtcgacctc

SEQ ID NO: 68119 - protein, 307 aa, Triticum aestivum
  peptide (1)..(307): Ceres Seq. ID no. 13598709
  misc_feature (5)..(155): Pfam Name: Dirigent-like protein Pfam Description: Dirigent-like protein
  misc_feature (163)..(306): Homolog of NCBI NO: 38344523 NR Description: OSJNBa0016N04.16 [Oryza sativa (japonica
  misc_feature (163)..(306): Homolog of NCBI NO: 38344523 NR Description: OSJNBa0016N04.16 [Oryza sativa (japonica
  misc_feature (5)..(211): Homolog of NCBI NO: 7489672 NR Description: jasmonate-induced protein homolog - wheat
  misc_feature (39)..(305): Homolog of NCBI NO: 21311647 NR Description: hessian fly response gene 1 protein [Triticum
  misc_feature (1)..(306): Homolog of NCBI NO: 7489661 NR Description: benzothiadiazole-induced protein (clone WCI-1) -
  misc_feature (5)..(303): Homolog of NCBI NO: 16151819 NR Description: VER2 [Triticum aestivum]
  misc_feature (5)..(307): Homolog of NCBI NO: 9313027 NR Description: beta-glucosidase aggregating factor precursor
  misc_feature (5)..(297): Homolog of NCBI NO: 7489384 NR Description: jacalin homolog - barley
  misc_feature (5)..(307): Homolog of NCBI NO: 7489383 NR Description: jacalin homolog - barley
  misc_feature (5)..(307): Homolog of NCBI NO: 7489385 NR Description: jakalin homolog - barley
MANPSNFQITPRAAFVESNELNFRSLYLFHTSLGANQTQSTVIDPNASTGLGQTAVNNWAICDSPSPGATVVARAHGLHIYAGNWQNTFSITFEVERFKGSTLQVMGISVEEGEWAIVGGTGQFAMANGVIYKKFHEQRSDGNIIELTVHAFCPVLKGSPSLLTKLGPWGGSGGSDKDIVEAPRRLESITVSSGSIIDSIKFSYVDQAGQKHTSGPWGGSGGNPNTIVLGASEFVKEVSGTYGIYDADQHNIIMSLKFITNVKAYGPFGEANGTPFTIPVENNSSIVGFFGRSGIYLDALGVYVRPL

SEQ ID NO: 68120 - protein, 202 aa, Triticum aestivum
  peptide (1)..(202): Ceres Seq. ID no. 13598710
  misc_feature (71)..(201): Pfam Name: Jacalin-like lectin domain Pfam Description: Jacalin-like lectin domain
  misc_feature (58)..(201): Homolog of NCBI NO: 38344523 NR Description: OSJNBa0016N04.16 [Oryza sativa (japonica
  misc_feature (58)..(201): Homolog of NCBI NO: 38344523 NR Description: OSJNBa0016N04.16 [Oryza sativa (japonica
  misc_feature (1)..(106): Homolog of NCBI NO: 7489672 NR Description: jasmonate-induced protein homolog - wheat
  misc_feature (1)..(200): Homolog of NCBI NO: 21311647 NR Description: hessian fly response gene 1 protein [Triticum
  misc_feature (1)..(201): Homolog of NCBI NO: 7489661 NR Description: benzothiadiazole-induced protein (clone WCI-1) -
  misc_feature (1)..(198): Homolog of NCBI NO: 16151819 NR Description: VER2 [Triticum aestivum]
  misc_feature (1)..(202): Homolog of NCBI NO: 9313027 NR Description: beta-glucosidase aggregating factor precursor
  misc_feature (1)..(192): Homolog of NCBI NO: 7489384 NR Description: jacalin homolog - barley
  misc_feature (1)..(202): Homolog of NCBI NO: 7489383 NR Description: jacalin homolog - barley
  misc_feature (1)..(202): Homolog of NCBI NO: 7489385 NR Description: jakalin homolog - barley
MGISVEEGEWAIVGGTGQFAMANGVIYKKFHEQRSDGNIIELTVHAFCPVLKGSPSLLTKLGPWGGSGGSDKDIVEAPRRLESITVSSGSIIDSIKFSYVDQAGQKHTSGPWGGSGGNPNTIVLGASEFVKEVSGTYGIYDADQHNIIMSLKFITNVKAYGPFGEANGTPFTIPVENNSSIVGFFGRSGIYLDALGVYVRPL

SEQ ID NO: 68121 - protein, 182 aa, Triticum aestivum
  peptide (1)..(182): Ceres Seq. ID no. 13598711
  misc_feature (51)..(181): Pfam Name: Jacalin-like lectin domain Pfam Description: Jacalin-like lectin domain
  misc_feature (38)..(181): Homolog of NCBI NO: 38344523 NR Description: OSJNBa0016N04.16 [Oryza sativa (japonica
  misc_feature (38)..(181): Homolog of NCBI NO: 38344523 NR Description: OSJNBa0016N04.16 [Oryza sativa (japonica
  misc_feature (1)..(86): Homolog of NCBI NO: 7489672 NR Description: jasmonate-induced protein homolog - wheat
  misc_feature (1)..(180): Homolog of NCBI NO: 21311647 NR Description: hessian fly response gene 1 protein [Triticum
  misc_feature (1)..(181): Homolog of NCBI NO: 7489661 NR Description: benzothiadiazole-induced protein (clone WCI-1) -
  misc_feature (1)..(178): Homolog of NCBI NO: 16151819 NR Description: VER2 [Triticum aestivum]
  misc_feature (1)..(182): Homolog of NCBI NO: 9313027 NR Description: beta-glucosidase aggregating factor precursor
  misc_feature (1)..(172): Homolog of NCBI NO: 7489384 NR Description: jacalin homolog - barley
  misc_feature (1)..(182): Homolog of NCBI NO: 7489383 NR Description: jacalin homolog - barley
  misc_feature (1)..(182): Homolog of NCBI NO: 7489385 NR Description: jakalin homolog - barley
MANGVIYKKFHEQRSDGNIIELTVHAFCPVLKGSPSLLTKLGPWGGSGGSDKDIVEAPRRLESITVSSGSIIDSIKFSYVDQAGQKHTSGPWGGSGGNPNTIVLGASEFVKEVSGTYGIYDADQHNIIMSLKFITNVKAYGPFGEANGTPFTIPVENNSSIVGFFGRSGIYLDALGVYVRPL

SEQ ID NO: 68122 - DNA, 669 bp, Triticum aestivum
  misc_feature (1)..(669): Ceres Seq. ID no. 13585156
gagtttacccgacgccaccccctcttttctttcccccttcctcttcaactcccgtctcacctctcccgacgccgaaccgaatcgcagcagcggcagccggagaagaagagatcgagcgccagcagccatgtccggcatggaggaggaggagaacgccgccgagctcaagatcggcgaagagttcctgaaggccaagtgcctgatgaactgcgaggtggcgataatcctggagcacaagtgggagcagctgcagcacatgtcggacggcggcgccgaccaggtctcgcaggtcttcgagaagtcgcaggcctacgtcaagcgcttcagccgctacaagaaccccgacgcggtccgccaggtccgcgagacgctctcccgctacagcctcgtcgagttcgagctctgcaccctcgggaacctctgccccgacaccgccgacgaggccaaggcgctcgtcccctccctcgtccccggcggcaggttcgacagcgacgaccgggtcgacaagatgctcaacgacctctccctcatcaagaagttcgagtagtagcccccataatatgctcttcttgtcttcctccagtgatatgtttaagcttcagattatctccttttattgcgctatgatcataagacatcagtgtcagtctcaaatgaatggagttaatt

SEQ ID NO: 68123 - protein, 208 aa, Triticum aestivum
  peptide (1)..(208): Ceres Seq. ID no. 13585157
EFTRRHPLFSFPLPLQLPSHLSRRRTESQQRQPEKKRSSASSHVRHGGGGERRRAQDRRRVPEGQVPDELRGGDNPGAQVGAAAAHVGRRRRPGLAGLREVAGLRQALQPLQEPRRGPPGPRDALPLQPRRVRALHPREPLPRHRRRGQGARPLPRPRRQVRQRRPGRQDAQRPLPHQEVRVVAPIICSSCLPPVICLSFRLSPFIAL

SEQ ID NO: 68124 - protein, 181 aa, Triticum aestivum
  peptide (1)..(181): Ceres Seq. ID no. 13585158
  misc_feature (62)..(180): Pfam Name: RNA polymerase Rpb4 Pfam Description: RNA polymerase Rpb4
  misc_feature (60)..(174): Homolog of NCBI NO: 24647897 NR Description: CG31237-PA [Drosophila melanogaster]
  misc_feature (49)..(181): Homolog of NCBI NO: 7503310 NR Description: hypothetical protein F43E2.1 - Caenorhabditis
  misc_feature (74)..(181): Homolog of NCBI NO: 28076931 NR Description: RIKEN cDNA 2610028L19 [Mus musculus]
  misc_feature (49)..(181): Homolog of NCBI NO: 39582357 NR Description: Hypothetical protein CBG13151 [Caenorhabditis
  misc_feature (49)..(181): Homolog of NCBI NO: 17533967 NR Description: RNA polymerase Rpb4 family member [Caenorhabditis
  misc_feature (49)..(174): Homolog of NCBI NO: 27263229 NR Description: RNA polymerase II accessory factor rpb4
  misc_feature (49)..(181): Homolog of NCBI NO: 34878674 NR Description: similar to RIKEN cDNA 2610028L19 [Rattus
  misc_feature (49)..(181): Homolog of NCBI NO: 4758574 NR Description: DNA directed RNA polymerase II polypeptide D
  misc_feature (43)..(181): Homolog of NCBI NO: 15242547 NR Description: 15.9 kDa subunit of RNA polymerase II
SLPDATPSFLSPFLFNSRLTSPDAEPNRSSGSRRRRDRAPAAMSGMEEEENAAELKIGEEFLKAKCLMNCEVAIILEHKWEQLQHMSDGGADQVSQVFEKSQAYVKRFSRYKNPDAVRQVRETLSRYSLVEFELCTLGNLCPDTADEAKALVPSLVPGGRFDSDDRVDKMLNDLSLIKKFE

SEQ ID NO: 68125 - protein, 139 aa, Triticum aestivum
  peptide (1)..(139): Ceres Seq. ID no. 13585159
  misc_feature (20)..(138): Pfam Name: RNA polymerase Rpb4 Pfam Description: RNA polymerase Rpb4
  misc_feature (18)..(132): Homolog of NCBI NO: 24647897 NR Description: CG31237-PA [Drosophila melanogaster]
  misc_feature (7)..(139): Homolog of NCBI NO: 7503310 NR Description: hypothetical protein F43E2.1 - Caenorhabditis
  misc_feature (32)..(139): Homolog of NCBI NO: 28076931 NR Description: RIKEN cDNA 2610028L19 [Mus musculus]
  misc_feature (7)..(139): Homolog of NCBI NO: 39582357 NR Description: Hypothetical protein CBG13151 [Caenorhabditis
  misc_feature (7)..(139): Homolog of NCBI NO: 17533967 NR Description: RNA polymerase Rpb4 family member [Caenorhabditis
  misc_feature (7)..(132): Homolog of NCBI NO: 27263229 NR Description: RNA polymerase II accessory factor rpb4
  misc_feature (7)..(139): Homolog of NCBI NO: 34878674 NR Description: similar to RIKEN cDNA 2610028L19 [Rattus
  misc_feature (7)..(139): Homolog of NCBI NO: 4758574 NR Description: DNA directed RNA polymerase II polypeptide D
  misc_feature (1)..(139): Homolog of NCBI NO: 15242547 NR Description: 15.9 kDa subunit of RNA polymerase II
MSGMEEEENAAELKIGEEFLKAKCLMNCEVAIILEHKWEQLQHMSDGGADQVSQVFEKSQAYVKRFSRYKNPDAVRQVRETLSRYSLVEFELCTLGNLCPDTADEAKALVPSLVPGGRFDSDDRVDKMLNDLSLIKKFE

SEQ ID NO: 68126 - DNA, 1032 bp, Triticum aestivum
  misc_feature (1)..(1032): Ceres Seq. ID no. 13596366
aacaagctccattcatctattcttcgtctccaccgatccctttggtagaccaaccagcagcagctctcggctcacctctccctgctcctcgatctatctagtctagtcttcagtgtggccatggcgaaggtgcacccgaacctggccgtgccgtctctggggatggcggcggcggcggcggcccgcgacgacgagccggtgacactgacggtgtggcgcaagtcgctgctcttcaactgccgggggttcacggtgttcgacgccagcggcaacctggtgtaccgcgtggacatctacgcgtccgactcccgcgccgaggtggtgctcatggacgccgcggggcggccggtgctcaccgtccgccgcaagaaggccatcagcctcatgggcgaccagtggctggtgttccccggcgaggagacgcgcgcgccgccgctctacgcggtgaagcgcacgccgcagtacatgcgcggcggcggcaagtcgacggcgcacgtggcggcgtgcgcgggcggcgcgcggtacgaggtggaggggtcgtacgcgcggcggtgctgcgcggtgtacgacgagcagcggcgcgcggtggtggaggtgcagcccaaggaggcggtgggcacggacgtgttccggatggtggtgcggccggcgggcatggacgtgtcgctggccatggccgtcgtgctcgcgctggaccagatgctcgggaggccggggctgctcaggagctggtcctcgtagcgccactgagactgggtcgcctccttcggtttgcctccttcgatttccgaaattgtttgggcccgagagcagaacagctcccatgtgccccccttctctctcttttttttgtttcctttttggaaactttctctttgatatatatgaaggtctatgtgcatcgaaatccttcttgaggtgtatggttttgttcatttttactgtaataaaaccatgcattttgtaaagattattaaagtgggatgaaactgtattactcctatacttctataaaagaagtcacactaggcc

SEQ ID NO: 68127 - protein, 206 aa, Triticum aestivum
  peptide (1)..(206): Ceres Seq. ID no. 13596367
  misc_feature (23)..(190): Pfam Name: Protein of unknown function (DUF567) Pfam Description: Protein of unknown function (DUF567)
  misc_feature (1)..(190): Homolog of NCBI NO: 9279574 NR Description: gb|AAF02862.1~gene_id:MLN21.4~similar to unknown
  misc_feature (25)..(196): Homolog of NCBI NO: 15220064 NR Description: expressed protein [Arabidopsis thaliana]
  misc_feature (22)..(196): Homolog of NCBI NO: 21554362 NR Description: unknown [Arabidopsis thaliana]
  misc_feature (22)..(196): Homolog of NCBI NO: 18400907 NR Description: expressed protein [Arabidopsis thaliana]
  misc_feature (3)..(175): Homolog of NCBI NO: 27542767 NR Description: hypothetical protein-like protein [Sorghum
  misc_feature (4)..(194): Homolog of NCBI NO: 15238123 NR Description: hypothetical protein [Arabidopsis thaliana]
  misc_feature (1)..(194): Homolog of NCBI NO: 15224921 NR Description: expressed protein [Arabidopsis thaliana]
  misc_feature (1)..(204): Homolog of NCBI NO: 27542769 NR Description: hypothetical protein-like protein [Sorghum
  misc_feature (1)..(204): Homolog of NCBI NO: 27542765 NR Description: hypothetical protein-like protein [Sorghum
  misc_feature (1)..(206): Homolog of NCBI NO: 34909256 NR Description: B1148D12.16 [Oryza sativa (japonica
MAKVHPNLAVPSLGMAAAAAARDDEPVTLTVWRKSLLFNCRGFTVFDASGNLVYRVDIYASDSRAEVVLMDAAGRPVLTVRRKKAISLMGDQWLVFPGEETRAPPLYAVKRTPQYMRGGGKSTAHVAACAGGARYEVEGSYARRCCAVYDEQRRAVVEVQPKEAVGTDVFRMVVRPAGMDVSLAMAVVLALDQMLGRPGLLRSWSS

SEQ ID NO: 68128 - protein, 192 aa, Triticum aestivum
  peptide (1)..(192): Ceres Seq. ID no. 13596368
  misc_feature (9)..(176): Pfam Name: Protein of unknown function (DUF567) Pfam Description: Protein of unknown function (DUF567)
  misc_feature (1)..(176): Homolog of NCBI NO: 9279574 NR Description: gb|AAF02862.1~gene_id:MLN21.4~similar to unknown
  misc_feature (11)..(182): Homolog of NCBI NO: 15220064 NR Description: expressed protein [Arabidopsis thaliana]
  misc_feature (8)..(182): Homolog of NCBI NO: 21554362 NR Description: unknown [Arabidopsis thaliana]
  misc_feature (8)..(182): Homolog of NCBI NO: 18400907 NR Description: expressed protein [Arabidopsis thaliana]
  misc_feature (1)..(161): Homolog of NCBI NO: 27542767 NR Description: hypothetical protein-like protein [Sorghum
  misc_feature (1)..(180): Homolog of NCBI NO: 15238123 NR Description: hypothetical protein [Arabidopsis thaliana]
  misc_feature (1)..(180): Homolog of NCBI NO: 15224921 NR Description: expressed protein [Arabidopsis thaliana]
  misc_feature (1)..(190): Homolog of NCBI NO: 27542769 NR Description: hypothetical protein-like protein [Sorghum
  misc_feature (1)..(190): Homolog of NCBI NO: 27542765 NR Description: hypothetical protein-like protein [Sorghum
  misc_feature (1)..(192): Homolog of NCBI NO: 34909256 NR Description: B1148D12.16 [Oryza sativa (japonica
MAAAAAARDDEPVTLTVWRKSLLFNCRGFTVFDASGNLVYRVDIYASDSRAEVVLMDAAGRPVLTVRRKKAISLMGDQWLVFPGEETRAPPLYAVKRTPQYMRGGGKSTAHVAACAGGARYEVEGSYARRCCAVYDEQRRAVVEVQPKEAVGTDVFRMVVRPAGMDVSLAMAVVLALDQMLGRPGLLRSWSS

SEQ ID NO: 68129 - protein, 137 aa, Triticum aestivum
  peptide (1)..(137): Ceres Seq. ID no. 13596369
  misc_feature (1)..(121): Pfam Name: Protein of unknown function (DUF567) Pfam Description: Protein of unknown function (DUF567)
  misc_feature (1)..(121): Homolog of NCBI NO: 9279574 NR Description: gb|AAF02862.1~gene_id:MLN21.4~similar to unknown
  misc_feature (1)..(127): Homolog of NCBI NO: 15220064 NR Description: expressed protein [Arabidopsis thaliana]
  misc_feature (1)..(127): Homolog of NCBI NO: 21554362 NR Description: unknown [Arabidopsis thaliana]
  misc_feature (1)..(127): Homolog of NCBI NO: 18400907 NR Description: expressed protein [Arabidopsis thaliana]
  misc_feature (1)..(106): Homolog of NCBI NO: 27542767 NR Description: hypothetical protein-like protein [Sorghum
  misc_feature (1)..(125): Homolog of NCBI NO: 15238123 NR Description: hypothetical protein [Arabidopsis thaliana]
  misc_feature (1)..(125): Homolog of NCBI NO: 15224921 NR Description: expressed protein [Arabidopsis thaliana]
  misc_feature (1)..(135): Homolog of NCBI NO: 27542769 NR Description: hypothetical protein-like protein [Sorghum
  misc_feature (1)..(135): Homolog of NCBI NO: 27542765 NR Description: hypothetical protein-like protein [Sorghum
  misc_feature (1)..(137): Homolog of NCBI NO: 34909256 NR Description: B1148D12.16 [Oryza sativa (japonica
MDAAGRPVLTVRRKKAISLMGDQWLVFPGEETRAPPLYAVKRTPQYMRGGGKSTAHVAACAGGARYEVEGSYARRCCAVYDEQRRAVVEVQPKEAVGTDVFRMVVRPAGMDVSLAMAVVLALDQMLGRPGLLRSWSS

SEQ ID NO: 68130 - DNA, 1107 bp, Triticum aestivum
  misc_feature (1)..(1107): Ceres Seq. ID no. 14301526
aaccaagattcaaagaatccaatccagtccaatccatcttctctttgccactcttctccgccggagctgctgccaaagtctctgtctttctctgtgtccgtccagtagatgagcatggcggcgacggcggccacggccacgccctggccctccacctcctcctccgtcctcgcccctcgcacccgccaccacgccacccgcagcccccgcgccctccgctccggcttcctcggccgcgccctcaccctcgccgcccccacagaccgcccctcccccgtctccgtctccgtgcgcgcggcctgggacggccccctctcctcggcgcgcctcatcatgcagggccgcaacgtcaagctgacggagaagctcaaggagcacatcgaggacaaggtggggcgcgcggtgcacaaccacgcgcacctggtgcgggaggtggacgtgcgcctctccgcccgcggcggcgacctcagcaagggccccaagctctcccgctgcgaggtcacgctcttcacgcgccgccacggcgtcgtgcgcgcagaggaggaggaggagtcatcctactcctccatcgacgccgccgccgccgtcgtcaagcgcaagctgaggaagatcaaggagaaggagaccgacgtgcgccacctcaagggcaccaaggagtggcaggcctccgggctgtccgacgtggaagacgagtcggaggcagaggagctggaggatgacgacgatgacgagctcgtggaggtcatcggcgccgaggacgaggagaccgtgctcaccaaggttgtgcgcaccaaggtgttcgagatggcgccgctgacggtggatgaggcgctggagcagctggagaacgtcgaccacgacttctacgccttcaggaacgagcagacaggggaggtgaacatcctgtacaagaggaaggagggagggttcgggctcatcatccccaagcaggacggccatgtcgacaaggccaccgtcaacgccaaggagaaggagcaccccgtcgccggctgacgtctcctctccatgacaccaagtggatcactagctgtagctgcattagtcggtctgttttttccctgatgataataatggtggtgggtgtcc

SEQ ID NO: 68131 - protein, 301 aa, Triticum aestivum
  peptide (1)..(301): Ceres Seq. ID no. 14301527
  misc_feature (73)..(174): Pfam Name: Sigma 54 modulation protein / S30EA ribosomal protein Pfam Description: Sigma 54 modulation protein / S30EA ribosomal
  misc_feature (73)..(174): Homolog of NCBI NO: 23125050 NR Description: hypothetical protein [Nostoc punctiforme]
  misc_feature (209)..(286): Homolog of NCBI NO: 17230676 NR Description: light-repressed protein [Nostoc sp. PCC 7120]
  misc_feature (73)..(174): Homolog of NCBI NO: 17230676 NR Description: light-repressed protein [Nostoc sp. PCC 7120]
  misc_feature (73)..(181): Homolog of NCBI NO: 22298376 NR Description: ORF_ID:tlr0833~light repressed protein A homolog
  misc_feature (193)..(301): Homolog of NCBI NO: 22298376 NR Description: ORF_ID:tlr0833~light repressed protein A homolog
  misc_feature (52)..(180): Homolog of NCBI NO: 227070 NR Description: ribosomal protein CS-S5
  misc_feature (52)..(287): Homolog of NCBI NO: 170131 NR Description: ribosomal protein 30S subunit
  misc_feature (52)..(287): Homolog of NCBI NO: 134034 NR Description: Plastid-specific 30S ribosomal protein 1,
  misc_feature (10)..(300): Homolog of NCBI NO: 18420800 NR Description: expressed protein [Arabidopsis thaliana]
  misc_feature (36)..(298): Homolog of NCBI NO: 30102988 NR Description: putative ribosomal protein
MSMAATAATATPWPSTSSSVLAPRTRHHATRSPRALRSGFLGRALTLAAPTDRPSPVSVSVRAAWDGPLSSARLIMQGRNVKLTEKLKEHIEDKVGRAVHNHAHLVREVDVRLSARGGDLSKGPKLSRCEVTLFTRRHGVVRAEEEEESSYSSIDAAAAVVKRKLRKIKEKETDVRHLKGTKEWQASGLSDVEDESEAEELEDDDDDELVEVIGAEDEETVLTKVVRTKVFEMAPLTVDEALEQLENVDHDFYAFRNEQTGEVNILYKRKEGGFGLIIPKQDGHVDKATVNAKEKEHPVAG

SEQ ID NO: 68132 - protein, 299 aa, Triticum aestivum
  peptide (1)..(299): Ceres Seq. ID no. 14301528
  misc_feature (71)..(172): Pfam Name: Sigma 54 modulation protein / S30EA ribosomal protein Pfam Description: Sigma 54 modulation protein / S30EA ribosomal
  misc_feature (71)..(172): Homolog of NCBI NO: 23125050 NR Description: hypothetical protein [Nostoc punctiforme]
  misc_feature (207)..(284): Homolog of NCBI NO: 17230676 NR Description: light-repressed protein [Nostoc sp. PCC 7120]
  misc_feature (71)..(172): Homolog of NCBI NO: 17230676 NR Description: light-repressed protein [Nostoc sp. PCC 7120]
  misc_feature (71)..(179): Homolog of NCBI NO: 22298376 NR Description: ORF_ID:tlr0833~light repressed protein A homolog
  misc_feature (191)..(299): Homolog of NCBI NO: 22298376 NR Description: ORF_ID:tlr0833~light repressed protein A homolog
  misc_feature (50)..(178): Homolog of NCBI NO: 227070 NR Description: ribosomal protein CS-S5
  misc_feature (50)..(285): Homolog of NCBI NO: 170131 NR Description: ribosomal protein 30S subunit
  misc_feature (50)..(285): Homolog of NCBI NO: 134034 NR Description: Plastid-specific 30S ribosomal protein 1,
  misc_feature (8)..(298): Homolog of NCBI NO: 18420800 NR Description: expressed protein [Arabidopsis thaliana]
  misc_feature (34)..(296): Homolog of NCBI NO: 30102988 NR Description: putative ribosomal protein
MAATAATATPWPSTSSSVLAPRTRHHATRSPRALRSGFLGRALTLAAPTDRPSPVSVSVRAAWDGPLSSARLIMQGRNVKLTEKLKEHIEDKVGRAVHNHAHLVREVDVRLSARGGDLSKGPKLSRCEVTLFTRRHGVVRAEEEEESSYSSIDAAAAVVKRKLRKIKEKETDVRHLKGTKEWQASGLSDVEDESEAEELEDDDDDELVEVIGAEDEETVLTKVVRTKVFEMAPLTVDEALEQLENVDHDFYAFRNEQTGEVNILYKRKEGGFGLIIPKQDGHVDKATVNAKEKEHPVAG

SEQ ID NO: 68133 - protein, 238 aa, Triticum aestivum
  peptide (1)..(238): Ceres Seq. ID no. 14301529
  misc_feature (57)..(163): Pfam Name: FHIPEP family Pfam Description: FHIPEP family
  misc_feature (52)..(238): Homolog of NCBI NO: 23018788 NR Description: hypothetical protein [Thermobifida fusca]
PRFKESNPVQSIFSLPLFSAGAAAKVSVFLCVRPVDEHGGDGGHGHALALHLLLRPRPSHPPPRHPQPPRPPLRLPRPRPHPRRPHRPPLPRLRLRARGLGRPPLLGAPHHAGPQRQADGEAQGAHRGQGGARGAQPRAPGAGGGRAPLRPRRRPQQGPQALPLRGHALHAPPRRRARRGGGGVILLLHRRRRRRRQAQAEEDQGEGDRRAPPQGHQGVAGLRAVRRGRRVGGRGAGG

SEQ ID NO: 68134 - DNA, 1374 bp, Triticum aestivum
  misc_feature (1)..(1374): Ceres Seq. ID no. 14302287
acacaccactccttcccctcccctgatctccccgccgcgccgatccccccaccagcgcagcagccatggcgaccgcctacaacctccggtcccgcgacgagccggacgacttcgacgagttcgactccacgccctacggcggcggctacgacctcttcgtcaccttcggccgcccgctcccgccctccgacgagacctgctacccctgctccgccccctccacctcctacgacgcgccccactacgccgccgaggagccctccccctacgcccaccaccagaagccgcagcccgcctacggcttccgcccccagaacgagcagcagcagcagccttcctacggccgcgaggacgacgactccggctacgtatccaagcccaagcccaagccccagcccgcgtacggcttccgcccccaggcggaggaggagcagcgcccgtcctacggcggcggcggggaggaggatgactccggctacggatccaagccgcagcccgcctacggcttccgcccccagcaggaggagcagccggcctacggctccggctacgggtccaagccccagcgctcccaggaggacacctacggatctggctacggccggaagccgcagcaggaggagcccgcctacgggtccgggtacggctccggctacgggaggaagccgcaggccgaggagagctacggatctgggtacgggaacacgacgcagccggaggagggctacggctccggctacgggtccaagccgcaggtggagcagacctacggcgggtcggagtacggctctgggtacggaaggaagccgcaggtggaggagagctatgggtcggggtacggaagcaggccgcaggggggagaggagtatggtagtgctgggtatggtgggaggaagactgaggaggagggctatggtggttctgggtatggatctgggaggaaggtgcaagaggaggatgaaggtgcctatggctctggtgggtaccagaagcccaagccgtatggagaggagactcaggcttcgtatggtggtgggtatgagaagcccagctacggcggggggaactatggccgcaagaagcaggatgacgactctgatgatgagaagaagaaccgttacgcgaagcgcgatgactcggatgatgagaaggagcgttacgagaagcaccaccaccaccgccgccacaactacgacgactaagcatccagcatggtcttgacctgctgccatcgcccccacatctcgctactacacgaataaagattggtcttgtttcccttgttggtgccggatcattcccctcttttatgaacttgtatgactgcaacctaaagtgtgctatgtgggtggtttatatgtttgaactatctcc

SEQ ID NO: 68135 - protein, 406 aa, Triticum aestivum
  peptide (1)..(406): Ceres Seq. ID no. 14302288
  misc_feature (27)..(263): Pfam Name: Equine herpesvirus glycoprotein gp2 Pfam Description: Equine herpesvirus glycoprotein gp2
  misc_feature (6)..(262): Homolog of NCBI NO: 186396 NR Description: mucin
  misc_feature (6)..(263): Homolog of NCBI NO: 1082604 NR Description: mucin 5AC (clone JER58) - human (fragment)
  misc_feature (6)..(406): Homolog of NCBI NO: 4505285 NR Description: mucin 2 [Homo sapiens]
  misc_feature (6)..(231): Homolog of NCBI NO: 188864 NR Description: mucin
  misc_feature (6)..(241): Homolog of NCBI NO: 6523547 NR Description: hydroxyproline-rich glycoprotein DZ-HRGP
  misc_feature (6)..(262): Homolog of NCBI NO: 188864 NR Description: mucin
  misc_feature (6)..(250): Homolog of NCBI NO: 188864 NR Description: mucin
  misc_feature (6)..(250): Homolog of NCBI NO: 188864 NR Description: mucin
  misc_feature (14)..(260): Homolog of NCBI NO: 27375632 NR Description: blr0521 [Bradyrhizobium japonicum]
  misc_feature (6)..(266): Homolog of NCBI NO: 27375632 NR Description: blr0521 [Bradyrhizobium japonicum]
THHSFPSPDLPAAPIPPPAQQPWRPPTTSGPATSRTTSTSSTPRPTAAATTSSSPSAARSRPPTRPATPAPPPPPPTTRPTTPPRSPPPTPTTRSRSPPTASAPRTSSSSSLPTAARTTTPATYPSPSPSPSPRTASAPRRRRSSARPTAAAGRRMTPATDPSRSPPTASAPSRRSSRPTAPATGPSPSAPRRTPTDLATAGSRSRRSPPTGPGTAPATGGSRRPRRATDLGTGTRRSRRRATAPATGPSRRWSRPTAGRSTALGTEGSRRWRRAMGRGTEAGRRGERSMVVLGMVGGRLRRRAMVVLGMDLGGRCKRRMKVPMALVGTRSPSRMERRLRLRMVVGMRSPATAGGTMAARSRMTTLMMRRRTVTRSAMTRMMRRSVTRSTTTTAATTTTTKHPAWS

SEQ ID NO: 68136 - protein, 378 aa, Triticum aestivum
  peptide (1)..(378): Ceres Seq. ID no. 14302289
  misc_feature (66)..(338): Pfam Name: High molecular weight glutenin subunit Pfam Description: High molecular weight glutenin subunit
  misc_feature (46)..(298): Homolog of NCBI NO: 27881721 NR Description: Unknown (protein for MGC:52724) [Xenopus laevis]
  misc_feature (46)..(301): Homolog of NCBI NO: 7440064 NR Description: fus-like protein - human (fragment)
  misc_feature (132)..(340): Homolog of NCBI NO: 7440064 NR Description: fus-like protein - human (fragment)
  misc_feature (4)..(337): Homolog of NCBI NO: 6425089 NR Description: heterokaryon incompatibility protein HET-C
  misc_feature (110)..(360): Homolog of NCBI NO: 7440064 NR Description: fus-like protein - human (fragment)
  misc_feature (32)..(344): Homolog of NCBI NO: 24654243 NR Description: CG15920-PA [Drosophila melanogaster]
  misc_feature (132)..(336): Homolog of NCBI NO: 27881721 NR Description: Unknown (protein for MGC:52724) [Xenopus laevis]
  misc_feature (5)..(378): Homolog of NCBI NO: 9758332 NR Description: gene_id:MIJ24.6~ref|NP_013897.1~similar to
  misc_feature (5)..(378): Homolog of NCBI NO: 24417262 NR Description: unknown [Arabidopsis thaliana]
  misc_feature (11)..(378): Homolog of NCBI NO: 32352182 NR Description: hypothetical protein [Oryza sativa (japonica
MATAYNLRSRDEPDDFDEFDSTPYGGGYDLFVTFGRPLPPSDETCYPCSAPSTSYDAPHYAAEEPSPYAHHQKPQPAYGFRPQNEQQQQPSYGREDDDSGYVSKPKPKPQPAYGFRPQAEEEQRPSYGGGGEEDDSGYGSKPQPAYGFRPQQEEQPAYGSGYGSKPQRSQEDTYGSGYGRKPQQEEPAYGSGYGSGYGRKPQAEESYGSGYGNTTQPEEGYGSGYGSKPQVEQTYGGSEYGSGYGRKPQVEESYGSGYGSRPQGGEEYGSAGYGGRKTEEEGYGGSGYGSGRKVQEEDEGAYGSGGYQKPKPYGEETQASYGGGYEKPSYGGGNYGRKKQDDDSDDEKKNRYAKRDDSDDEKERYEKHHHHRRHNYDD

SEQ ID NO: 68137 - protein, 251 aa, Triticum aestivum
  peptide (1)..(251): Ceres Seq. ID no. 14302290
  misc_feature (1)..(108): Pfam Name: Equine herpesvirus glycoprotein gp2 Pfam Description: Equine herpesvirus glycoprotein gp2
  misc_feature (1)..(107): Homolog of NCBI NO: 186396 NR Description: mucin
  misc_feature (1)..(108): Homolog of NCBI NO: 1082604 NR Description: mucin 5AC (clone JER58) - human (fragment)
  misc_feature (1)..(251): Homolog of NCBI NO: 4505285 NR Description: mucin 2 [Homo sapiens]
  misc_feature (1)..(76): Homolog of NCBI NO: 188864 NR Description: mucin
  misc_feature (1)..(86): Homolog of NCBI NO: 6523547 NR Description: hydroxyproline-rich glycoprotein DZ-HRGP
  misc_feature (1)..(107): Homolog of NCBI NO: 188864 NR Description: mucin
  misc_feature (1)..(95): Homolog of NCBI NO: 188864 NR Description: mucin
  misc_feature (1)..(95): Homolog of NCBI NO: 188864 NR Description: mucin
  misc_feature (1)..(105): Homolog of NCBI NO: 27375632 NR Description: blr0521 [Bradyrhizobium japonicum]
  misc_feature (1)..(111): Homolog of NCBI NO: 27375632 NR Description: blr0521 [Bradyrhizobium japonicum]
MTPATDPSRSPPTASAPSRRSSRPTAPATGPSPSAPRRTPTDLATAGSRSRRSPPTGPGTAPATGGSRRPRRATDLGTGTRRSRRRATAPATGPSRRWSRPTAGRSTALGTEGSRRWRRAMGRGTEAGRRGERSMVVLGMVGGRLRRRAMVVLGMDLGGRCKRRMKVPMALVGTRSPSRMERRLRLRMVVGMRSPATAGGTMAARSRMTTLMMRRRTVTRSAMTRMMRRSVTRSTTTTAATTTTTKHPAWS

SEQ ID NO: 68138 - DNA, 1476 bp, Triticum aestivum
  misc_feature (1)..(1476): Ceres Seq. ID no. 13598282
cccgctgcctattagaacccggcctcgctgcctccacaggcagccgccagtgctcaactgcggcagctaaaactcgattttatccccggaaaatagatcgcctctagtcagcggcggcgccgccgcttcgcttctcggcttgctcggctggtttctctgtaaaaatggtcaatgcacagatggtgagtgggtacttggacaattcgttcaatgcactcatggtttctggtggcggtgagagtggacagacacagaatggtggcacggacaccaccttgtcaggttggaaggacctccccatggagcttctgctgaggatcatatcagtagctggagatgacaggatggccattgtagcctccggtgtttgtaccgggtggcgtgatgcactaggatggggagccacgagtctctccttctcgtggtgccaggaccacatgaatgagttggtgatatcactggcccacaaatttacaaagcttcaagtcctttctctaaggcaaatcaagcctcagcttgaagacagtgcagtggaggctgtagcaaattcttgtcatgatttgcgcgagttggatctgagcagaagcttcaggcttagtgatcggtccttgtatgctctggcacatgggtgccctcaccttacaaggctgaacatcagtggatgttccaatttcagtgatgctgctttgatctacctcactagtcagtgcaagaacttgaaatgcttgaatctgtgcgggtgtgtgcgggcagcatccgacagagcattgcaggccatagcccgcaactgtagtcagctgcaatctttgaaccttggttggtgcgatactgtcactgacgggggagtcactagcttggcatcaggatgtcctgaacttagggccgtcgacttgtgtggctgtgttcttataacagatgagagcgtggttgctcttgcaaacggctgcccacacctgcgttccctggggctgtactactgccagaacatcaccaaccgggccatgtactcgctggccgagaacagccgcatcaggagcaagggcatgagctgggacacggccaagagcagccgcggccgcgacgacaaggacggcctcgccagcctcaacatcagccagtgcaccgcgctgacgcccccgaccgtgcaggcggtgtgcgactccttcccggcgctccacacgtgcccggagaggcactccctcatcatcagcggctgcctgagcctcaccgccgtgcactgcgcgtgcgcccaccaccggcaccgcgccggggccgggagagccatcctgtcaaaccatgcctactgaggtccctccctgtgtggatcatggcagggttctgagatcccggcatggccgagtttgtatcgtgctgtatcagcgaacgtgaagtggaaccgaaggtgcggtggaagtctgtgtgtctgtacttggacattaacaaaatgagttctccgaagaatatgtgagccttgcc

SEQ ID NO: 68139 - protein, 380 aa, Triticum aestivum
  peptide (1)..(380): Ceres Seq. ID no. 13598283
  misc_feature (42)..(367): Homolog of NCBI NO: 7022695 NR Description: unnamed protein product [Homo sapiens]
  misc_feature (42)..(367): Homolog of NCBI NO: 5919219 NR Description: leucine-rich repeats containing F-box protein
  misc_feature (88)..(337): Homolog of NCBI NO: 15237286 NR Description: expressed protein [Arabidopsis thaliana]
  misc_feature (106)..(340): Homolog of NCBI NO: 7512791 NR Description: hypothetical protein DKFZp564P0622.1 - human
  misc_feature (25)..(360): Homolog of NCBI NO: 24652783 NR Description: CG9003-PA [Drosophila melanogaster]
  misc_feature (230)..(367): Homolog of NCBI NO: 26450797 NR Description: unknown protein [Arabidopsis thaliana]
  misc_feature (38)..(367): Homolog of NCBI NO: 18411319 NR Description: F-box protein family [Arabidopsis thaliana]
  misc_feature (37)..(368): Homolog of NCBI NO: 21554029 NR Description: F-box protein AtFBL5 [Arabidopsis thaliana]
  misc_feature (37)..(368): Homolog of NCBI NO: 18394987 NR Description: F-box protein family [Arabidopsis thaliana]
  misc_feature (1)..(380): Homolog of NCBI NO: 34907434 NR Description: P0018C10.44 [Oryza sativa (japonica
MVNAQMVSGYLDNSFNALMVSGGGESGQTQNGGTDTTLSGWKDLPMELLLRIISVAGDDRMAIVASGVCTGWRDALGWGATSLSFSWCQDHMNELVISLAHKFTKLQVLSLRQIKPQLEDSAVEAVANSCHDLRELDLSRSFRLSDRSLYALAHGCPHLTRLNISGCSNFSDAALIYLTSQCKNLKCLNLCGCVRAASDRALQAIARNCSQLQSLNLGWCDTVTDGGVTSLASGCPELRAVDLCGCVLITDESVVALANGCPHLRSLGLYYCQNITNRAMYSLAENSRIRSKGMSWDTAKSSRGRDDKDGLASLNISQCTALTPPTVQAVCDSFPALHTCPERHSLIISGCLSLTAVHCACAHHRHRAGAGRAILSNHAY

SEQ ID NO: 68140 - protein, 375 aa, Triticum aestivum
  peptide (1)..(375): Ceres Seq. ID no. 13598284
  misc_feature (37)..(362): Homolog of NCBI NO: 7022695 NR Description: unnamed protein product [Homo sapiens]
  misc_feature (37)..(362): Homolog of NCBI NO: 5919219 NR Description: leucine-rich repeats containing F-box protein
  misc_feature (83)..(332): Homolog of NCBI NO: 15237286 NR Description: expressed protein [Arabidopsis thaliana]
  misc_feature (101)..(335): Homolog of NCBI NO: 7512791 NR Description: hypothetical protein DKFZp564P0622.1 - human
  misc_feature (20)..(355): Homolog of NCBI NO: 24652783 NR Description: CG9003-PA [Drosophila melanogaster]
  misc_feature (225)..(362): Homolog of NCBI NO: 26450797 NR Description: unknown protein [Arabidopsis thaliana]
  misc_feature (33)..(362): Homolog of NCBI NO: 18411319 NR Description: F-box protein family [Arabidopsis thaliana]
  misc_feature (32)..(363): Homolog of NCBI NO: 21554029 NR Description: F-box protein AtFBL5 [Arabidopsis thaliana]
  misc_feature (32)..(363): Homolog of NCBI NO: 18394987 NR Description: F-box protein family [Arabidopsis thaliana]
  misc_feature (1)..(375): Homolog of NCBI NO: 34907434 NR Description: P0018C10.44 [Oryza sativa (japonica
MVSGYLDNSFNALMVSGGGESGQTQNGGTDTTLSGWKDLPMELLLRIISVAGDDRMAIVASGVCTGWRDALGWGATSLSFSWCQDHMNELVISLAHKFTKLQVLSLRQIKPQLEDSAVEAVANSCHDLRELDLSRSFRLSDRSLYALAHGCPHLTRLNISGCSNFSDAALIYLTSQCKNLKCLNLCGCVRAASDRALQAIARNCSQLQSLNLGWCDTVTDGGVTSLASGCPELRAVDLCGCVLITDESVVALANGCPHLRSLGLYYCQNITNRAMYSLAENSRIRSKGMSWDTAKSSRGRDDKDGLASLNISQCTALTPPTVQAVCDSFPALHTCPERHSLIISGCLSLTAVHCACAHHRHRAGAGRAILSNHAY

SEQ ID NO: 68141 - protein, 362 aa, Triticum aestivum
  peptide (1)..(362): Ceres Seq. ID no. 13598285
  misc_feature (24)..(349): Homolog of NCBI NO: 7022695 NR Description: unnamed protein product [Homo sapiens]
  misc_feature (24)..(349): Homolog of NCBI NO: 5919219 NR Description: leucine-rich repeats containing F-box protein
  misc_feature (70)..(319): Homolog of NCBI NO: 15237286 NR Description: expressed protein [Arabidopsis thaliana]
  misc_feature (88)..(322): Homolog of NCBI NO: 7512791 NR Description: hypothetical protein DKFZp564P0622.1 - human
  misc_feature (7)..(342): Homolog of NCBI NO: 24652783 NR Description: CG9003-PA [Drosophila melanogaster]
  misc_feature (212)..(349): Homolog of NCBI NO: 26450797 NR Description: unknown protein [Arabidopsis thaliana]
  misc_feature (20)..(349): Homolog of NCBI NO: 18411319 NR Description: F-box protein family [Arabidopsis thaliana]
  misc_feature (19)..(350): Homolog of NCBI NO: 21554029 NR Description: F-box protein AtFBL5 [Arabidopsis thaliana]
  misc_feature (19)..(350): Homolog of NCBI NO: 18394987 NR Description: F-box protein family [Arabidopsis thaliana]
  misc_feature (1)..(362): Homolog of NCBI NO: 34907434 NR Description: P0018C10.44 [Oryza sativa (japonica
MVSGGGESGQTQNGGTDTTLSGWKDLPMELLLRIISVAGDDRMAIVASGVCTGWRDALGWGATSLSFSWCQDHMNELVISLAHKFTKLQVLSLRQIKPQLEDSAVEAVANSCHDLRELDLSRSFRLSDRSLYALAHGCPHLTRLNISGCSNFSDAALIYLTSQCKNLKCLNLCGCVRAASDRALQAIARNCSQLQSLNLGWCDTVTDGGVTSLASGCPELRAVDLCGCVLITDESVVALANGCPHLRSLGLYYCQNITNRAMYSLAENSRIRSKGMSWDTAKSSRGRDDKDGLASLNISQCTALTPPTVQAVCDSFPALHTCPERHSLIISGCLSLTAVHCACAHHRHRAGAGRAILSNHAY

SEQ ID NO: 68142 - DNA, 1377 bp, Triticum aestivum
  misc_feature (1)..(1377): Ceres Seq. ID no. 12614610
tccttcggccccgcagcttttctctctcctcaccgtcgcgcgtgtgcccctcctttctgtctctctctcctccgcgcgcgctccctcactctcctcccatccgtctaatggaggccctcgccggcgccgccgcctcgtccgcgctcctcccggccttccccgcccaccagcctcactcccgcgtggcgctccgcgcccgcccctgcggcccccttcgcgcggccgccggcggcggaggcaaggacgacgccgccaagccgaacgggacccccgtcgtcaagttgaaggttgatccaagtcaaaacggagctcttggtccggtcacaactgacaagtcacgcacgacctcatcaaccaattcaactccggactccagtggatccagagctggcttgttcagaacccctatatctggtggtgtgcagagtgcaacttttgcccatggtttacctccaccggctttggctgttcgcaatttaatggaacaggcacgatttgctcatctatgcactgtcatgtctggcatgcatcatcgacgtgctggatatccatttggttcacttgttgactttgctaatgactcaatgggccacccaatattttctctgtcgcccttagcaatccacactagaaacttgctctctgatccaagatgcacacttgttgtccaggtacctggatggagtggattgtctaatgctcgtgtcacaatatttggtgatgtctaccctttgccagctgagcaacaggaatgggcacataagcaatatgttgcaaaacaccaacaatgggcgtctcaacagtggggaaatttttactactacaggatgcagaatatcagcgacatatattttattggaggctttggcactgttgcatgggtagatgtgaaacagtatgaaactattcaacctgacaagatagcagttgacggcggcgaacaaagcttaaaggagttgaacgctattttctctaaaccacttagagagttcatgtctgctgaaggggaggttgacgatgctgctcttatatccgtagacagcaaagggatagacattcgggttcgccagggtgcacagttcaacatccagagacttgcatttgatgtaccatacaaggtggagactctagaggaggccaagagagcactccataagataatcaagacaagcagcaaataagccgaagcgcacacgacctgcacttggtttcaccagccctacaagcccacgccgtgagtcgacaaaaataaccaaggatatgtaatctagcgtacacagacgcaaaataagatgatttctctttaataatgagaaactccctggcaagtccccatatagtgtgtacccatatgcttgtatcgcttgaactgtagtg

SEQ ID NO: 68143 - protein, 392 aa, Triticum aestivum
  peptide (1)..(392): Ceres Seq. ID no. 12614611
  misc_feature (168)..(308): Homolog of NCBI NO: 6006853 NR Description: unknown protein [Arabidopsis thaliana]
  misc_feature (171)..(357): Homolog of NCBI NO: 15599584 NR Description: hypothetical protein [Pseudomonas aeruginosa
  misc_feature (168)..(367): Homolog of NCBI NO: 30678976 NR Description: auxin-regulated protein [Arabidopsis thaliana]
  misc_feature (168)..(390): Homolog of NCBI NO: 18396698 NR Description: auxin-regulated protein
  misc_feature (57)..(392): Homolog of NCBI NO: 34393557 NR Description: putative root border cell-specific protein
  misc_feature (126)..(388): Homolog of NCBI NO: 11994274 NR Description: gb|AAF00629.1~gene_id:MSA6.18~similar to unknown
  misc_feature (126)..(388): Homolog of NCBI NO: 15232479 NR Description: unknown protein
  misc_feature (120)..(388): Homolog of NCBI NO: 18377805 NR Description: unknown protein [Arabidopsis thaliana]
  misc_feature (120)..(388): Homolog of NCBI NO: 15217955 NR Description: unknown protein
  misc_feature (71)..(392): Homolog of NCBI NO: 34905136 NR Description: P0700D12.12 [Oryza sativa (japonica
LRPRSFSLSSPSRVCPSFLSLSPPRALPHSPPIRLMEALAGAAASSALLPAFPAHQPHSRVALRARPCGPLRAAAGGGGKDDAAKPNGTPVVKLKVDPSQNGALGPVTTDKSRTTSSTNSTPDSSGSRAGLFRTPISGGVQSATFAHGLPPPALAVRNLMEQARFAHLCTVMSGMHHRRAGYPFGSLVDFANDSMGHPIFSLSPLAIHTRNLLSDPRCTLVVQVPGWSGLSNARVTIFGDVYPLPAEQQEWAHKQYVAKHQQWASQQWGNFYYYRMQNISDIYFIGGFGTVAWVDVKQYETIQPDKIAVDGGEQSLKELNAIFSKPLREFMSAEGEVDDAALISVDSKGIDIRVRQGAQFNIQRLAFDVPYKVETLEEAKRALHKIIKTSSK

SEQ ID NO: 68144 - protein, 357 aa, Triticum aestivum
  peptide (1)..(357): Ceres Seq. ID no. 12614612
  misc_feature (133)..(273): Homolog of NCBI NO: 6006853 NR Description: unknown protein [Arabidopsis thaliana]
  misc_feature (136)..(322): Homolog of NCBI NO: 15599584 NR Description: hypothetical protein [Pseudomonas aeruginosa
  misc_feature (133)..(332): Homolog of NCBI NO: 30678976 NR Description: auxin-regulated protein [Arabidopsis thaliana]
  misc_feature (133)..(355): Homolog of NCBI NO: 18396698 NR Description: auxin-regulated protein
  misc_feature (22)..(357): Homolog of NCBI NO: 34393557 NR Description: putative root border cell-specific protein
  misc_feature (91)..(353): Homolog of NCBI NO: 11994274 NR Description: gb|AAF00629.1~gene_id:MSA6.18~similar to unknown
  misc_feature (91)..(353): Homolog of NCBI NO: 15232479 NR Description: unknown protein
  misc_feature (85)..(353): Homolog of NCBI NO: 18377805 NR Description: unknown protein [Arabidopsis thaliana]
  misc_feature (85)..(353): Homolog of NCBI NO: 15217955 NR Description: unknown protein
  misc_feature (36)..(357): Homolog of NCBI NO: 34905136 NR Description: P0700D12.12 [Oryza sativa (japonica
MEALAGAAASSALLPAFPAHQPHSRVALRARPCGPLRAAAGGGGKDDAAKPNGTPVVKLKVDPSQNGALGPVTTDKSRTTSSTNSTPDSSGSRAGLFRTPISGGVQSATFAHGLPPPALAVRNLMEQARFAHLCTVMSGMHHRRAGYPFGSLVDFANDSMGHPIFSLSPLAIHTRNLLSDPRCTLVVQVPGWSGLSNARVTIFGDVYPLPAEQQEWAHKQYVAKHQQWASQQWGNFYYYRMQNISDIYFIGGFGTVAWVDVKQYETIQPDKIAVDGGEQSLKELNAIFSKPLREFMSAEGEVDDAALISVDSKGIDIRVRQGAQFNIQRLAFDVPYKVETLEEAKRALHKIIKTSSK

SEQ ID NO: 68145 - protein, 233 aa, Triticum aestivum
  peptide (1)..(233): Ceres Seq. ID no. 12614613
  misc_feature (9)..(149): Homolog of NCBI NO: 6006853 NR Description: unknown protein [Arabidopsis thaliana]
  misc_feature (12)..(198): Homolog of NCBI NO: 15599584 NR Description: hypothetical protein [Pseudomonas aeruginosa
  misc_feature (9)..(208): Homolog of NCBI NO: 30678976 NR Description: auxin-regulated protein [Arabidopsis thaliana]
  misc_feature (9)..(231): Homolog of NCBI NO: 18396698 NR Description: auxin-regulated protein
  misc_feature (1)..(233): Homolog of NCBI NO: 34393557 NR Description: putative root border cell-specific protein
  misc_feature (1)..(229): Homolog of NCBI NO: 11994274 NR Description: gb|AAF00629.1~gene_id:MSA6.18~similar to unknown
  misc_feature (1)..(229): Homolog of NCBI NO: 15232479 NR Description: unknown protein
  misc_feature (1)..(229): Homolog of NCBI NO: 18377805 NR Description: unknown protein [Arabidopsis thaliana]
  misc_feature (1)..(229): Homolog of NCBI NO: 15217955 NR Description: unknown protein
  misc_feature (1)..(233): Homolog of NCBI NO: 34905136 NR Description: P0700D12.12 [Oryza sativa (japonica
MEQARFAHLCTVMSGMHHRRAGYPFGSLVDFANDSMGHPIFSLSPLAIHTRNLLSDPRCTLVVQVPGWSGLSNARVTIFGDVYPLPAEQQEWAHKQYVAKHQQWASQQWGNFYYYRMQNISDIYFIGGFGTVAWVDVKQYETIQPDKIAVDGGEQSLKELNAIFSKPLREFMSAEGEVDDAALISVDSKGIDIRVRQGAQFNIQRLAFDVPYKVETLEEAKRALHKIIKTSSK

SEQ ID NO: 68146 - DNA, 1387 bp, Triticum aestivum
  misc_feature (1)..(1387): Ceres Seq. ID no. 13596281
ccttcagccccaaatccctatcccaaatttccaaggaatcatggcgcgctgctccccgccgctgctgcgccgcttcttctgctgcgccgccaaatctgcctcggccacatccgccgccgccggcaccaagaagaagaacatcgtcttcttgggatctccccaggtggcggcctcggtcctggacacgttgttggccgcgtccagctcccccgactccgcattccaggtcgctgccgtcgtgacgcagccgccggccgccaagaacagggggaggaagctgttgccgtcggccgtcgcgcagctcgcgctcgagcgtgggttccctggcgacctcatcttcacccccgagcgcgctggggaggagtcctttctgtctgacttgaagggggtgaaaccagaactttgcatcactgctgcttacgggaacattttgccacagaggtttcttgacatcccaccatgtgcaggtacagttaatatacacccaagtttgttgcctctatatcgtggtgcagctcctgtgcagagggcattgcaggatggtgttgcagaaacaggtgtttcccttgcatatactatccgtgccttggatgcaggtccagtgattgcttgtgaaaggttttctgtcgatgaatgcatcaaggcaccagagctgcttgctatactattcaatatagggtccaagctactgctggatgaactaccatccgttcttgatggttcagctaagcaaaaggcgaagccacaagatgactccaaagctacactggcgcccaagatgaattcggacgagtcctggctgacatttgacgaagaagctaaagttctccataacaaggtgcgagcatttgcaggatggcctggaacccgtgcaaaattgcaacttatgaaccaaaatggcgaacctgatgttctagacatcaaggttatcagtacgaacgtttccacgtcatgtgacaaagtcggagacgaaaacgaaatactattctcagggaactcactgctcgttccttgcagtgggtcaacttggcttgaggtcttggagcttcagctacctggaaagaaggtaaccacagctcgggacttctggaatggtttgcgtggtcagaagctgttaaaatcaacatagagggaaatctgcattcattttgcagcacatgtgcaaaggatgcaaatgccacgacggccatatgccgtgctcggtttagatgcatcttgcaggattaaagggctgttgacatttatccttagagaaatttgcaggggagcaaaaagatggtcttaatttttgtaaagaaaattatttagattttttgccctaactttttttttacaaatcaataatttttcaaaaaaaaaaaaaaaaaagcttatcgataccgtcgac

SEQ ID NO: 68147 - protein, 375 aa, Triticum aestivum
  peptide (1)..(375): Ceres Seq. ID no. 13596282
  misc_feature (45)..(234): Pfam Name: Formyl transferase Pfam Description: Formyl transferase
  misc_feature (47)..(371): Homolog of NCBI NO: 22990871 NR Description: hypothetical protein [Enterococcus faecium]
  misc_feature (47)..(373): Homolog of NCBI NO: 15643294 NR Description: methionyl-tRNA formyltransferase [Thermotoga
  misc_feature (47)..(367): Homolog of NCBI NO: 26986812 NR Description: methionyl-tRNA formyltransferase [Pseudomonas
  misc_feature (166)..(355): Homolog of NCBI NO: 15864563 NR Description: fmt putative protein [Brassica napus]
  misc_feature (180)..(373): Homolog of NCBI NO: 6069504 NR Description: S-locus protein 8 [Brassica rapa]
  misc_feature (21)..(373): Homolog of NCBI NO: 29824361 NR Description: putative formyl transferase [Arabidopsis thaliana]
  misc_feature (21)..(373): Homolog of NCBI NO: 15219681 NR Description: formyltransferase, putative [Arabidopsis
  misc_feature (21)..(373): Homolog of NCBI NO: 7657875 NR Description: Fmt protein [Brassica napus var. napus]
  misc_feature (345)..(374): Homolog of NCBI NO: 34911294 NR Description: similar to formyl transferase
  misc_feature (14)..(328): Homolog of NCBI NO: 34911294 NR Description: similar to formyl transferase
LQPQIPIPNFQGIMARCSPPLLRRFFCCAAKSASATSAAAGTKKKNIVFLGSPQVAASVLDTLLAASSSPDSAFQVAAVVTQPPAAKNRGRKLLPSAVAQLALERGFPGDLIFTPERAGEESFLSDLKGVKPELCITAAYGNILPQRFLDIPPCAGTVNIHPSLLPLYRGAAPVQRALQDGVAETGVSLAYTIRALDAGPVIACERFSVDECIKAPELLAILFNIGSKLLLDELPSVLDGSAKQKAKPQDDSKATLAPKMNSDESWLTFDEEAKVLHNKVRAFAGWPGTRAKLQLMNQNGEPDVLDIKVISTNVSTSCDKVGDENEILFSGNSLLVPCSGSTWLEVLELQLPGKKVTTARDFWNGLRGQKLLKST

SEQ ID NO: 68148 - protein, 362 aa, Triticum aestivum
  peptide (1)..(362): Ceres Seq. ID no. 13596283
  misc_feature (32)..(221): Pfam Name: Formyl transferase Pfam Description: Formyl transferase
  misc_feature (34)..(358): Homolog of NCBI NO: 22990871 NR Description: hypothetical protein [Enterococcus faecium]
  misc_feature (34)..(360): Homolog of NCBI NO: 15643294 NR Description: methionyl-tRNA formyltransferase [Thermotoga
  misc_feature (34)..(354): Homolog of NCBI NO: 26986812 NR Description: methionyl-tRNA formyltransferase [Pseudomonas
  misc_feature (153)..(342): Homolog of NCBI NO: 15864563 NR Description: fmt putative protein [Brassica napus]
  misc_feature (167)..(360): Homolog of NCBI NO: 6069504 NR Description: S-locus protein 8 [Brassica rapa]
  misc_feature (8)..(360): Homolog of NCBI NO: 29824361 NR Description: putative formyl transferase [Arabidopsis thaliana]
  misc_feature (8)..(360): Homolog of NCBI NO: 15219681 NR Description: formyltransferase, putative [Arabidopsis
  misc_feature (8)..(360): Homolog of NCBI NO: 7657875 NR Description: Fmt protein [Brassica napus var. napus]
  misc_feature (332)..(361): Homolog of NCBI NO: 34911294 NR Description: similar to formyl transferase
  misc_feature (1)..(315): Homolog of NCBI NO: 34911294 NR Description: similar to formyl transferase
MARCSPPLLRRFFCCAAKSASATSAAAGTKKKNIVFLGSPQVAASVLDTLLAASSSPDSAFQVAAVVTQPPAAKNRGRKLLPSAVAQLALERGFPGDLIFTPERAGEESFLSDLKGVKPELCITAAYGNILPQRFLDIPPCAGTVNIHPSLLPLYRGAAPVQRALQDGVAETGVSLAYTIRALDAGPVIACERFSVDECIKAPELLAILFNIGSKLLLDELPSVLDGSAKQKAKPQDDSKATLAPKMNSDESWLTFDEEAKVLHNKVRAFAGWPGTRAKLQLMNQNGEPDVLDIKVISTNVSTSCDKVGDENEILFSGNSLLVPCSGSTWLEVLELQLPGKKVTTARDFWNGLRGQKLLKST

SEQ ID NO: 68149 - DNA, 2258 bp, Triticum aestivum
  misc_feature (1)..(2258): Ceres Seq. ID no. 13590780
aaacaaacccttcyswwaaccagccgccgccactatatgcttatctgcctccgacgaggcctctccctcctccggcagcgccagccccggctcccgccccgcctcctcctccacctctccgccgagccgatgggcgacccggccgtcgcgccggacgccgcctacctggaggcggtgacgcagaagcggatccgcatcttcgaggagatccaggcccggcaggccctcgagcgcctcaacatcggcggcgaccccatcagagtaactttgcctgatggtgcgataaaggaaggcaagaagtggatatcgaccccgatggatatcgcctcggggatatcaactgggctggccgctagctgcctgatagcgcaggtgaatggtgtgctctgggacatgacgaggccattggaaggcgactgtgacttgaagctgttcaagttcgacagcaacgaagggcgtgacacgttctggcactcgagtgctcatattcttggagagtccatcgagagggtgtatggctgcaagttgtgcattggaccttgtactacaagaggagagggtttttactacgacgcccactacaaggacttgacactgaatgatacacactttggtctcattgacaagcaagctaaaaaggctgttgcggagaagcaaccatttgaacgcattgaagtctccagagcagaagctcttgaagtttttgcggaaaatgaatttaaggttgaaataattaacgaattgcccgaggacaagaccattacagtatacagatgtggtcctttggtcgacctttgccgtggcccgcacatcccaaatacttcctttgttaaagctttcgcttgcctcaaggcttcagcatcatactggagaggaaaagcagaccgtgaaagcctgcagagagtatatggaatctctttccctgattctaaacgtctcaaggaatatcaacatatgatagaggaagctaagaaacgcgatcataggttattggggcagtcccagaaactcttctttttccatccacttagcccaggtagctgcttcttccttccaaatggcgctataatatataacaaattgatggattttttgcgcaaggagtatagagagagaggctaccaagaggttctgagtccaaatatttacaacatgcaactttgggaaacctctggacatgctgcaaactacaaggacaacatgtttgtttttgagatcgagaaacaagaatttggccttaagccaatgaattgtcctggccattgcctaatgtttggacacgaggttcgatcgtatagagagttgcctctccgcatggctgattttggagttctgcacagaaatgaacttagtggtgcacttacaggtttgacacgtgtcagaagattccaacaggacgatgcccatattttttgcacggagagccaaatcaaggatgaagttcggtcttgcttggagttcattgattatgtttataaaatatttgggtttgaatacgagctggagttatcaacgagaccagagaagtatttaggtgacattgagacctggaacaaagcagagcaacaactgacagaagcattgaatgagtttgggaagccatggaagataaatgaagcagatggtgctttctatggcccgaaaatagatattggtgtgtttgatgccctcaagaggaaatttcagtgtgcaactctacagctcgattttcagctgccacttcgcttcaagttgacttattctgcagaggacgaagccaagcttgagaggcctgtaatgatacacagggcaatactaggatcagttgaaaggatgtttgccattcttttggagcactataacggtaaatggccgttgtggttaagcccccgacaagccattgtttgctgtgtatctgccaattcactaacatatgcaaaagaggttcatgctcagatacgtgcagctggttttcatgttgacattgacatgactgatagaacaattcaaaagaaggtgcgggaggctcagttagcccaattcaactatattctagtcgtcggcgcaaaagaggcagagtctggaaaggtctctctgagggtaagagacagggcagacctatccacagagaacattgctgacgtcatcgcacgttttaatgatgaagttgcgtctttccagtgatttttaagtcgcttcatcttcttttgttaagacatctactgcacaacccacattgtaatttggtgaagtgtgaggtgaatgaaaatcgtgatact

SEQ ID NO: 68150 - protein, 720 aa, Triticum aestivum
  peptide (1)..(720): Ceres Seq. ID no. 15221007
  misc_feature (346)..(499): Pfam Name: tRNA synthetase class II core domain (G, H, P, S and T) Pfam Description: tRNA synthetase class II core domain (G, H, P,
  misc_feature (42)..(711): Homolog of NCBI NO: 25013040 NR Description: RH56418p [Drosophila melanogaster]
  misc_feature (42)..(711): Homolog of NCBI NO: 24583839 NR Description: Threonyl-tRNA synthetase CG5353-PA [Drosophila
  misc_feature (50)..(715): Homolog of NCBI NO: 39597482 NR Description: Hypothetical protein CBG03144 [Caenorhabditis
  misc_feature (50)..(715): Homolog of NCBI NO: 17532457 NR Description: Threonyl tRNA Synthetase TRS-1 (84.4 kD) (trs-1)
  misc_feature (52)..(173): Homolog of NCBI NO: 7437517 NR Description: threonine-tRNA ligase (EC 6.1.1.3) - Arabidopsis
  misc_feature (185)..(719): Homolog of NCBI NO: 7437517 NR Description: threonine-tRNA ligase (EC 6.1.1.3) - Arabidopsis
  misc_feature (196)..(720): Homolog of NCBI NO: 20429011 NR Description: threonyl-tRNA synthetase [Oryza sativa (japonica
  misc_feature (52)..(719): Homolog of NCBI NO: 15081626 NR Description: AT5g26830/F2P16_90 [Arabidopsis thaliana]
  misc_feature (52)..(719): Homolog of NCBI NO: 30690426 NR Description: threonyl-tRNA synthetase [Arabidopsis thaliana]
  misc_feature (52)..(719): Homolog of NCBI NO: 11271129 NR Description: threonine-tRNA ligase (EC 6.1.1.3)
  misc_feature (5)..(5): Xaa is any aa, unknown or other
  misc_feature (6)..(6): Xaa is any aa, unknown or other
KQTLXXTSRRHYMLICLRRGLSLLRQRQPRLPPRLLLHLSAEPMGDPAVAPDAAYLEAVTQKRIRIFEEIQARQALERLNIGGDPIRVTLPDGAIKEGKKWISTPMDIASGISTGLAASCLIAQVNGVLWDMTRPLEGDCDLKLFKFDSNEGRDTFWHSSAHILGESIERVYGCKLCIGPCTTRGEGFYYDAHYKDLTLNDTHFGLIDKQAKKAVAEKQPFERIEVSRAEALEVFAENEFKVEIINELPEDKTITVYRCGPLVDLCRGPHIPNTSFVKAFACLKASASYWRGKADRESLQRVYGISFPDSKRLKEYQHMIEEAKKRDHRLLGQSQKLFFFHPLSPGSCFFLPNGAIIYNKLMDFLRKEYRERGYQEVLSPNIYNMQLWETSGHAANYKDNMFVFEIEKQEFGLKPMNCPGHCLMFGHEVRSYRELPLRMADFGVLHRNELSGALTGLTRVRRFQQDDAHIFCTESQIKDEVRSCLEFIDYVYKIFGFEYELELSTRPEKYLGDIETWNKAEQQLTEALNEFGKPWKINEADGAFYGPKIDIGVFDALKRKFQCATLQLDFQLPLRFKLTYSAEDEAKLERPVMIHRAILGSVERMFAILLEHYNGKWPLWLSPRQAIVCCVSANSLTYAKEVHAQIRAAGFHVDIDMTDRTIQKKVREAQLAQFNYILVVGAKEAESGKVSLRVRDRADLSTENIADVIARFNDEVASFQ

SEQ ID NO: 68151 - protein, 708 aa, Triticum aestivum
  peptide (1)..(708): Ceres Seq. ID no. 15221008
  misc_feature (334)..(487): Pfam Name: tRNA synthetase class II core domain (G, H, P, S and T) Pfam Description: tRNA synthetase class II core domain (G, H, P,
  misc_feature (30)..(699): Homolog of NCBI NO: 25013040 NR Description: RH56418p [Drosophila melanogaster]
  misc_feature (30)..(699): Homolog of NCBI NO: 24583839 NR Description: Threonyl-tRNA synthetase CG5353-PA [Drosophila
  misc_feature (38)..(703): Homolog of NCBI NO: 39597482 NR Description: Hypothetical protein CBG03144 [Caenorhabditis
  misc_feature (38)..(703): Homolog of NCBI NO: 17532457 NR Description: Threonyl tRNA Synthetase TRS-1 (84.4 kD) (trs-1)
  misc_feature (40)..(161): Homolog of NCBI NO: 7437517 NR Description: threonine-tRNA ligase (EC 6.1.1.3) - Arabidopsis
  misc_feature (173)..(707): Homolog of NCBI NO: 7437517 NR Description: threonine-tRNA ligase (EC 6.1.1.3) - Arabidopsis
  misc_feature (184)..(708): Homolog of NCBI NO: 20429011 NR Description: threonyl-tRNA synthetase [Oryza sativa (japonica
  misc_feature (40)..(707): Homolog of NCBI NO: 15081626 NR Description: AT5g26830/F2P16_90 [Arabidopsis thaliana]
  misc_feature (40)..(707): Homolog of NCBI NO: 30690426 NR Description: threonyl-tRNA synthetase [Arabidopsis thaliana]
  misc_feature (40)..(707): Homolog of NCBI NO: 11271129 NR Description: threonine-tRNA ligase (EC 6.1.1.3)
MLICLRRGLSLLRQRQPRLPPRLLLHLSAEPMGDPAVAPDAAYLEAVTQKRIRIFEEIQARQALERLNIGGDPIRVTLPDGAIKEGKKWISTPMDIASGISTGLAASCLIAQVNGVLWDMTRPLEGDCDLKLFKFDSNEGRDTFWHSSAHILGESIERVYGCKLCIGPCTTRGEGFYYDAHYKDLTLNDTHFGLIDKQAKKAVAEKQPFERIEVSRAEALEVFAENEFKVEIINELPEDKTITVYRCGPLVDLCRGPHIPNTSFVKAFACLKASASYWRGKADRESLQRVYGISFPDSKRLKEYQHMIEEAKKRDHRLLGQSQKLFFFHPLSPGSCFFLPNGAIIYNKLMDFLRKEYRERGYQEVLSPNIYNMQLWETSGHAANYKDNMFVFEIEKQEFGLKPMNCPGHCLMFGHEVRSYRELPLRMADFGVLHRNELSGALTGLTRVRRFQQDDAHIFCTESQIKDEVRSCLEFIDYVYKIFGFEYELELSTRPEKYLGDIETWNKAEQQLTEALNEFGKPWKINEADGAFYGPKIDIGVFDALKRKFQCATLQLDFQLPLRFKLTYSAEDEAKLERPVMIHRAILGSVERMFAILLEHYNGKWPLWLSPRQAIVCCVSANSLTYAKEVHAQIRAAGFHVDIDMTDRTIQKKVREAQLAQFNYILVVGAKEAESGKVSLRVRDRADLSTENIADVIARFNDEVASFQ

SEQ ID NO: 68152 - protein, 677 aa, Triticum aestivum
  peptide (1)..(677): Ceres Seq. ID no. 15221009
  misc_feature (303)..(456): Pfam Name: tRNA synthetase class II core domain (G, H, P, S and T) Pfam Description: tRNA synthetase class II core domain (G, H, P,
  misc_feature (1)..(668): Homolog of NCBI NO: 25013040 NR Description: RH56418p [Drosophila melanogaster]
  misc_feature (1)..(668): Homolog of NCBI NO: 24583839 NR Description: Threonyl-tRNA synthetase CG5353-PA [Drosophila
  misc_feature (7)..(672): Homolog of NCBI NO: 39597482 NR Description: Hypothetical protein CBG03144 [Caenorhabditis
  misc_feature (7)..(672): Homolog of NCBI NO: 17532457 NR Description: Threonyl tRNA Synthetase TRS-1 (84.4 kD) (trs-1)
  misc_feature (9)..(130): Homolog of NCBI NO: 7437517 NR Description: threonine-tRNA ligase (EC 6.1.1.3) - Arabidopsis
  misc_feature (142)..(676): Homolog of NCBI NO: 7437517 NR Description: threonine-tRNA ligase (EC 6.1.1.3) - Arabidopsis
  misc_feature (153)..(677): Homolog of NCBI NO: 20429011 NR Description: threonyl-tRNA synthetase [Oryza sativa (japonica
  misc_feature (9)..(676): Homolog of NCBI NO: 15081626 NR Description: AT5g26830/F2P16_90 [Arabidopsis thaliana]
  misc_feature (9)..(676): Homolog of NCBI NO: 30690426 NR Description: threonyl-tRNA synthetase [Arabidopsis thaliana]
  misc_feature (9)..(676): Homolog of NCBI NO: 11271129 NR Description: threonine-tRNA ligase (EC 6.1.1.3)
MGDPAVAPDAAYLEAVTQKRIRIFEEIQARQALERLNIGGDPIRVTLPDGAIKEGKKWISTPMDIASGISTGLAASCLIAQVNGVLWDMTRPLEGDCDLKLFKFDSNEGRDTFWHSSAHILGESIERVYGCKLCIGPCTTRGEGFYYDAHYKDLTLNDTHFGLIDKQAKKAVAEKQPFERIEVSRAEALEVFAENEFKVEIINELPEDKTITVYRCGPLVDLCRGPHIPNTSFVKAFACLKASASYWRGKADRESLQRVYGISFPDSKRLKEYQHMIEEAKKRDHRLLGQSQKLFFFHPLSPGSCFFLPNGAIIYNKLMDFLRKEYRERGYQEVLSPNIYNMQLWETSGHAANYKDNMFVFEIEKQEFGLKPMNCPGHCLMFGHEVRSYRELPLRMADFGVLHRNELSGALTGLTRVRRFQQDDAHIFCTESQIKDEVRSCLEFIDYVYKIFGFEYELELSTRPEKYLGDIETWNKAEQQLTEALNEFGKPWKINEADGAFYGPKIDIGVFDALKRKFQCATLQLDFQLPLRFKLTYSAEDEAKLERPVMIHRAILGSVERMFAILLEHYNGKWPLWLSPRQAIVCCVSANSLTYAKEVHAQIRAAGFHVDIDMTDRTIQKKVREAQLAQFNYILVVGAKEAESGKVSLRVRDRADLSTENIADVIARFNDEVASFQ

SEQ ID NO: 68153 - DNA, 1351 bp, Triticum aestivum
  misc_feature (1)..(1351): Ceres Seq. ID no. 13595944
gctacacctttgttaacgaaccgcactgccgccgtccccgtctgcctccggccatcaaccatggcgaggagttccatggccgcggtgctcgccgtcctggccgtggcggcgctccggtgcgcgccggccgccgcggagctcccgctggtggagcacccggccaagaacgacgggtcgctcagcctgctcgtcatcggggactggggccgcaacggcacctacaaccaatccagggtcgcggaccagatggggaaggtcggggagaggctggacatcgacttcgtggtctccaccggcgacaacttctacgaggacggcctcacgggcgttcatgaccagcagttcgaggaatccttcaccaatatctacaccgcccagagcttgcagaagccgtggtatctcgttcttggaaaccatgactaccggggcaatgcgcttgcacagcttgacccagtcatgcgcaagctcgatgagcgattcgtttgcatgagatcattcattgtcaatgcagagatcgtggagttcttcttcatcgacactactccattccagctcaagtactggactcaccctaaagacagtcactatgactggagaggagtggcgcctcgagaaaactacatagctaatctgctgaaggatttggatgaggcaatgaagaaatcaactgcaaagtggaagatcgctattgggcatcataccatcaggagcgtcagtgatcatggggacaccaaggagctcctgcaattgcttcttccagtcctcaaggttaacggcatcgacttctacatcaatgggcacgaccactgcctggaacacattagcagcagagacagtccgatccaatacttcactagcggaggcggttcaaaagcatggaggggagtctaccagccaaatgatgataagctccagttcttttatgatgggcaagggttcatgtccctccagctaaaccaggaccaagctgacttcatcttttatgatgtttctgggaaagtcttgtacaagtggagctcgcgcaaaacaaactacttccagccctccatctatgtcactgcagaatgagggagatgcagatcatggcaggagaattagtttggtagcgctatttgtgaaagaaattgaatgtgccactgtggtaacagtggtaaaggtaatagattggtatttagtatggtgtgtggttcagcgctgaagaaatattgaactggctgtgaattgtctacaataaaggagcagagatgctcagtatggtgtccattggttctgatgcatacataagtcgcagggatctattgatgcgatgtgcatttagagaaatatatgcataaactctaatattgtaccc

SEQ ID NO: 68154 - protein, 355 aa, Triticum aestivum
  peptide (1)..(355): Ceres Seq. ID no. 15221712
  misc_feature (60)..(271): Pfam Name: Calcineurin-like phosphoesterase Pfam Description: Calcineurin-like phosphoesterase
  misc_feature (43)..(351): Homolog of NCBI NO: 30911094 NR Description: putative purple acid phosphatase [Arabidopsis
  misc_feature (43)..(351): Homolog of NCBI NO: 30683951 NR Description: calcineurin-like phosphoesterase family
  misc_feature (43)..(342): Homolog of NCBI NO: 39918795 NR Description: putative acid phosphatase [Lupinus luteus]
  misc_feature (26)..(355): Homolog of NCBI NO: 37530584 NR Description: putative purple acid phosphatase
ATPLLTNRTAAVPVCLRPSTMARSSMAAVLAVLAVAALRCAPAAAELPLVEHPAKNDGSLSLLVIGDWGRNGTYNQSRVADQMGKVGERLDIDFVVSTGDNFYEDGLTGVHDQQFEESFTNIYTAQSLQKPWYLVLGNHDYRGNALAQLDPVMRKLDERFVCMRSFIVNAEIVEFFFIDTTPFQLKYWTHPKDSHYDWRGVAPRENYIANLLKDLDEAMKKSTAKWKIAIGHHTIRSVSDHGDTKELLQLLLPVLKVNGIDFYINGHDHCLEHISSRDSPIQYFTSGGGSKAWRGVYQPNDDKLQFFYDGQGFMSLQLNQDQADFIFYDVSGKVLYKWSSRKTNYFQPSIYVTAE

SEQ ID NO: 68155 - protein, 335 aa, Triticum aestivum
  peptide (1)..(335): Ceres Seq. ID no. 15221713
  misc_feature (40)..(251): Pfam Name: Calcineurin-like phosphoesterase Pfam Description: Calcineurin-like phosphoesterase
  misc_feature (23)..(331): Homolog of NCBI NO: 30911094 NR Description: putative purple acid phosphatase [Arabidopsis
  misc_feature (23)..(331): Homolog of NCBI NO: 30683951 NR Description: calcineurin-like phosphoesterase family
  misc_feature (23)..(322): Homolog of NCBI NO: 39918795 NR Description: putative acid phosphatase [Lupinus luteus]
  misc_feature (6)..(335): Homolog of NCBI NO: 37530584 NR Description: putative purple acid phosphatase
MARSSMAAVLAVLAVAALRCAPAAAELPLVEHPAKNDGSLSLLVIGDWGRNGTYNQSRVADQMGKVGERLDIDFVVSTGDNFYEDGLTGVHDQQFEESFTNIYTAQSLQKPWYLVLGNHDYRGNALAQLDPVMRKLDERFVCMRSFIVNAEIVEFFFIDTTPFQLKYWTHPKDSHYDWRGVAPRENYIANLLKDLDEAMKKSTAKWKIAIGHHTIRSVSDHGDTKELLQLLLPVLKVNGIDFYINGHDHCLEHISSRDSPIQYFTSGGGSKAWRGVYQPNDDKLQFFYDGQGFMSLQLNQDQADFIFYDVSGKVLYKWSSRKTNYFQPSIYVTAE

SEQ ID NO: 68156 - protein, 330 aa, Triticum aestivum
  peptide (1)..(330): Ceres Seq. ID no. 15221714
  misc_feature (35)..(246): Pfam Name: Calcineurin-like phosphoesterase Pfam Description: Calcineurin-like phosphoesterase
  misc_feature (18)..(326): Homolog of NCBI NO: 30911094 NR Description: putative purple acid phosphatase [Arabidopsis
  misc_feature (18)..(326): Homolog of NCBI NO: 30683951 NR Description: calcineurin-like phosphoesterase family
  misc_feature (18)..(317): Homolog of NCBI NO: 39918795 NR Description: putative acid phosphatase [Lupinus luteus]
  misc_feature (1)..(330): Homolog of NCBI NO: 37530584 NR Description: putative purple acid phosphatase
MAAVLAVLAVAALRCAPAAAELPLVEHPAKNDGSLSLLVIGDWGRNGTYNQSRVADQMGKVGERLDIDFVVSTGDNFYEDGLTGVHDQQFEESFTNIYTAQSLQKPWYLVLGNHDYRGNALAQLDPVMRKLDERFVCMRSFIVNAEIVEFFFIDTTPFQLKYWTHPKDSHYDWRGVAPRENYIANLLKDLDEAMKKSTAKWKIAIGHHTIRSVSDHGDTKELLQLLLPVLKVNGIDFYINGHDHCLEHISSRDSPIQYFTSGGGSKAWRGVYQPNDDKLQFFYDGQGFMSLQLNQDQADFIFYDVSGKVLYKWSSRKTNYFQPSIYVTAE

SEQ ID NO: 68157 - DNA, 1300 bp, Triticum aestivum
  misc_feature (1)..(1300): Ceres Seq. ID no. 13595945
aaaagggaagcaggcatattctattgctgggagtagaacttgggcggcatggatcagcttgacgagcaatcgttcctggacgagctcatgtcgctgcgccgggaggaggcgccgtcgccggctccgtggcaggcgtatccgggcagcggcatgatgacgacgagcgacctcctcttctacggcggcgagggcaccaccgaggcgagcagcggcatggactttgccgggccgtttcagcagcccatggcgccaccgccggccacatctccgcaccggccgcacgagaagttcaacttcgactgcctcagcgaagtatgcaacccttacggcagctgcgtcggcggcgtacctaagcctggggtcgtccacgcggctggccaggcgtatgccctccaggatgccatggcgcagaacggcacgagtggcggcaagctgcatcacggtggtggcaggtcgtcgtcgtccccggcgccgttcgtgttcgcaggtgtcgccggggagagctcggagatgaccaggggcgccttctccggcgcccacgctagaagcaagctcaacggtggcactacgtccaagaacctcatggcggaaaggcggcgccggaagcgtctcaacgaccgcctctccatgctccgctccatcgtgcccaagattaccaagatggataggacctcgatcctcggggacaccatagactacgtgaatgagctaaccgagcggatccaaaccctcgaggaggagatcggcgccacgccggaggatctgaacctgctgaacaccacgaagaatttctccagcggtagcagtgaggagatgccgatgaggaattccaccaagtttgtcatcgagaagcagggcgacggtggaacgaggatcgacatctgctgcgccacaagccccggcgtgctgatctcgacggtgagcgcgctggaggtgttggggctggagatcgaacagtgcgtcgtcagctgcttcggcgacttcgccatgcaggcatcctgctcacaagaggaagggaggagccgtgtgacaagaaccgacgagatcaagcaggcattgttcacgagtgcaggctatggaggaaggtgtctgtagtagtagttgtaattttgtaatattcgtctgtgagttctctgttgaatagtagtggttatgtaaaaaaaattgaatagtagtactatctaaagttcagctgtttgtgaccagattgtaatagttgggtgtgtgtccgtgagtataatgcatgcatgtatgtatcattgtatggagtggagtattgggatttggccgacatgaaaag

SEQ ID NO: 68158 - protein, 348 aa, Triticum aestivum
  peptide (1)..(348): Ceres Seq. ID no. 13595946
  misc_feature (173)..(222): Pfam Name: Helix-loop-helix DNA-binding domain Pfam Description: Helix-loop-helix DNA-binding domain
  misc_feature (37)..(236): Homolog of NCBI NO: 34907076 NR Description: OSJNBa0093F16.27 [Oryza sativa (japonica
  misc_feature (172)..(345): Homolog of NCBI NO: 15222101 NR Description: bHLH protein [Arabidopsis thaliana]
  misc_feature (172)..(345): Homolog of NCBI NO: 25513489 NR Description: F13K23.12 protein - Arabidopsis thaliana
  misc_feature (151)..(345): Homolog of NCBI NO: 22331357 NR Description: bHLH protein family [Arabidopsis thaliana]
  misc_feature (158)..(348): Homolog of NCBI NO: 20127062 NR Description: putative bHLH transcription factor [Arabidopsis
  misc_feature (158)..(348): Homolog of NCBI NO: 15238199 NR Description: bHLH protein [Arabidopsis thaliana]
  misc_feature (114)..(348): Homolog of NCBI NO: 18424973 NR Description: bHLH protein [Arabidopsis thaliana]
  misc_feature (114)..(348): Homolog of NCBI NO: 21537346 NR Description: unknown [Arabidopsis thaliana]
  misc_feature (27)..(329): Homolog of NCBI NO: 37536566 NR Description: hypothetical protein [Oryza sativa (japonica
  misc_feature (3)..(346): Homolog of NCBI NO: 22758263 NR Description: Putative bHLH transcription protein
MDQLDEQSFLDELMSLRREEAPSPAPWQAYPGSGMMTTSDLLFYGGEGTTEASSGMDFAGPFQQPMAPPPATSPHRPHEKFNFDCLSEVCNPYGSCVGGVPKPGVVHAAGQAYALQDAMAQNGTSGGKLHHGGGRSSSSPAPFVFAGVAGESSEMTRGAFSGAHARSKLNGGTTSKNLMAERRRRKRLNDRLSMLRSIVPKITKMDRTSILGDTIDYVNELTERIQTLEEEIGATPEDLNLLNTTKNFSSGSSEEMPMRNSTKFVIEKQGDGGTRIDICCATSPGVLISTVSALEVLGLEIEQCVVSCFGDFAMQASCSQEEGRSRVTRTDEIKQALFTSAGYGGRCL

SEQ ID NO: 68159 - protein, 335 aa, Triticum aestivum
  peptide (1)..(335): Ceres Seq. ID no. 13595947
  misc_feature (160)..(209): Pfam Name: Helix-loop-helix DNA-binding domain Pfam Description: Helix-loop-helix DNA-binding domain
  misc_feature (24)..(223): Homolog of NCBI NO: 34907076 NR Description: OSJNBa0093F16.27 [Oryza sativa (japonica
  misc_feature (159)..(332): Homolog of NCBI NO: 15222101 NR Description: bHLH protein [Arabidopsis thaliana]
  misc_feature (159)..(332): Homolog of NCBI NO: 25513489 NR Description: F13K23.12 protein - Arabidopsis thaliana
  misc_feature (138)..(332): Homolog of NCBI NO: 22331357 NR Description: bHLH protein family [Arabidopsis thaliana]
  misc_feature (145)..(335): Homolog of NCBI NO: 20127062 NR Description: putative bHLH transcription factor [Arabidopsis
  misc_feature (145)..(335): Homolog of NCBI NO: 15238199 NR Description: bHLH protein [Arabidopsis thaliana]
  misc_feature (101)..(335): Homolog of NCBI NO: 18424973 NR Description: bHLH protein [Arabidopsis thaliana]
  misc_feature (101)..(335): Homolog of NCBI NO: 21537346 NR Description: unknown [Arabidopsis thaliana]
  misc_feature (14)..(316): Homolog of NCBI NO: 37536566 NR Description: hypothetical protein [Oryza sativa (japonica
  misc_feature (1)..(333): Homolog of NCBI NO: 22758263 NR Description: Putative bHLH transcription protein
MSLRREEAPSPAPWQAYPGSGMMTTSDLLFYGGEGTTEASSGMDFAGPFQQPMAPPPATSPHRPHEKFNFDCLSEVCNPYGSCVGGVPKPGVVHAAGQAYALQDAMAQNGTSGGKLHHGGGRSSSSPAPFVFAGVAGESSEMTRGAFSGAHARSKLNGGTTSKNLMAERRRRKRLNDRLSMLRSIVPKITKMDRTSILGDTIDYVNELTERIQTLEEEIGATPEDLNLLNTTKNFSSGSSEEMPMRNSTKFVIEKQGDGGTRIDICCATSPGVLISTVSALEVLGLEIEQCVVSCFGDFAMQASCSQEEGRSRVTRTDEIKQALFTSAGYGGRCL

SEQ ID NO: 68160 - protein, 314 aa, Triticum aestivum
  peptide (1)..(314): Ceres Seq. ID no. 13595948
  misc_feature (139)..(188): Pfam Name: Helix-loop-helix DNA-binding domain Pfam Description: Helix-loop-helix DNA-binding domain
  misc_feature (3)..(202): Homolog of NCBI NO: 34907076 NR Description: OSJNBa0093F16.27 [Oryza sativa (japonica
  misc_feature (138)..(311): Homolog of NCBI NO: 15222101 NR Description: bHLH protein [Arabidopsis thaliana]
  misc_feature (138)..(311): Homolog of NCBI NO: 25513489 NR Description: F13K23.12 protein - Arabidopsis thaliana
  misc_feature (117)..(311): Homolog of NCBI NO: 22331357 NR Description: bHLH protein family [Arabidopsis thaliana]
  misc_feature (124)..(314): Homolog of NCBI NO: 20127062 NR Description: putative bHLH transcription factor [Arabidopsis
  misc_feature (124)..(314): Homolog of NCBI NO: 15238199 NR Description: bHLH protein [Arabidopsis thaliana]
  misc_feature (80)..(314): Homolog of NCBI NO: 18424973 NR Description: bHLH protein [Arabidopsis thaliana]
  misc_feature (80)..(314): Homolog of NCBI NO: 21537346 NR Description: unknown [Arabidopsis thaliana]
  misc_feature (1)..(295): Homolog of NCBI NO: 37536566 NR Description: hypothetical protein [Oryza sativa (japonica
  misc_feature (1)..(312): Homolog of NCBI NO: 22758263 NR Description: Putative bHLH transcription protein
MMTTSDLLFYGGEGTTEASSGMDFAGPFQQPMAPPPATSPHRPHEKFNFDCLSEVCNPYGSCVGGVPKPGVVHAAGQAYALQDAMAQNGTSGGKLHHGGGRSSSSPAPFVFAGVAGESSEMTRGAFSGAHARSKLNGGTTSKNLMAERRRRKRLNDRLSMLRSIVPKITKMDRTSILGDTIDYVNELTERIQTLEEEIGATPEDLNLLNTTKNFSSGSSEEMPMRNSTKFVIEKQGDGGTRIDICCATSPGVLISTVSALEVLGLEIEQCVVSCFGDFAMQASCSQEEGRSRVTRTDEIKQALFTSAGYGGRCL

SEQ ID NO: 68161 - DNA, 1383 bp, Triticum aestivum
  misc_feature (1)..(1383): Ceres Seq. ID no. 13595998
aaaaatccattcaaagcgctctgctctctgccccgcccgccggctcatctccgcgcgcagaggcagcgtcgcagcgagcacacaccaccttcgatccctcctcctcctcctcctcctcctgcttcttctctcgcgtacacggctgcgcgtgtgacgatggcgaggacgtcgtcgtcgccgacggcgacgaggctgccgctgctgcttgtgctgctgtcgtcgctggccttgcaggcggcggcgcagaagtacaatgcggtgtacagcttcggcgactcgatcacggacacggggaacctgtgcaccaacgggcggccctcggcgatcaccttcacgcagccgccctacggggagacctacttcgggagccccacctgccgctgctccgacggccgcgtcatcgtcgacttcctcagcaccaagtacggcctccccttcctgcccccctccaagtccacctycgccgacttcaaaaagggcgccaacatggscatcaccggcgccaccgscatggacgcccccttcttycgytcctcggctcgnnntctccgacaagatctggaacaacgggcccatcagcttccagctccannnnnnggttccagaccatcacctcctccgtctgcggcagcagctgcaagagctacctggcgaactcgctcttcatcttcggggagttcggggggaacgactacaacgcgatgctgttcggcaactacaacacggaccaggcgagcacgtacgcgccgcagatcgtggacaccatcggcgccggcgtggagaagctggtcgcgatgggggccgtggacgtggtggtgccgggggtgctccccatcggctgcttccccatctacctcaccatctacggcacctccagcgccgccgactacgacgccctcggctgcctcaagaagttcaacgacctctccacgtaccacaacagcctgctgcaggccaaggtgtccgccctccaggccaagtacaagtcggcgcgcatcatgtacgccgacttctacgccggggtctacgacatggtccggagccccagcaaatacgggttcagctcggtgtttgaggcgtgctgcgggtcggggggaggcaagtacaactacgccaacagcgcgcggtgcggcatgtccggcgcctccgcctgcgccagcccggcgtcccacctcagctgggacggcatccacctcaccgaggccgcctacaagcagatcaccgacggctggctcaacggcgccttctgccacccaggcatcacccactagccagtcactcccactggtcgatcaatcagcttatgcatcgtcgtccatggatccatcattaatcaatcaatcgattatattattattattattattattaaaaaaaaaaaaa

SEQ ID NO: 68162 - protein, 461 aa, Triticum aestivum
  peptide (1)..(461): Ceres Seq. ID no. 15221730
  misc_feature (87)..(178): Pfam Name: GDSL-like Lipase/Acylhydrolase Pfam Description: GDSL-like Lipase/Acylhydrolase
  misc_feature (95)..(176): Homolog of NCBI NO: 10764854 NR Description: F1K23.13 [Arabidopsis thaliana]
  misc_feature (68)..(175): Homolog of NCBI NO: 10764854 NR Description: F1K23.13 [Arabidopsis thaliana]
  misc_feature (73)..(175): Homolog of NCBI NO: 10764854 NR Description: F1K23.13 [Arabidopsis thaliana]
  misc_feature (68)..(175): Homolog of NCBI NO: 10764854 NR Description: F1K23.13 [Arabidopsis thaliana]
  misc_feature (67)..(177): Homolog of NCBI NO: 10764858 NR Description: F1K23.17 [Arabidopsis thaliana]
  misc_feature (46)..(175): Homolog of NCBI NO: 10764858 NR Description: F1K23.17 [Arabidopsis thaliana]
  misc_feature (53)..(175): Homolog of NCBI NO: 15218728 NR Description: lipase, putative [Arabidopsis thaliana]
  misc_feature (58)..(176): Homolog of NCBI NO: 34903996 NR Description: unnamed protein product [Oryza sativa (japonica
  misc_feature (68)..(177): Homolog of NCBI NO: 34903958 NR Description: OSJNBa0038J17.24 [Oryza sativa (japonica
  misc_feature (68)..(178): Homolog of NCBI NO: 34903956 NR Description: OSJNBa0038J17.23 [Oryza sativa (japonica
  misc_feature (154)..(154): Xaa is any aa, unknown or other
  misc_feature (164)..(164): Xaa is any aa, unknown or other
  misc_feature (170)..(170): Xaa is any aa, unknown or other
  misc_feature (176)..(176): Xaa is any aa, unknown or other
  misc_feature (177)..(177): Xaa is any aa, unknown or other
  misc_feature (181)..(181): Xaa is any aa, unknown or other
  misc_feature (182)..(182): Xaa is any aa, unknown or other
  misc_feature (198)..(198): Xaa is any aa, unknown or other
  misc_feature (199)..(199): Xaa is any aa, unknown or other
KNPFKALCSLPRPPAHLRAQRQRRSEHTPPSIPPPPPPPPASSLAYTAARVTMARTSSSPTATRLPLLLVLLSSLALQAAAQKYNAVYSFGDSITDTGNLCTNGRPSAITFTQPPYGETYFGSPTCRCSDGRVIVDFLSTKYGLPFLPPSKSTXADFKKGANMXITGATXMDAPFXXSSAXXLRQDLEQRAHQLPAPXXGSRPSPPPSAAAAARATWRTRSSSSGSSGGTTTTRCCSATTTRTRRARTRRRSWTPSAPAWRSWSRWGPWTWWCRGCSPSAASPSTSPSTAPPAPPTTTPSAASRSSTTSPRTTTACCRPRCPPSRPSTSRRASCTPTSTPGSTTWSGAPANTGSARCLRRAAGRGEASTTTPTARGAACPAPPPAPARRPTSAGTASTSPRPPTSRSPTAGSTAPSATQASPTSQSLPLVDQSAYASSSMDPSLINQSIILLLLLLLKKKK

SEQ ID NO: 68163 - protein, 422 aa, Triticum aestivum
  peptide (1)..(422): Ceres Seq. ID no. 15221731
  misc_feature (200)..(410): Pfam Name: GDSL-like Lipase/Acylhydrolase Pfam Description: GDSL-like Lipase/Acylhydrolase
  misc_feature (260)..(418): Homolog of NCBI NO: 10764854 NR Description: F1K23.13 [Arabidopsis thaliana]
  misc_feature (185)..(412): Homolog of NCBI NO: 10764854 NR Description: F1K23.13 [Arabidopsis thaliana]
  misc_feature (186)..(418): Homolog of NCBI NO: 10764854 NR Description: F1K23.13 [Arabidopsis thaliana]
  misc_feature (186)..(422): Homolog of NCBI NO: 10764854 NR Description: F1K23.13 [Arabidopsis thaliana]
  misc_feature (189)..(418): Homolog of NCBI NO: 10764858 NR Description: F1K23.17 [Arabidopsis thaliana]
  misc_feature (186)..(418): Homolog of NCBI NO: 10764858 NR Description: F1K23.17 [Arabidopsis thaliana]
  misc_feature (186)..(418): Homolog of NCBI NO: 15218728 NR Description: lipase, putative [Arabidopsis thaliana]
  misc_feature (192)..(420): Homolog of NCBI NO: 34903996 NR Description: unnamed protein product [Oryza sativa (japonica
  misc_feature (200)..(420): Homolog of NCBI NO: 34903958 NR Description: OSJNBa0038J17.24 [Oryza sativa (japonica
  misc_feature (200)..(422): Homolog of NCBI NO: 34903956 NR Description: OSJNBa0038J17.23 [Oryza sativa (japonica
  misc_feature (153)..(153): Xaa is any aa, unknown or other
  misc_feature (163)..(163): Xaa is any aa, unknown or other
  misc_feature (169)..(169): Xaa is any aa, unknown or other
  misc_feature (176)..(176): Xaa is any aa, unknown or other
  misc_feature (177)..(177): Xaa is any aa, unknown or other
  misc_feature (181)..(181): Xaa is any aa, unknown or other
  misc_feature (197)..(197): Xaa is any aa, unknown or other
  misc_feature (198)..(198): Xaa is any aa, unknown or other
  misc_feature (199)..(199): Xaa is any aa, unknown or other
KSIQSALLSAPPAGSSPRAEAASQRAHTTFDPSSSSSSSCFFSRVHGCACDDGEDVVVADGDEAAAAACAAVVAGLAGGGAEVQCGVQLRRLDHGHGEPVHQRAALGDHLHAAALRGDLLREPHLPLLRRPRHRRLPQHQVRPPLPAPLQVHXRRLQKGRQHXHHRRHXHGRPLLXXLGSXSPTRSGTTGPSASSSXXXFQTITSSVCGSSCKSYLANSLFIFGEFGGNDYNAMLFGNYNTDQASTYAPQIVDTIGAGVEKLVAMGAVDVVVPGVLPIGCFPIYLTIYGTSSAADYDALGCLKKFNDLSTYHNSLLQAKVSALQAKYKSARIMYADFYAGVYDMVRSPSKYGFSSVFEACCGSGGGKYNYANSARCGMSGASACASPASHLSWDGIHLTEAAYKQITDGWLNGAFCHPGITH

SEQ ID NO: 68164 - protein, 409 aa, Triticum aestivum
  peptide (1)..(409): Ceres Seq. ID no. 15221732
  misc_feature (35)..(126): Pfam Name: GDSL-like Lipase/Acylhydrolase Pfam Description: GDSL-like Lipase/Acylhydrolase
  misc_feature (43)..(124): Homolog of NCBI NO: 10764854 NR Description: F1K23.13 [Arabidopsis thaliana]
  misc_feature (16)..(123): Homolog of NCBI NO: 10764854 NR Description: F1K23.13 [Arabidopsis thaliana]
  misc_feature (21)..(123): Homolog of NCBI NO: 10764854 NR Description: F1K23.13 [Arabidopsis thaliana]
  misc_feature (16)..(123): Homolog of NCBI NO: 10764854 NR Description: F1K23.13 [Arabidopsis thaliana]
  misc_feature (15)..(125): Homolog of NCBI NO: 10764858 NR Description: F1K23.17 [Arabidopsis thaliana]
  misc_feature (1)..(123): Homolog of NCBI NO: 10764858 NR Description: F1K23.17 [Arabidopsis thaliana]
  misc_feature (1)..(123): Homolog of NCBI NO: 15218728 NR Description: lipase, putative [Arabidopsis thaliana]
  misc_feature (6)..(124): Homolog of NCBI NO: 34903996 NR Description: unnamed protein product [Oryza sativa (japonica
  misc_feature (16)..(125): Homolog of NCBI NO: 34903958 NR Description: OSJNBa0038J17.24 [Oryza sativa (japonica
  misc_feature (16)..(126): Homolog of NCBI NO: 34903956 NR Description: OSJNBa0038J17.23 [Oryza sativa (japonica
  misc_feature (102)..(102): Xaa is any aa, unknown or other
  misc_feature (112)..(112): Xaa is any aa, unknown or other
  misc_feature (118)..(118): Xaa is any aa, unknown or other
  misc_feature (124)..(124): Xaa is any aa, unknown or other
  misc_feature (125)..(125): Xaa is any aa, unknown or other
  misc_feature (129)..(129): Xaa is any aa, unknown or other
  misc_feature (130)..(130): Xaa is any aa, unknown or other
  misc_feature (146)..(146): Xaa is any aa, unknown or other
  misc_feature (147)..(147): Xaa is any aa, unknown or other
MARTSSSPTATRLPLLLVLLSSLALQAAAQKYNAVYSFGDSITDTGNLCTNGRPSAITFTQPPYGETYFGSPTCRCSDGRVIVDFLSTKYGLPFLPPSKSTXADFKKGANMXITGATXMDAPFXXSSAXXLRQDLEQRAHQLPAPXXGSRPSPPPSAAAAARATWRTRSSSSGSSGGTTTTRCCSATTTRTRRARTRRRSWTPSAPAWRSWSRWGPWTWWCRGCSPSAASPSTSPSTAPPAPPTTTPSAASRSSTTSPRTTTACCRPRCPPSRPSTSRRASCTPTSTPGSTTWSGAPANTGSARCLRRAAGRGEASTTTPTARGAACPAPPPAPARRPTSAGTASTSPRPPTSRSPTAGSTAPSATQASPTSQSLPLVDQSAYASSSMDPSLINQSIILLLLLLLKKKK

SEQ ID NO: 68165 - DNA, 1839 bp, Triticum aestivum
  misc_feature (1)..(1839): Ceres Seq. ID no. 15170670
cctccttcctcctccccctcgcttcttcacggaatccaaaccccaaacaccagccatggcgatggcgtcctttcgcccccttcctctcgcgctcctgctcgccgcgtgcctctccgcgctcgtgctggccgtggcgcacgcgcggaccccacggctggagcccaccatccggctgccgtcgcagcgcgccggcgggcaggaggacgatggctccatcgggaccaggtgggccgtcctcatcgccggctccaacggctactacaactaccgccaccaggcggatatctgccacgcctaccagatcatgaagaagggtggtctcaaggatgagaacatcatcgtattcatgtacgatgacattgcgcacaacccggagaacccgaggccgggcgtcatcatcaaccacccccagggtggagatgtctatgctggggtccctaaggactacactggaaaggaggttaatgtcaagaacttctttgctgtcctgctcggtaataaaaccgcggtgagtggtgggaacggcaaagttgtggacagtggccctaatgatcacatttttgtgttttacagtgaccatgggggtcctggggtccttgggatgcctacctatccatacctttacggtgacgatcttgtagatgtcctgaagaaaaagcacgctgctggaacctacaaaagcctggtattttaccttgaagcctgcgaatctgggagcatctttgagggacttctgccaaatgacatcggtgtctatgcgaccaccgcttcgaatgcagaggaaagcagttggggaacgtattgccccggcgagtacccgagccctccgccggaatatgacacttgcttgggcgacctgtacagcatttcttggatggaagacagtgatgtccacaacctgagaactgaatctctcaagcagcagtataacctggtcaagaagagaacggcagctcaggactcatacagctatggttcccatgtgatgcaatacggttctttggacctgaatgctgaacatttgttctcgtacattgggtcaaaccctgctaacgagaacactacatttgttgaagataacgcactgccatcattctcaagagctgttaatcagagggatgctgatcttgtttatttctggcagaagtaccggaaattggccgagagctcccctgagaaaaacgatgctcggaagcaattgcttgaaatgatgggtcatagatctcatattgacaacagcatcgagctgattggaaaccttctgtttggttctgcgggtggtccgatggttctaaaggctgttcgcccagctggtgagcctcttgttgatgactggagttgtctcaagtctacggtgcgcacttttgaatcacaatgtggctcactggcgcagtatggaatgaagcacatgcggccctttgcaaacatctgcaatgccggcattgttcctgaagcgacggcaaaggttgctgctcaggcatgcacgagcatcccaaccaacccctggagtgccacacacaagggttttagtgcttaaaccagaggtgaagcaacttggtccctatctcagctattgtaccatataccaaagtccccttcctattcacacagggttagtagtgcttgaacggacgaaccttagatgaataaataagaattatggcattacttcagctattccaccacaccaaattaccttggttgtgtccaacttatagtgtacatatacccgtagtagaaaggtgatttcctgtgattactgtacatactcgtgatagtttgtgatcagatgtgtagctcgcaattccatatatgaagaatgcaatcgctgctatttgc

SEQ ID NO: 68166 - protein, 511 aa, Triticum aestivum
  peptide (1)..(511): Ceres Seq. ID no. 15170671
  misc_feature (27)..(392): Pfam Name: Peptidase C13 family Pfam Description: Peptidase C13 family
  misc_feature (33)..(382): Homolog of NCBI NO: 38567871 NR Description: OSJNBa0091D06.13 [Oryza sativa (japonica
  misc_feature (19)..(511): Homolog of NCBI NO: 15233996 NR Description: gamma-VPE (vacuolar processing enzyme)
  misc_feature (65)..(511): Homolog of NCBI NO: 27544008 NR Description: vacuolar processing enzyme-1b [Nicotiana tabacum]
  misc_feature (67)..(511): Homolog of NCBI NO: 1351408 NR Description: Vacuolar processing enzyme precursor (VPE)
  misc_feature (27)..(511): Homolog of NCBI NO: 6634703 NR Description: legumain-like protease [Zea mays]
  misc_feature (27)..(511): Homolog of NCBI NO: 11558852 NR Description: putative legumain [Zea mays]
  misc_feature (28)..(511): Homolog of NCBI NO: 34914086 NR Description: asparaginyl endopeptidase
  misc_feature (27)..(511): Homolog of NCBI NO: 6634705 NR Description: legumain-like protease [Zea mays]
  misc_feature (27)..(511): Homolog of NCBI NO: 11558854 NR Description: putative legumain [Zea mays]
  misc_feature (27)..(511): Homolog of NCBI NO: 4154281 NR Description: C13 endopeptidase NP1 precursor [Zea mays]
LLPPPPRFFTESKPQTPAMAMASFRPLPLALLLAACLSALVLAVAHARTPRLEPTIRLPSQRAGGQEDDGSIGTRWAVLIAGSNGYYNYRHQADICHAYQIMKKGGLKDENIIVFMYDDIAHNPENPRPGVIINHPQGGDVYAGVPKDYTGKEVNVKNFFAVLLGNKTAVSGGNGKVVDSGPNDHIFVFYSDHGGPGVLGMPTYPYLYGDDLVDVLKKKHAAGTYKSLVFYLEACESGSIFEGLLPNDIGVYATTASNAEESSWGTYCPGEYPSPPPEYDTCLGDLYSISWMEDSDVHNLRTESLKQQYNLVKKRTAAQDSYSYGSHVMQYGSLDLNAEHLFSYIGSNPANENTTFVEDNALPSFSRAVNQRDADLVYFWQKYRKLAESSPEKNDARKQLLEMMGHRSHIDNSIELIGNLLFGSAGGPMVLKAVRPAGEPLVDDWSCLKSTVRTFESQCGSLAQYGMKHMRPFANICNAGIVPEATAKVAAQACTSIPTNPWSATHKGFSA

SEQ ID NO: 68167 - protein, 493 aa, Triticum aestivum
  peptide (1)..(493): Ceres Seq. ID no. 15170672
  misc_feature (9)..(374): Pfam Name: Peptidase C13 family Pfam Description: Peptidase C13 family
  misc_feature (15)..(364): Homolog of NCBI NO: 38567871 NR Description: OSJNBa0091D06.13 [Oryza sativa (japonica
  misc_feature (1)..(493): Homolog of NCBI NO: 15233996 NR Description: gamma-VPE (vacuolar processing enzyme)
  misc_feature (47)..(493): Homolog of NCBI NO: 27544008 NR Description: vacuolar processing enzyme-1b [Nicotiana tabacum]
  misc_feature (49)..(493): Homolog of NCBI NO: 1351408 NR Description: Vacuolar processing enzyme precursor (VPE)
  misc_feature (9)..(493): Homolog of NCBI NO: 6634703 NR Description: legumain-like protease [Zea mays]
  misc_feature (9)..(493): Homolog of NCBI NO: 11558852 NR Description: putative legumain [Zea mays]
  misc_feature (10)..(493): Homolog of NCBI NO: 34914086 NR Description: asparaginyl endopeptidase
  misc_feature (9)..(493): Homolog of NCBI NO: 6634705 NR Description: legumain-like protease [Zea mays]
  misc_feature (9)..(493): Homolog of NCBI NO: 11558854 NR Description: putative legumain [Zea mays]
  misc_feature (9)..(493): Homolog of NCBI NO: 4154281 NR Description: C13 endopeptidase NP1 precursor [Zea mays]
MAMASFRPLPLALLLAACLSALVLAVAHARTPRLEPTIRLPSQRAGGQEDDGSIGTRWAVLIAGSNGYYNYRHQADICHAYQIMKKGGLKDENIIVFMYDDIAHNPENPRPGVIINHPQGGDVYAGVPKDYTGKEVNVKNFFAVLLGNKTAVSGGNGKVVDSGPNDHIFVFYSDHGGPGVLGMPTYPYLYGDDLVDVLKKKHAAGTYKSLVFYLEACESGSIFEGLLPNDIGVYATTASNAEESSWGTYCPGEYPSPPPEYDTCLGDLYSISWMEDSDVHNLRTESLKQQYNLVKKRTAAQDSYSYGSHVMQYGSLDLNAEHLFSYIGSNPANENTTFVEDNALPSFSRAVNQRDADLVYFWQKYRKLAESSPEKNDARKQLLEMMGHRSHIDNSIELIGNLLFGSAGGPMVLKAVRPAGEPLVDDWSCLKSTVRTFESQCGSLAQYGMKHMRPFANICNAGIVPEATAKVAAQACTSIPTNPWSATHKGFSA

SEQ ID NO: 68168 - protein, 491 aa, Triticum aestivum
  peptide (1)..(491): Ceres Seq. ID no. 15170673
  misc_feature (7)..(372): Pfam Name: Peptidase C13 family Pfam Description: Peptidase C13 family
  misc_feature (13)..(362): Homolog of NCBI NO: 38567871 NR Description: OSJNBa0091D06.13 [Oryza sativa (japonica
  misc_feature (1)..(491): Homolog of NCBI NO: 15233996 NR Description: gamma-VPE (vacuolar processing enzyme)
  misc_feature (45)..(491): Homolog of NCBI NO: 27544008 NR Description: vacuolar processing enzyme-1b [Nicotiana tabacum]
  misc_feature (47)..(491): Homolog of NCBI NO: 1351408 NR Description: Vacuolar processing enzyme precursor (VPE)
  misc_feature (7)..(491): Homolog of NCBI NO: 6634703 NR Description: legumain-like protease [Zea mays]
  misc_feature (7)..(491): Homolog of NCBI NO: 11558852 NR Description: putative legumain [Zea mays]
  misc_feature (8)..(491): Homolog of NCBI NO: 34914086 NR Description: asparaginyl endopeptidase
  misc_feature (7)..(491): Homolog of NCBI NO: 6634705 NR Description: legumain-like protease [Zea mays]
  misc_feature (7)..(491): Homolog of NCBI NO: 11558854 NR Description: putative legumain [Zea mays]
  misc_feature (7)..(491): Homolog of NCBI NO: 4154281 NR Description: C13 endopeptidase NP1 precursor [Zea mays]
MASFRPLPLALLLAACLSALVLAVAHARTPRLEPTIRLPSQRAGGQEDDGSIGTRWAVLIAGSNGYYNYRHQADICHAYQIMKKGGLKDENIIVFMYDDIAHNPENPRPGVIINHPQGGDVYAGVPKDYTGKEVNVKNFFAVLLGNKTAVSGGNGKVVDSGPNDHIFVFYSDHGGPGVLGMPTYPYLYGDDLVDVLKKKHAAGTYKSLVFYLEACESGSIFEGLLPNDIGVYATTASNAEESSWGTYCPGEYPSPPPEYDTCLGDLYSISWMEDSDVHNLRTESLKQQYNLVKKRTAAQDSYSYGSHVMQYGSLDLNAEHLFSYIGSNPANENTTFVEDNALPSFSRAVNQRDADLVYFWQKYRKLAESSPEKNDARKQLLEMMGHRSHIDNSIELIGNLLFGSAGGPMVLKAVRPAGEPLVDDWSCLKSTVRTFESQCGSLAQYGMKHMRPFANICNAGIVPEATAKVAAQACTSIPTNPWSATHKGFSA

SEQ ID NO: 68169 - DNA, 551 bp, Triticum aestivum
  misc_feature (1)..(551): Ceres Seq. ID no. 13590591
agaaaagaataccgcctccctaaaaaaactaggaaaaacagtctcctcaccggtccgtcgtcctcgccgtcgccctacccatctcgccggcgccgtcggggacccgcggggagcatggatgccatggaggaggatacgcctccagcgctaccgccaccgccaccgcctacgacgggcgcgaagcagccgccgtacaaggatcctgacgacgggaggcagcggttcctactggagctggagttcatccagtgcctcgccaaccccatctacatcaactatctagcgcagaatcggtactttgaggatgaggcgttcatcgggtatctcaagtacctcaagtattggcagcgtccggagtacatcaaatacataatgtatccgcactgccttttctttcttgagcttctccaaaatgcaaatttccgaaacgcaatggcacatccagcaaacaaggaagttgctcataggcagcaatatttcttctggaaaaactacaggaacaatagactgaagcacattctgccgcgttcttcttccgaaccaacttctgc

SEQ ID NO: 68170 - protein, 183 aa, Triticum aestivum
  peptide (1)..(183): Ceres Seq. ID no. 13590592
  misc_feature (66)..(162): Homolog of NCBI NO: 19075359 NR Description: conserved hypothetical protein
  misc_feature (72)..(173): Homolog of NCBI NO: 21355471 NR Description: CG1057-PA [Drosophila melanogaster]
  misc_feature (67)..(171): Homolog of NCBI NO: 7705592 NR Description: CGI-125 protein [Homo sapiens]
  misc_feature (67)..(171): Homolog of NCBI NO: 13385570 NR Description: RIKEN cDNA 3110004H13 [Mus musculus]
  misc_feature (67)..(171): Homolog of NCBI NO: 27673870 NR Description: similar to CGI-125 protein [Homo sapiens] [Rattus
  misc_feature (63)..(182): Homolog of NCBI NO: 34899964 NR Description: P0428D12.23 [Oryza sativa (japonica
  misc_feature (39)..(181): Homolog of NCBI NO: 22326900 NR Description: SOH1 - like protein [Arabidopsis thaliana]
  misc_feature (63)..(182): Homolog of NCBI NO: 34899976 NR Description: P0039H02.5 [Oryza sativa (japonica
  misc_feature (63)..(182): Homolog of NCBI NO: 33146796 NR Description: SOH1-like protein [Oryza sativa (japonica
  misc_feature (64)..(182): Homolog of NCBI NO: 12597881 NR Description: hypothetical protein [Oryza sativa]
RKEYRLPKKTRKNSLLTGPSSSPSPYPSRRRRRGPAGSMDAMEEDTPPALPPPPPPTTGAKQPPYKDPDDGRQRFLLELEFIQCLANPIYINYLAQNRYFEDEAFIGYLKYLKYWQRPEYIKYIMYPHCLFFLELLQNANFRNAMAHPANKEVAHRQQYFFWKNYRNNRLKHILPRSSSEPTS

SEQ ID NO: 68171 - protein, 145 aa, Triticum aestivum
  peptide (1)..(145): Ceres Seq. ID no. 13590593
  misc_feature (28)..(124): Homolog of NCBI NO: 19075359 NR Description: conserved hypothetical protein
  misc_feature (34)..(135): Homolog of NCBI NO: 21355471 NR Description: CG1057-PA [Drosophila melanogaster]
  misc_feature (29)..(133): Homolog of NCBI NO: 7705592 NR Description: CGI-125 protein [Homo sapiens]
  misc_feature (29)..(133): Homolog of NCBI NO: 13385570 NR Description: RIKEN cDNA 3110004H13 [Mus musculus]
  misc_feature (29)..(133): Homolog of NCBI NO: 27673870 NR Description: similar to CGI-125 protein [Homo sapiens] [Rattus
  misc_feature (25)..(144): Homolog of NCBI NO: 34899964 NR Description: P0428D12.23 [Oryza sativa (japonica
  misc_feature (1)..(143): Homolog of NCBI NO: 22326900 NR Description: SOH1 - like protein [Arabidopsis thaliana]
  misc_feature (25)..(144): Homolog of NCBI NO: 34899976 NR Description: P0039H02.5 [Oryza sativa (japonica
  misc_feature (25)..(144): Homolog of NCBI NO: 33146796 NR Description: SOH1-like protein [Oryza sativa (japonica
  misc_feature (26)..(144): Homolog of NCBI NO: 12597881 NR Description: hypothetical protein [Oryza sativa]
MDAMEEDTPPALPPPPPPTTGAKQPPYKDPDDGRQRFLLELEFIQCLANPIYINYLAQNRYFEDEAFIGYLKYLKYWQRPEYIKYIMYPHCLFFLELLQNANFRNAMAHPANKEVAHRQQYFFWKNYRNNRLKHILPRSSSEPTS

SEQ ID NO: 68172 - protein, 142 aa, Triticum aestivum
  peptide (1)..(142): Ceres Seq. ID no. 13590594
  misc_feature (25)..(121): Homolog of NCBI NO: 19075359 NR Description: conserved hypothetical protein
  misc_feature (31)..(132): Homolog of NCBI NO: 21355471 NR Description: CG1057-PA [Drosophila melanogaster]
  misc_feature (26)..(130): Homolog of NCBI NO: 7705592 NR Description: CGI-125 protein [Homo sapiens]
  misc_feature (26)..(130): Homolog of NCBI NO: 13385570 NR Description: RIKEN cDNA 3110004H13 [Mus musculus]
  misc_feature (26)..(130): Homolog of NCBI NO: 27673870 NR Description: similar to CGI-125 protein [Homo sapiens] [Rattus
  misc_feature (22)..(141): Homolog of NCBI NO: 34899964 NR Description: P0428D12.23 [Oryza sativa (japonica
  misc_feature (1)..(140): Homolog of NCBI NO: 22326900 NR Description: SOH1 - like protein [Arabidopsis thaliana]
  misc_feature (22)..(141): Homolog of NCBI NO: 34899976 NR Description: P0039H02.5 [Oryza sativa (japonica
  misc_feature (22)..(141): Homolog of NCBI NO: 33146796 NR Description: SOH1-like protein [Oryza sativa (japonica
  misc_feature (23)..(141): Homolog of NCBI NO: 12597881 NR Description: hypothetical protein [Oryza sativa]
MEEDTPPALPPPPPPTTGAKQPPYKDPDDGRQRFLLELEFIQCLANPIYINYLAQNRYFEDEAFIGYLKYLKYWQRPEYIKYIMYPHCLFFLELLQNANFRNAMAHPANKEVAHRQQYFFWKNYRNNRLKHILPRSSSEPTS

SEQ ID NO: 68173 - DNA, 1497 bp, Triticum aestivum
  misc_feature (1)..(1497): Ceres Seq. ID no. 13595999
acacctgctctcccccttcattaaaaactgcccatttatttatcaattccggcgaccctcctcccaccggcgacgactaggacgaggcaccgccggcaatcatgtgcggcggcgcgatcctcaaggacctcaaggtccccgcgccgacgcggaaggtgacggcggcggtgctgtggcccgagaagaacaagcccaagcgggccgacggcgtggcccggcgcctcgcggggctcggccggcgcggggggctcgggctggacgacggcgacgtggacttcgaggccgacttcgaggagttcgaggccgactccggggactccgacgtggagctcaggcgcgccggggttgctgggaaggacggccacgacgtggtcgtcgagatcaagcccttattcgccgtcaagaggtccctctcccaagatgacttaagcaccatgactactgctggttttgatggtcctgcacaaaggtcagcaaaaaggaagagaaagaacgagttcaggggtatccgccagcgcccctggggtaagtgggctgctgaaatcagagatcctagcaagggtgtccgtgtctggcttggtactttcaacagtgctgaagaagctgcaagagcttatgatgttgaagcacgaaggatccgtggcaagaagrccaaggttaactttccagaggaactaacagttcatcagaagcgccgtgcttgccctgctgctcctaaagttcycaagtcaagcgcagcacaggaacctaccgtcataccagcagtcaacaaccttgccaacccaaatgctttcgtctacccgcctgctgactttgcatcaaagcagccacttgttcagcctgacaacgtgccatatgttcccgcaattaactctgctgcccctgttgaagctcctgttatgaatatgtactctgaccagggaagcaactcctttggctgctctgacttgggctgggagtatgacaccaagactccagatatatcatccattgctcccatttccaccattgctgaaggaacagagtctgcacttctccagagtaacacctacaacccagcagtgattgccgaaggagctgaatctgcgcttgtccagagcaacacctacaactcagtggtgcctcctgttatggagaacaatgctgtcgattttgagccttggatgaggtttcttgttgatgatggcgtggatgagccgatagatagccttctgaattttgatgtgcctcaggatgtcgttggcaacatggacctttggagcttcgatgacatgcccatctgtggcgaaattttctgagggattcaaacccctgtatatcaggacaaagggaataagactatgggagattgggaagcaccctgttgtcacctttggttagtatatgcctatgtgcaagcttagatgcaaaaaagccgcatcttgagttgtagtcgaccctttccctagttgactgtcaatgaaccgttgtcatttatgagtctgatgaaccgttgcc

SEQ ID NO: 68174 - protein, 398 aa, Triticum aestivum
  peptide (1)..(398): Ceres Seq. ID no. 15221733
  misc_feature (130)..(191): Pfam Name: AP2 domain Pfam Description: AP2 domain
  misc_feature (1)..(391): Homolog of NCBI NO: 19880313 NR Description: putative EREBP-type transcription factor [Oryza
  misc_feature (1)..(76): Homolog of NCBI NO: 38343926 NR Description: ethylene transcription factor [Fagus sylvatica]
  misc_feature (45)..(393): Homolog of NCBI NO: 38343926 NR Description: ethylene transcription factor [Fagus sylvatica]
  misc_feature (1)..(76): Homolog of NCBI NO: 18496063 NR Description: ethylene responsive element binding protein
  misc_feature (45)..(393): Homolog of NCBI NO: 18496063 NR Description: ethylene responsive element binding protein
  misc_feature (64)..(321): Homolog of NCBI NO: 30525870 NR Description: ethylene-responsive element binding protein
  misc_feature (327)..(398): Homolog of NCBI NO: 6176534 NR Description: EREBP-like protein [Oryza sativa]
  misc_feature (15)..(321): Homolog of NCBI NO: 6176534 NR Description: EREBP-like protein [Oryza sativa]
  misc_feature (320)..(393): Homolog of NCBI NO: 6689918 NR Description: transcription factor EREBP1 [Oryza sativa]
  misc_feature (1)..(321): Homolog of NCBI NO: 6689918 NR Description: transcription factor EREBP1 [Oryza sativa]
  misc_feature (184)..(184): Xaa is any aa, unknown or other
  misc_feature (208)..(208): Xaa is any aa, unknown or other
MCGGAILKDLKVPAPTRKVTAAVLWPEKNKPKRADGVARRLAGLGRRGGLGLDDGDVDFEADFEEFEADSGDSDVELRRAGVAGKDGHDVVVEIKPLFAVKRSLSQDDLSTMTTAGFDGPAQRSAKRKRKNEFRGIRQRPWGKWAAEIRDPSKGVRVWLGTFNSAEEAARAYDVEARRIRGKKXKVNFPEELTVHQKRRACPAAPKVXKSSAAQEPTVIPAVNNLANPNAFVYPPADFASKQPLVQPDNVPYVPAINSAAPVEAPVMNMYSDQGSNSFGCSDLGWEYDTKTPDISSIAPISTIAEGTESALLQSNTYNPAVIAEGAESALVQSNTYNSVVPPVMENNAVDFEPWMRFLVDDGVDEPIDSLLNFDVPQDVVGNMDLWSFDDMPICGEIF

SEQ ID NO: 68175 - protein, 287 aa, Triticum aestivum
  peptide (1)..(287): Ceres Seq. ID no. 15221734
  misc_feature (19)..(80): Pfam Name: AP2 domain Pfam Description: AP2 domain
  misc_feature (1)..(210): Homolog of NCBI NO: 30525872 NR Description: ethylene-responsive element binding protein
  misc_feature (1)..(210): Homolog of NCBI NO: 24940524 NR Description: ethylene response element binding protein
  misc_feature (1)..(280): Homolog of NCBI NO: 19880313 NR Description: putative EREBP-type transcription factor [Oryza
  misc_feature (1)..(282): Homolog of NCBI NO: 38343926 NR Description: ethylene transcription factor [Fagus sylvatica]
  misc_feature (1)..(282): Homolog of NCBI NO: 18496063 NR Description: ethylene responsive element binding protein
  misc_feature (1)..(210): Homolog of NCBI NO: 30525870 NR Description: ethylene-responsive element binding protein
  misc_feature (216)..(287): Homolog of NCBI NO: 6176534 NR Description: EREBP-like protein [Oryza sativa]
  misc_feature (1)..(210): Homolog of NCBI NO: 6176534 NR Description: EREBP-like protein [Oryza sativa]
  misc_feature (209)..(282): Homolog of NCBI NO: 6689918 NR Description: transcription factor EREBP1 [Oryza sativa]
  misc_feature (1)..(210): Homolog of NCBI NO: 6689918 NR Description: transcription factor EREBP1 [Oryza sativa]
  misc_feature (73)..(73): Xaa is any aa, unknown or other
  misc_feature (97)..(97): Xaa is any aa, unknown or other
MTTAGFDGPAQRSAKRKRKNEFRGIRQRPWGKWAAEIRDPSKGVRVWLGTFNSAEEAARAYDVEARRIRGKKXKVNFPEELTVHQKRRACPAAPKVXKSSAAQEPTVIPAVNNLANPNAFVYPPADFASKQPLVQPDNVPYVPAINSAAPVEAPVMNMYSDQGSNSFGCSDLGWEYDTKTPDISSIAPISTIAEGTESALLQSNTYNPAVIAEGAESALVQSNTYNSVVPPVMENNAVDFEPWMRFLVDDGVDEPIDSLLNFDVPQDVVGNMDLWSFDDMPICGEIF

SEQ ID NO: 68176 - DNA, 1335 bp, Triticum aestivum
  misc_feature (1)..(1335): Ceres Seq. ID no. 15226254
acacccacccaccccctcctccttacttgacctagaacctggcctcgggccgacgcctcctgctccctctcgctgtcgcgtctcccggcgatcctctccgtcgacgccccggctagccgccatcgtttcccggcgaccagatcgacggcaatcccatcctccttgatctccctctcgggcgtcgggagatctacgtggggacatgcataagctggggagaggaagccgcgacaaggtgcaacagttcatggccataactggtgcaagcgagaaggtcgcccttcaggcactgaaagctagtgattggcacttagaagggtcttttgattatttctacagccagccacagatttctgtgaccaattctcgacatctttacagcagatacaaagaacgtgatgctgatatgatcatggtggagggcacatctcaactttgcaacgacctgttggtggatcctcaggatgttgtcatgcttgtcatatcatggcacatgaaagctgccacaatgtgtgaatttactcgccaggaattcattgatggtctgcagtcaattggggtagattcaattgagaagctccgtgagaaacttccatcactgcgagctgagataaaggacgataataagttccgtgagatatacaactttgcatttgcttgggctagggaaaagggtcagaaatcccttccactggagacagctattggaatgtggaggttgctgtttgctgaaaggcattggcccttaatcgatcactggtgtcagtttctccaggtcaggcataacaaagccatctctagggacacatggtctcagctgttggaatttgttaagacaattgatccacagttatccaattatgacgaagaaggtgcttggccctacctaattgatgaatttgtggagtacctaaccgagaatggatgcgttcagcgtaacaagtgaaccattcgaggctgcattctgacttggatatcatgatttggtggtacaaacatgattcatgtcgatcaatagaatatttatctttggatgtcggcattgttccagctccccttcacaaagcagatgatgtcgtttggtggaatctacttgcgcaggggtgatttcactggctaggattgcaaactatctatctggtttgtattttgtgctgcacctatctgctacagcatacccaaaatagttattggtttactgctgaatgggcgatgggtctatagttcatgtaggtctaggtatgaggtaatgcgaacttgtgctatcggtattgatcgattgttgccagatggggcacctttctatgaggtaatgcaaacttgtgatatctttcg

SEQ ID NO: 68177 - protein, 247 aa, Triticum aestivum
  peptide (1)..(247): Ceres Seq. ID no. 15226255
  misc_feature (123)..(237): Pfam Name: Domain of unknown function (DUF298) Pfam Description: Domain of unknown function (DUF298)
  misc_feature (2)..(236): Homolog of NCBI NO: 34857167 NR Description: similar to RP42 homolog [Rattus norvegicus]
  misc_feature (1)..(236): Homolog of NCBI NO: 15826860 NR Description: testis derived transcript 3 [Mus musculus]
  misc_feature (1)..(236): Homolog of NCBI NO: 9896486 NR Description: RP42 protein [Homo sapiens]
  misc_feature (1)..(236): Homolog of NCBI NO: 18700658 NR Description: leucine zipper protein [Homo sapiens]
  misc_feature (1)..(236): Homolog of NCBI NO: 36030883 NR Description: RP42 homolog; squamous cell carcinoma-related
  misc_feature (1)..(236): Homolog of NCBI NO: 6166507 NR Description: RP42 [Mus musculus]
  misc_feature (1)..(236): Homolog of NCBI NO: 34784120 NR Description: Unknown (protein for MGC:66414) [Danio rerio]
  misc_feature (1)..(236): Homolog of NCBI NO: 34784818 NR Description: C13orf17 protein [Homo sapiens]
  misc_feature (1)..(245): Homolog of NCBI NO: 18399737 NR Description: expressed protein [Arabidopsis thaliana]
  misc_feature (1)..(245): Homolog of NCBI NO: 15292985 NR Description: unknown protein [Arabidopsis thaliana]
MHKLGRGSRDKVQQFMAITGASEKVALQALKASDWHLEGSFDYFYSQPQISVTNSRHLYSRYKERDADMIMVEGTSQLCNDLLVDPQDVVMLVISWHMKAATMCEFTRQEFIDGLQSIGVDSIEKLREKLPSLRAEIKDDNKFREIYNFAFAWAREKGQKSLPLETAIGMWRLLFAERHWPLIDHWCQFLQVRHNKAISRDTWSQLLEFVKTIDPQLSNYDEEGAWPYLIDEFVEYLTENGCVQRNK

SEQ ID NO: 68178 - protein, 232 aa, Triticum aestivum
  peptide (1)..(232): Ceres Seq. ID no. 15226256
  misc_feature (108)..(222): Pfam Name: Domain of unknown function (DUF298) Pfam Description: Domain of unknown function (DUF298)
  misc_feature (1)..(221): Homolog of NCBI NO: 34857167 NR Description: similar to RP42 homolog [Rattus norvegicus]
  misc_feature (1)..(221): Homolog of NCBI NO: 15826860 NR Description: testis derived transcript 3 [Mus musculus]
  misc_feature (1)..(221): Homolog of NCBI NO: 9896486 NR Description: RP42 protein [Homo sapiens]
  misc_feature (1)..(221): Homolog of NCBI NO: 18700658 NR Description: leucine zipper protein [Homo sapiens]
  misc_feature (1)..(221): Homolog of NCBI NO: 36030883 NR Description: RP42 homolog; squamous cell carcinoma-related
  misc_feature (1)..(221): Homolog of NCBI NO: 6166507 NR Description: RP42 [Mus musculus]
  misc_feature (1)..(221): Homolog of NCBI NO: 34784120 NR Description: Unknown (protein for MGC:66414) [Danio rerio]
  misc_feature (1)..(221): Homolog of NCBI NO: 34784818 NR Description: C13orf17 protein [Homo sapiens]
  misc_feature (1)..(230): Homolog of NCBI NO: 18399737 NR Description: expressed protein [Arabidopsis thaliana]
  misc_feature (1)..(230): Homolog of NCBI NO: 15292985 NR Description: unknown protein [Arabidopsis thaliana]
MAITGASEKVALQALKASDWHLEGSFDYFYSQPQISVTNSRHLYSRYKERDADMIMVEGTSQLCNDLLVDPQDVVMLVISWHMKAATMCEFTRQEFIDGLQSIGVDSIEKLREKLPSLRAEIKDDNKFREIYNFAFAWAREKGQKSLPLETAIGMWRLLFAERHWPLIDHWCQFLQVRHNKAISRDTWSQLLEFVKTIDPQLSNYDEEGAWPYLIDEFVEYLTENGCVQRNK

SEQ ID NO: 68179 - protein, 179 aa, Triticum aestivum
  peptide (1)..(179): Ceres Seq. ID no. 15226257
  misc_feature (55)..(169): Pfam Name: Domain of unknown function (DUF298) Pfam Description: Domain of unknown function (DUF298)
  misc_feature (1)..(168): Homolog of NCBI NO: 34857167 NR Description: similar to RP42 homolog [Rattus norvegicus]
  misc_feature (1)..(168): Homolog of NCBI NO: 15826860 NR Description: testis derived transcript 3 [Mus musculus]
  misc_feature (1)..(168): Homolog of NCBI NO: 9896486 NR Description: RP42 protein [Homo sapiens]
  misc_feature (1)..(168): Homolog of NCBI NO: 18700658 NR Description: leucine zipper protein [Homo sapiens]
  misc_feature (1)..(168): Homolog of NCBI NO: 36030883 NR Description: RP42 homolog; squamous cell carcinoma-related
  misc_feature (1)..(168): Homolog of NCBI NO: 6166507 NR Description: RP42 [Mus musculus]
  misc_feature (1)..(168): Homolog of NCBI NO: 34784120 NR Description: Unknown (protein for MGC:66414) [Danio rerio]
  misc_feature (1)..(168): Homolog of NCBI NO: 34784818 NR Description: C13orf17 protein [Homo sapiens]
  misc_feature (1)..(177): Homolog of NCBI NO: 18399737 NR Description: expressed protein [Arabidopsis thaliana]
  misc_feature (1)..(177): Homolog of NCBI NO: 15292985 NR Description: unknown protein [Arabidopsis thaliana]
MIMVEGTSQLCNDLLVDPQDVVMLVISWHMKAATMCEFTRQEFIDGLQSIGVDSIEKLREKLPSLRAEIKDDNKFREIYNFAFAWAREKGQKSLPLETAIGMWRLLFAERHWPLIDHWCQFLQVRHNKAISRDTWSQLLEFVKTIDPQLSNYDEEGAWPYLIDEFVEYLTENGCVQRNK

SEQ ID NO: 68180 - DNA, 1323 bp, Triticum aestivum
  misc_feature (1)..(1323): Ceres Seq. ID no. 14302291
attcgactccacaccctcggttcacacacagtgatcagctcagctacagcctacagagcacagacccaaccccgggagacaacagagcacggcgaggatgctgctgaacccggcctcggaggcgatggtgctggacagcatcaggcagcacctcatggaggacacggcggctccggcgccggaggcgaggaggcagaggccggcctactgccgcagcgccagcttcgggagcctggtggccgaccagtggagcgagtcgctcccgttccgcgcggacgactccgacgacatggtcgtctacggcgcgctccgcgacgccttctcctgcggctggctccccgacggctccttcgccgccgtcaagccggagcccctcctgccttccccggactcctgctatgtcggcttcctcgagccggagacgcctccggccacgtccccgggcgggagcgaggaggaggccgccgcggcgttcatgggcgaggaggcggccgcggccgtggcgagggggaagcactaccgcggggtgaggcagcggccgtggggcaagttcgcggcggagatccgggacccggccaagaacggcgcccgcgtgtggctcggcacctacgacaccgccgaggacgccgccgtggcctacgaccgcgccgcgtaccgcatgcgcggctcccgcgcgctcctcaacttcccgctccgcatcggctccgagatcgccgccgcgcacgccgcggccgcggccgccggcgacaagcggccgtcgcccgagcccgcgacatcggactcgtcatcctcctcgtcctcctccgggtccccgaaaaggaggaagagaggcgaggccgcggccgcgtccatggccatggcgctggtgccgccgtcctcgcagttgagccggccggcccacgcgtggtaccccgccgtgccggcggagcaggtggccatggcgccgtgcgtgcagcagctggtcagctaggccccgctctccagcccccgggcgcacgatcgtgaaagacaatgcgcaagtgcagtggattcgccagcaagtgcatggacgcgacagcaacaggagcccgcctttcactgttgcacggtgcaaggtggtgatggcaatggagtgcgatacctatcgagcgagcaggcaaagcaaccttggcgacggctccatttggatagatatttggatatttgatggcaatggaagataagctctcggagcaactgggcgctgcaatttggtctggaacgatagttcctcctctggctgctcggtgcaactcgcccaagtgggtcaaagcgaaactgtgctagtatcgggttgtcgtggtt

SEQ ID NO: 68181 - protein, 334 aa, Triticum aestivum
  peptide (1)..(334): Ceres Seq. ID no. 14302292
  misc_feature (137)..(213): Pfam Name: Cupin Pfam Description: Cupin
IRLHTLGSHTVISSATAYRAQTQPRETTEHGEDAAEPGLGGDGAGQHQAAPHGGHGGSGAGGEEAEAGLLPQRQLREPGGRPVERVAPVPRGRLRRHGRLRRAPRRLLLRLAPRRLLRRRQAGAPPAFPGLLLCRLPRAGDASGHVPGRERGGGRRGVHGRGGGRGRGEGEALPRGEAAAVGQVRGGDPGPGQERRPRVARHLRHRRGRRRGLRPRRVPHARLPRAPQLPAPHRLRDRRRARRGRGRRRQAAVARARDIGLVILLVLLRVPEKEEERRGRGRVHGHGAGAAVLAVEPAGPRVVPRRAGGAGGHGAVRAAAGQLGPALQPPGARS

SEQ ID NO: 68182 - protein, 290 aa, Triticum aestivum
  peptide (1)..(290): Ceres Seq. ID no. 14302293
  misc_feature (138)..(203): Pfam Name: AP2 domain Pfam Description: AP2 domain
  misc_feature (34)..(256): Homolog of NCBI NO: 25350257 NR Description: EREBP-2 protein [imported] - Arabidopsis thaliana
  misc_feature (23)..(91): Homolog of NCBI NO: 7489123 NR Description: ethylene-responsive transcription factor ERF1 -
  misc_feature (132)..(263): Homolog of NCBI NO: 7489123 NR Description: ethylene-responsive transcription factor ERF1 -
  misc_feature (1)..(256): Homolog of NCBI NO: 25350258 NR Description: ethylene responsive element binding factor 1
  misc_feature (1)..(256): Homolog of NCBI NO: 21264420 NR Description: Ethylene responsive element binding factor 1
  misc_feature (42)..(248): Homolog of NCBI NO: 7489113 NR Description: DNA binding protein EREBP-2 - common tobacco
  misc_feature (35)..(248): Homolog of NCBI NO: 8809571 NR Description: ethylene-responsive element binding factor
  misc_feature (1)..(289): Homolog of NCBI NO: 7528276 NR Description: AP2-related transcription factor
  misc_feature (1)..(279): Homolog of NCBI NO: 14140141 NR Description: putative AP2-related transcription factor [Oryza
  misc_feature (1)..(289): Homolog of NCBI NO: 38346167 NR Description: OSJNBa0079A21.14 [Oryza sativa (japonica
MLLNPASEAMVLDSIRQHLMEDTAAPAPEARRQRPAYCRSASFGSLVADQWSESLPFRADDSDDMVVYGALRDAFSCGWLPDGSFAAVKPEPLLPSPDSCYVGFLEPETPPATSPGGSEEEAAAAFMGEEAAAAVARGKHYRGVRQRPWGKFAAEIRDPAKNGARVWLGTYDTAEDAAVAYDRAAYRMRGSRALLNFPLRIGSEIAAAHAAAAAAGDKRPSPEPATSDSSSSSSSSGSPKRRKRGEAAAASMAMALVPPSSQLSRPAHAWYPAVPAEQVAMAPCVQQLVS

SEQ ID NO: 68183 - protein, 281 aa, Triticum aestivum
  peptide (1)..(281): Ceres Seq. ID no. 14302294
  misc_feature (129)..(194): Pfam Name: AP2 domain Pfam Description: AP2 domain
  misc_feature (25)..(247): Homolog of NCBI NO: 25350257 NR Description: EREBP-2 protein [imported] - Arabidopsis thaliana
  misc_feature (14)..(82): Homolog of NCBI NO: 7489123 NR Description: ethylene-responsive transcription factor ERF1 -
  misc_feature (123)..(254): Homolog of NCBI NO: 7489123 NR Description: ethylene-responsive transcription factor ERF1 -
  misc_feature (1)..(247): Homolog of NCBI NO: 25350258 NR Description: ethylene responsive element binding factor 1
  misc_feature (1)..(247): Homolog of NCBI NO: 21264420 NR Description: Ethylene responsive element binding factor 1
  misc_feature (33)..(239): Homolog of NCBI NO: 7489113 NR Description: DNA binding protein EREBP-2 - common tobacco
  misc_feature (26)..(239): Homolog of NCBI NO: 8809571 NR Description: ethylene-responsive element binding factor
  misc_feature (1)..(280): Homolog of NCBI NO: 7528276 NR Description: AP2-related transcription factor
  misc_feature (1)..(270): Homolog of NCBI NO: 14140141 NR Description: putative AP2-related transcription factor [Oryza
  misc_feature (1)..(280): Homolog of NCBI NO: 38346167 NR Description: OSJNBa0079A21.14 [Oryza sativa (japonica
MVLDSIRQHLMEDTAAPAPEARRQRPAYCRSASFGSLVADQWSESLPFRADDSDDMVVYGALRDAFSCGWLPDGSFAAVKPEPLLPSPDSCYVGFLEPETPPATSPGGSEEEAAAAFMGEEAAAAVARGKHYRGVRQRPWGKFAAEIRDPAKNGARVWLGTYDTAEDAAVAYDRAAYRMRGSRALLNFPLRIGSEIAAAHAAAAAAGDKRPSPEPATSDSSSSSSSSGSPKRRKRGEAAAASMAMALVPPSSQLSRPAHAWYPAVPAEQVAMAPCVQQLVS

SEQ ID NO: 68184 - DNA, 1180 bp, Triticum aestivum
  misc_feature (1)..(1180): Ceres Seq. ID no. 12613576
gatcgatcgagtcgattctcgcgcagagcttgagagagatcggaggcgatgggaggcggcagcatggggatccgcgcggccgccagggccgccttcatcggcggctaccgctccgcctcgaacgcccgccgctccgccctgccctcctcctccgccgccgcggccgacacccgccccgtctccacggccaccaccttcgacgactggtacatccccgaccgcgaggtgttcggccccgtgccctcccacgaggaggccatggccgccaccctcgacctcagggacgccttcgagattgccaagattgattcccatggtggccgcctggatatctccaagacacatatctcccatgatggccttgatgatcccacaaaggttgctcaggaaacatttcaggatcatctccattcagaagcatctaagcatgaagagaagcatgacagtttatccgttgcctctggatcctctgcacgtgttattgaagccttcaccatgctacacgagagtcctgaagctcaggatgttgttgcttcgcttgcttctgataagaatgtctgggaagctgtgatgaagaacaagaaacttgtggagttttacaagacaaacctcagcgagtcatccagtgtcactgacgaagctgagcagagcgacgccgagagctcgcagagcagcaatggtgtcgtctcgccggcagatgcattcagtgattacattcagatgatgaaggcgttcgtgtcggagatggtgacgaatctttcgagcataatgcaggacctggtggccacgtcagacgagggccagagcaaggggaggttgaagaccctgatcatcaactccaagaaggatttcacaaatggcccgtcgtccttcgtgctcctggccatcgcgtctattctggtcgttttgctcaagcgtgcatagttctaaataaaacaaaggagctggcagagtggttgttctgagtttagtttcgtttcagctttttgagacagacaggatttgatcttctttttctacttattagttcatcaaatggtcgattctacgcactgtacaggtcgacgttaagtcttttcaagggtttatctggtggctgtgtgttcacctggggatgaacatgttctgcatgatgtttagctgttactgcaactttatatgatggagtttagttttcttt

SEQ ID NO: 68185 - protein, 291 aa, Triticum aestivum
  peptide (1)..(291): Ceres Seq. ID no. 12613577
  misc_feature (1)..(291): Homolog of NCBI NO: 15239670 NR Description: putative protein
MGGGSMGIRAAARAAFIGGYRSASNARRSALPSSSAAAADTRPVSTATTFDDWYIPDREVFGPVPSHEEAMAATLDLRDAFEIAKIDSHGGRLDISKTHISHDGLDDPTKVAQETFQDHLHSEASKHEEKHDSLSVASGSSARVIEAFTMLHESPEAQDVVASLASDKNVWEAVMKNKKLVEFYKTNLSESSSVTDEAEQSDAESSQSSNGVVSPADAFSDYIQMMKAFVSEMVTNLSSIMQDLVATSDEGQSKGRLKTLIINSKKDFTNGPSSFVLLAIASILVVLLKRA

SEQ ID NO: 68186 - protein, 286 aa, Triticum aestivum
  peptide (1)..(286): Ceres Seq. ID no. 12613578
  misc_feature (1)..(286): Homolog of NCBI NO: 15239670 NR Description: putative protein
MGIRAAARAAFIGGYRSASNARRSALPSSSAAAADTRPVSTATTFDDWYIPDREVFGPVPSHEEAMAATLDLRDAFEIAKIDSHGGRLDISKTHISHDGLDDPTKVAQETFQDHLHSEASKHEEKHDSLSVASGSSARVIEAFTMLHESPEAQDVVASLASDKNVWEAVMKNKKLVEFYKTNLSESSSVTDEAEQSDAESSQSSNGVVSPADAFSDYIQMMKAFVSEMVTNLSSIMQDLVATSDEGQSKGRLKTLIINSKKDFTNGPSSFVLLAIASILVVLLKRA

SEQ ID NO: 68187 - protein, 221 aa, Triticum aestivum
  peptide (1)..(221): Ceres Seq. ID no. 12613579
  misc_feature (1)..(221): Homolog of NCBI NO: 15239670 NR Description: putative protein
MAATLDLRDAFEIAKIDSHGGRLDISKTHISHDGLDDPTKVAQETFQDHLHSEASKHEEKHDSLSVASGSSARVIEAFTMLHESPEAQDVVASLASDKNVWEAVMKNKKLVEFYKTNLSESSSVTDEAEQSDAESSQSSNGVVSPADAFSDYIQMMKAFVSEMVTNLSSIMQDLVATSDEGQSKGRLKTLIINSKKDFTNGPSSFVLLAIASILVVLLKRA

SEQ ID NO: 68188 - DNA, 1303 bp, Triticum aestivum
  misc_feature (1)..(1303): Ceres Seq. ID no. 13596000
aacaaaccaaccgccaacacttccattccaggcatcaaccatggcttctcctcggcatctgatgaagctttcggctgctcttctcctcctctgtgttggcgtgtgtgtggctcgcaacagtgacttctccattgtcggctactcggaggaggacctgtcgtccaacgacagactcgtcgagctgtttgagaagtggctggccaagcaccagaaggcgtacgcgagcttcgaggagaagctgcacaagttcgaggtgttcaaggacaacctgaagcacatcgacaagatcaaccgggaagtgaccagctactggctcggcctcaacgagtttgccgacctcaccaacgtcgagttcaaggccgcctacctcggcctcaatgctgctccggctcgtcggggcagcagccgaagcttcaggtacgaggacgtgagtgccagcgacctgcccaagtctgtggactggaggaagaagggcgcggtgacagaggtgaagaaccaggggcagtgcggcagctgctgggccttctcgacggtggcggcagtggaagggatcaacgccatcgtgacaggcaacctgactgcgctgtcggagcaggagctcatcgactgcagcgtcgatggcaacagtggctgcaatggcggcttgatggactacgccttctcctacatcgcgtccagtggcgggctacacaccgaggaggcgtacccctacctcatggaggaaggcagctgcggcgacggtaagaaggccgagtccaaggcggtgacgatcagcggcttcgaggacgtgccggccaatgacgagcaggcgctgatcaaggctctcgcccaccagcccgtctccgtcgccatcgaggcctccggcaggcacttccagttctacagcgggggagttttcgacggtccttgcggcgcgcagctagatcacggcgtggcggcggtcgggtacgggtcggacaaggggaagggccacgactacatcatcgtgaggaactcgtggggtgcggactggggcgagaagggttacatcaggatgaagaggggcaccagcaacggcgagggcctctgcggcatcaacaagatggcctcctacccaaccaaggacaagtgatgttccagcctcaaatcctgcatccagaggattgaagatttgaaccatccttgagagtccttgttcccgatctttgcatttccctgctttttctttcacgtttttccttttctcaatggttcctttcggttaatgcgacgaacatggactgaaataataaaatttatttccaagtttctattgagattgccc

SEQ ID NO: 68189 - protein, 369 aa, Triticum aestivum
  peptide (1)..(369): Ceres Seq. ID no. 13596001
  misc_feature (148)..(366): Pfam Name: Papain family cysteine protease Pfam Description: Papain family cysteine protease
  misc_feature (14)..(328): Homolog of NCBI NO: 8886940 NR Description: F2D10.37 [Arabidopsis thaliana]
  misc_feature (22)..(354): Homolog of NCBI NO: 7435773 NR Description: cysteine proteinase (EC 3.4.22.-) precursor -
  misc_feature (22)..(369): Homolog of NCBI NO: 30141025 NR Description: cysteine protease-4 [Helianthus annuus]
  misc_feature (22)..(369): Homolog of NCBI NO: 22759715 NR Description: cysteine proteinase [Zinnia elegans]
  misc_feature (30)..(369): Homolog of NCBI NO: 37780039 NR Description: cysteine protease 14 [Trifolium repens]
  misc_feature (30)..(369): Homolog of NCBI NO: 37780041 NR Description: cysteine protease 14 [Trifolium repens]
  misc_feature (14)..(369): Homolog of NCBI NO: 18394919 NR Description: cysteine proteinase XCP2 [Arabidopsis thaliana]
  misc_feature (7)..(369): Homolog of NCBI NO: 18418684 NR Description: cysteine protease XCP1 [Arabidopsis thaliana]
  misc_feature (15)..(368): Homolog of NCBI NO: 34905996 NR Description: putative cysteine proteinase
  misc_feature (27)..(368): Homolog of NCBI NO: 14719319 NR Description: putative cysteine proteinase [Oryza sativa]
TNQPPTLPFQASTMASPRHLMKLSAALLLLCVGVCVARNSDFSIVGYSEEDLSSNDRLVELFEKWLAKHQKAYASFEEKLHKFEVFKDNLKHIDKINREVTSYWLGLNEFADLTNVEFKAAYLGLNAAPARRGSSRSFRYEDVSASDLPKSVDWRKKGAVTEVKNQGQCGSCWAFSTVAAVEGINAIVTGNLTALSEQELIDCSVDGNSGCNGGLMDYAFSYIASSGGLHTEEAYPYLMEEGSCGDGKKAESKAVTISGFEDVPANDEQALIKALAHQPVSVAIEASGRHFQFYSGGVFDGPCGAQLDHGVAAVGYGSDKGKGHDYIIVRNSWGADWGEKGYIRMKRGTSNGEGLCGINKMASYPTKDK

SEQ ID NO: 68190 - protein, 356 aa, Triticum aestivum
  peptide (1)..(356): Ceres Seq. ID no. 13596002
  misc_feature (135)..(353): Pfam Name: Papain family cysteine protease Pfam Description: Papain family cysteine protease
  misc_feature (1)..(315): Homolog of NCBI NO: 8886940 NR Description: F2D10.37 [Arabidopsis thaliana]
  misc_feature (9)..(341): Homolog of NCBI NO: 7435773 NR Description: cysteine proteinase (EC 3.4.22.-) precursor -
  misc_feature (9)..(356): Homolog of NCBI NO: 30141025 NR Description: cysteine protease-4 [Helianthus annuus]
  misc_feature (9)..(356): Homolog of NCBI NO: 22759715 NR Description: cysteine proteinase [Zinnia elegans]
  misc_feature (17)..(356): Homolog of NCBI NO: 37780039 NR Description: cysteine protease 14 [Trifolium repens]
  misc_feature (17)..(356): Homolog of NCBI NO: 37780041 NR Description: cysteine protease 14 [Trifolium repens]
  misc_feature (1)..(356): Homolog of NCBI NO: 18394919 NR Description: cysteine proteinase XCP2 [Arabidopsis thaliana]
  misc_feature (1)..(356): Homolog of NCBI NO: 18418684 NR Description: cysteine protease XCP1 [Arabidopsis thaliana]
  misc_feature (2)..(355): Homolog of NCBI NO: 34905996 NR Description: putative cysteine proteinase
  misc_feature (14)..(355): Homolog of NCBI NO: 14719319 NR Description: putative cysteine proteinase [Oryza sativa]
MASPRHLMKLSAALLLLCVGVCVARNSDFSIVGYSEEDLSSNDRLVELFEKWLAKHQKAYASFEEKLHKFEVFKDNLKHIDKINREVTSYWLGLNEFADLTNVEFKAAYLGLNAAPARRGSSRSFRYEDVSASDLPKSVDWRKKGAVTEVKNQGQCGSCWAFSTVAAVEGINAIVTGNLTALSEQELIDCSVDGNSGCNGGLMDYAFSYIASSGGLHTEEAYPYLMEEGSCGDGKKAESKAVTISGFEDVPANDEQALIKALAHQPVSVAIEASGRHFQFYSGGVFDGPCGAQLDHGVAAVGYGSDKGKGHDYIIVRNSWGADWGEKGYIRMKRGTSNGEGLCGINKMASYPTKDK

SEQ ID NO: 68191 - protein, 349 aa, Triticum aestivum
  peptide (1)..(349): Ceres Seq. ID no. 13596003
  misc_feature (128)..(346): Pfam Name: Papain family cysteine protease Pfam Description: Papain family cysteine protease
  misc_feature (1)..(308): Homolog of NCBI NO: 8886940 NR Description: F2D10.37 [Arabidopsis thaliana]
  misc_feature (2)..(334): Homolog of NCBI NO: 7435773 NR Description: cysteine proteinase (EC 3.4.22.-) precursor -
  misc_feature (2)..(349): Homolog of NCBI NO: 30141025 NR Description: cysteine protease-4 [Helianthus annuus]
  misc_feature (2)..(349): Homolog of NCBI NO: 22759715 NR Description: cysteine proteinase [Zinnia elegans]
  misc_feature (10)..(349): Homolog of NCBI NO: 37780039 NR Description: cysteine protease 14 [Trifolium repens]
  misc_feature (10)..(349): Homolog of NCBI NO: 37780041 NR Description: cysteine protease 14 [Trifolium repens]
  misc_feature (1)..(349): Homolog of NCBI NO: 18394919 NR Description: cysteine proteinase XCP2 [Arabidopsis thaliana]
  misc_feature (1)..(349): Homolog of NCBI NO: 18418684 NR Description: cysteine protease XCP1 [Arabidopsis thaliana]
  misc_feature (1)..(348): Homolog of NCBI NO: 34905996 NR Description: putative cysteine proteinase
  misc_feature (7)..(348): Homolog of NCBI NO: 14719319 NR Description: putative cysteine proteinase [Oryza sativa]
MKLSAALLLLCVGVCVARNSDFSIVGYSEEDLSSNDRLVELFEKWLAKHQKAYASFEEKLHKFEVFKDNLKHIDKINREVTSYWLGLNEFADLTNVEFKAAYLGLNAAPARRGSSRSFRYEDVSASDLPKSVDWRKKGAVTEVKNQGQCGSCWAFSTVAAVEGINAIVTGNLTALSEQELIDCSVDGNSGCNGGLMDYAFSYIASSGGLHTEEAYPYLMEEGSCGDGKKAESKAVTISGFEDVPANDEQALIKALAHQPVSVAIEASGRHFQFYSGGVFDGPCGAQLDHGVAAVGYGSDKGKGHDYIIVRNSWGADWGEKGYIRMKRGTSNGEGLCGINKMASYPTKDK

SEQ ID NO: 68192 - DNA, 1532 bp, Triticum aestivum
  misc_feature (1)..(1532): Ceres Seq. ID no. 13654122
aaagaaaggcttggcgaagaggttaacgaatcgatcttctccgagttttttgtcctcgaggaatttagcaccgctcgggattctcaggccatgatgatcggtgtcgcaggcttcagccggcacatcggccagctcttgagtaaaagcaacgggtttattgcggcgtccctgtccgcggcgagctgcgcggacgaggcggagaaggccgagggggcggggtgccgggacgacgcggcggcgctgaggctcaaatggattgccatggcggcgatactggtgtccggcgtgatgggcgtgggcctgtcgctcgtggggcggaagcggcggacggtgcagaccggcagcgctgtcttcgtggccgccaaggctttcgcggccggcgtgatcctggccacggggttcgttcacatgctgcacgacgccgagcacgcgctctccaacccctgcctcccggccgcgccctggcggcggttcccgttccccgggttcgtcgccatgctcgctgctcttgccacgctggtgctcgacgtcctggtcaccaggttctacgagaccaagcaccgtgcggaggtagctcgggtcaaggctgacgccgctgccgcactcgccgccgcgtccacctccgccagcgacgaagacatcaccgtggtcaccgtcgtcgagggtgagcacaaggtcccgctcttgcaagcccactcccattcccacgcgcagtcgcatggtcacgagctggtgcaaccacaaggacgcgagggggaggtgtcagaccacgtgcgctccgtcgtggtatcacagatactggaaatggggattgtgtcgcactcggtgatcattgggctgtcgcttggtgtgtctcggagcccctgcacaatcaggccactggtggcagcgctctcattccaccagttcttcgagggatttgccctcggtgggtgcattgcgcaggctcagtttaagaacctttcggcagttatgatggcgtccttttttgccattacaacaccaactggtatcgccgctggggccggtttgtcctcattttacaacgccaatagccccagggctctagtggtcgaaggcatcctcgactctgtgtcggccggcatactcatatacatggcgctggtggatctaatcgcagccgatttcttgggtgggaagatgacagggtcgccacggcagcaagtgatggcctatgtcgccctgttcctaggtgcgctctccatgtcatcgcttgcagtttgggcctgaaccggtttaatgagatgaaggtagcggatgacgcctacgtcccaacatactgcctgtgatacatgtacataactaatgcatgtgcctgtgttcatatgattgcatacatacatcagataacgtgcccttgtttttgatgggcatgagagaacagcgccggtggaaacgcctgagcattgcctctgtatatactagatgaatccccgtgcgttgctgcgggatattttgtgctaaaatttctaatgtggagagatacgccatgtaaagaaaaatagtgactt

SEQ ID NO: 68193 - protein, 416 aa, Triticum aestivum
  peptide (1)..(416): Ceres Seq. ID no. 13654123
  misc_feature (234)..(416): Homolog of NCBI NO: 30841912 NR Description: putative zinc transporter OsZIP2 [Oryza sativa]
  misc_feature (57)..(243): Homolog of NCBI NO: 21553732 NR Description: putative iron-regulated transporter [Arabidopsis
  misc_feature (221)..(416): Homolog of NCBI NO: 21553732 NR Description: putative iron-regulated transporter [Arabidopsis
  misc_feature (15)..(416): Homolog of NCBI NO: 30682009 NR Description: metal transporter, putative (ZIP4) [Arabidopsis
  misc_feature (221)..(416): Homolog of NCBI NO: 18406954 NR Description: metal transporter, putative (IRT3) [Arabidopsis
  misc_feature (53)..(243): Homolog of NCBI NO: 18406954 NR Description: metal transporter, putative (IRT3) [Arabidopsis
  misc_feature (53)..(186): Homolog of NCBI NO: 40888856 NR Description: TPA: putative ZIP-like protein
  misc_feature (266)..(416): Homolog of NCBI NO: 40888856 NR Description: TPA: putative ZIP-like protein
  misc_feature (53)..(416): Homolog of NCBI NO: 40888862 NR Description: TPA: putative ZIP-like protein
  misc_feature (44)..(416): Homolog of NCBI NO: 30526082 NR Description: putative ZIP-like zinc transporter
KERLGEEVNESIFSEFFVLEEFSTARDSQAMMIGVAGFSRHIGQLLSKSNGFIAASLSAASCADEAEKAEGAGCRDDAAALRLKWIAMAAILVSGVMGVGLSLVGRKRRTVQTGSAVFVAAKAFAAGVILATGFVHMLHDAEHALSNPCLPAAPWRRFPFPGFVAMLAALATLVLDVLVTRFYETKHRAEVARVKADAAAALAAASTSASDEDITVVTVVEGEHKVPLLQAHSHSHAQSHGHELVQPQGREGEVSDHVRSVVVSQILEMGIVSHSVIIGLSLGVSRSPCTIRPLVAALSFHQFFEGFALGGCIAQAQFKNLSAVMMASFFAITTPTGIAAGAGLSSFYNANSPRALVVEGILDSVSAGILIYMALVDLIAADFLGGKMTGSPRQQVMAYVALFLGALSMSSLAVWA

SEQ ID NO: 68194 - protein, 386 aa, Triticum aestivum
  peptide (1)..(386): Ceres Seq. ID no. 13654124
  misc_feature (204)..(386): Homolog of NCBI NO: 30841912 NR Description: putative zinc transporter OsZIP2 [Oryza sativa]
  misc_feature (27)..(213): Homolog of NCBI NO: 21553732 NR Description: putative iron-regulated transporter [Arabidopsis
  misc_feature (191)..(386): Homolog of NCBI NO: 21553732 NR Description: putative iron-regulated transporter [Arabidopsis
  misc_feature (1)..(386): Homolog of NCBI NO: 30682009 NR Description: metal transporter, putative (ZIP4) [Arabidopsis
  misc_feature (191)..(386): Homolog of NCBI NO: 18406954 NR Description: metal transporter, putative (IRT3) [Arabidopsis
  misc_feature (23)..(213): Homolog of NCBI NO: 18406954 NR Description: metal transporter, putative (IRT3) [Arabidopsis
  misc_feature (23)..(156): Homolog of NCBI NO: 40888856 NR Description: TPA: putative ZIP-like protein
  misc_feature (236)..(386): Homolog of NCBI NO: 40888856 NR Description: TPA: putative ZIP-like protein
  misc_feature (23)..(386): Homolog of NCBI NO: 40888862 NR Description: TPA: putative ZIP-like protein
  misc_feature (14)..(386): Homolog of NCBI NO: 30526082 NR Description: putative ZIP-like zinc transporter
MMIGVAGFSRHIGQLLSKSNGFIAASLSAASCADEAEKAEGAGCRDDAAALRLKWIAMAAILVSGVMGVGLSLVGRKRRTVQTGSAVFVAAKAFAAGVILATGFVHMLHDAEHALSNPCLPAAPWRRFPFPGFVAMLAALATLVLDVLVTRFYETKHRAEVARVKADAAAALAAASTSASDEDITVVTVVEGEHKVPLLQAHSHSHAQSHGHELVQPQGREGEVSDHVRSVVVSQILEMGIVSHSVIIGLSLGVSRSPCTIRPLVAALSFHQFFEGFALGGCIAQAQFKNLSAVMMASFFAITTPTGIAAGAGLSSFYNANSPRALVVEGILDSVSAGILIYMALVDLIAADFLGGKMTGSPRQQVMAYVALFLGALSMSSLAVWA

SEQ ID NO: 68195 - protein, 385 aa, Triticum aestivum
  peptide (1)..(385): Ceres Seq. ID no. 13654125
  misc_feature (203)..(385): Homolog of NCBI NO: 30841912 NR Description: putative zinc transporter OsZIP2 [Oryza sativa]
  misc_feature (26)..(212): Homolog of NCBI NO: 21553732 NR Description: putative iron-regulated transporter [Arabidopsis
  misc_feature (190)..(385): Homolog of NCBI NO: 21553732 NR Description: putative iron-regulated transporter [Arabidopsis
  misc_feature (1)..(385): Homolog of NCBI NO: 30682009 NR Description: metal transporter, putative (ZIP4) [Arabidopsis
  misc_feature (190)..(385): Homolog of NCBI NO: 18406954 NR Description: metal transporter, putative (IRT3) [Arabidopsis
  misc_feature (22)..(212): Homolog of NCBI NO: 18406954 NR Description: metal transporter, putative (IRT3) [Arabidopsis
  misc_feature (22)..(155): Homolog of NCBI NO: 40888856 NR Description: TPA: putative ZIP-like protein
  misc_feature (235)..(385): Homolog of NCBI NO: 40888856 NR Description: TPA: putative ZIP-like protein
  misc_feature (22)..(385): Homolog of NCBI NO: 40888862 NR Description: TPA: putative ZIP-like protein
  misc_feature (13)..(385): Homolog of NCBI NO: 30526082 NR Description: putative ZIP-like zinc transporter
MIGVAGFSRHIGQLLSKSNGFIAASLSAASCADEAEKAEGAGCRDDAAALRLKWIAMAAILVSGVMGVGLSLVGRKRRTVQTGSAVFVAAKAFAAGVILATGFVHMLHDAEHALSNPCLPAAPWRRFPFPGFVAMLAALATLVLDVLVTRFYETKHRAEVARVKADAAAALAAASTSASDEDITVVTVVEGEHKVPLLQAHSHSHAQSHGHELVQPQGREGEVSDHVRSVVVSQILEMGIVSHSVIIGLSLGVSRSPCTIRPLVAALSFHQFFEGFALGGCIAQAQFKNLSAVMMASFFAITTPTGIAAGAGLSSFYNANSPRALVVEGILDSVSAGILIYMALVDLIAADFLGGKMTGSPRQQVMAYVALFLGALSMSSLAVWA

SEQ ID NO: 68196 - DNA, 1824 bp, Triticum aestivum
  misc_feature (1)..(1824): Ceres Seq. ID no. 12613725
atcggagcctgctcgcccgcgcacactcggaagacgacgcagacgccgccatgggggacgccgtcgctggcgccgtcgactaccgcggccggcccgcctcccgcgccgccaccggcggctggaagtcctcggtgttcgtcatggcaatggagatcgccgagcggttcgcgtacaagggcgtggcggcgaacctcatcacgtacctcacggggccgctgggccagcccatggcgcgcgcggcggcgtccatcgacgcgtggaagggcgtctcccagatgctgccgctgccggtggcctgcgtcgccgacgcctggctcggccgctaccgggccatcgtcctcgcctccatcctcttcgtcgtgagcatgggcacgctgtcgctgtcgtcggcgttccacatcttccgctccggcggccacgtggccgtcttctacgtcgcgctctacctggtggcgctgggcgagggcgcgcacaagccctgcgcgcaggcgttcgcggccgaccagttcgacgagaaggaccccaaggagaacgtggcaaggagctccttcttcaactggtggtacttcggcatgtgcgccggcaccgccgtcaccaccatggtctccagctacgtccaggacaacgtcggctggggcctcggcttcggtatcccctgcatcgtcatcctcgtctccctcgccgtcttcctcattggcaccccctcctaccgctactacaccaccaaggagcccagccccgtcgcccgcgtcggcaaggcgctcctggtgctgatcaagagctggagatcgaagcaccgcaccaatccggcgagcggcaaggtggaggcccataagaactccgacgaggacctcgtggaggaggtgagtagcgtcttccgcctgctgcccatctgggcctcctgcataatctacgccatcatcttctcccagacctccaccttcttcaccaagcaggcggccacgctggaccgccggatcggccccaacttcaaggtgccgccggcggcgctgcagaccttcatcagcgtcagcatcgtggccttcatcccggtctacgaccgtctcttcgtgccgctcgcgcgccgctacacggggcggcccacgggcatcaccatgctgcagagggtcggcgccggcctctccctctccctcgtcgccgtcgtgctctcggcgctcgtggagatgaagcggctcgccgtcgccagggacgccggcctgctggacgcccccaaggcttctcaccttcccatgacgctctggtggatggtgccgcagtacgtcctcatcggcgtctccgacgtgttcgccatgatcggcctccaggagttcttctacgaccaggtccccgacgccgtgcgcagcctcggcctcgcgctcttcctcagcatcttcggcgtcggccacctcctcagcagcttcctcatctccgtcatcgacagggccacggccaggcgcggcgccagctggttctccaacaacctcaaccgcgcgcacctcgactacttctactggctgctcgccgggctctgcgtcgtcgagctcgtcgccttcttcttcttctcgcgagcctatgtctacaagaagaagagcgacgatggcgattacaggggaggtgatgctgatgctacattggtgtaacttattaattcgggttagtactacgccgtgcgaaattttcaaaacaagtacagtacaaaattttcagattgtttgttatagagtgcgctcgcggtagattgtcataaattttggggtttaaaaacacactcaaaacggatcttttcttaactgaacctgaatgaatcattcgacttttctttgc

SEQ ID NO: 68197 - protein, 545 aa, Triticum aestivum
  peptide (1)..(545): Ceres Seq. ID no. 12613726
  misc_feature (108)..(464): Pfam Name: POT family Pfam Description: POT family
  misc_feature (7)..(275): Homolog of NCBI NO: 28416707 NR Description: At1g22550 [Arabidopsis thaliana]
  misc_feature (21)..(262): Homolog of NCBI NO: 18086410 NR Description: At1g72120/F28P5_2 [Arabidopsis thaliana]
  misc_feature (268)..(528): Homolog of NCBI NO: 18086410 NR Description: At1g72120/F28P5_2 [Arabidopsis thaliana]
  misc_feature (269)..(528): Homolog of NCBI NO: 15219905 NR Description: peptide transporter, putative; protein id:
  misc_feature (7)..(275): Homolog of NCBI NO: 15219905 NR Description: peptide transporter, putative; protein id:
  misc_feature (283)..(528): Homolog of NCBI NO: 30687920 NR Description: oligopeptide transporter -related [Arabidopsis
  misc_feature (14)..(261): Homolog of NCBI NO: 30687920 NR Description: oligopeptide transporter -related [Arabidopsis
  misc_feature (20)..(131): Homolog of NCBI NO: 34908688 NR Description: P0039A07.25 [Oryza sativa (japonica
  misc_feature (136)..(529): Homolog of NCBI NO: 34908688 NR Description: P0039A07.25 [Oryza sativa (japonica
  misc_feature (14)..(545): Homolog of NCBI NO: 34908690 NR Description: P0039A07.26 [Oryza sativa (japonica
RSLLARAHSEDDADAAMGDAVAGAVDYRGRPASRAATGGWKSSVFVMAMEIAERFAYKGVAANLITYLTGPLGQPMARAAASIDAWKGVSQMLPLPVACVADAWLGRYRAIVLASILFVVSMGTLSLSSAFHIFRSGGHVAVFYVALYLVALGEGAHKPCAQAFAADQFDEKDPKENVARSSFFNWWYFGMCAGTAVTTMVSSYVQDNVGWGLGFGIPCIVILVSLAVFLIGTPSYRYYTTKEPSPVARVGKALLVLIKSWRSKHRTNPASGKVEAHKNSDEDLVEEVSSVFRLLPIWASCIIYAIIFSQTSTFFTKQAATLDRRIGPNFKVPPAALQTFISVSIVAFIPVYDRLFVPLARRYTGRPTGITMLQRVGAGLSLSLVAVVLSALVEMKRLAVARDAGLLDAPKASHLPMTLWWMVPQYVLIGVSDVFAMIGLQEFFYDQVPDAVRSLGLALFLSIFGVGHLLSSFLISVIDRATARRGASWFSNNLNRAHLDYFYWLLAGLCVVELVAFFFFSRAYVYKKKSDDGDYRGGDADATLV

SEQ ID NO: 68198 - protein, 529 aa, Triticum aestivum
  peptide (1)..(529): Ceres Seq. ID no. 12613727
  misc_feature (92)..(448): Pfam Name: POT family Pfam Description: POT family
  misc_feature (1)..(259): Homolog of NCBI NO: 28416707 NR Description: At1g22550 [Arabidopsis thaliana]
  misc_feature (5)..(246): Homolog of NCBI NO: 18086410 NR Description: At1g72120/F28P5_2 [Arabidopsis thaliana]
  misc_feature (252)..(512): Homolog of NCBI NO: 18086410 NR Description: At1g72120/F28P5_2 [Arabidopsis thaliana]
  misc_feature (253)..(512): Homolog of NCBI NO: 15219905 NR Description: peptide transporter, putative; protein id:
  misc_feature (1)..(259): Homolog of NCBI NO: 15219905 NR Description: peptide transporter, putative; protein id:
  misc_feature (267)..(512): Homolog of NCBI NO: 30687920 NR Description: oligopeptide transporter -related [Arabidopsis
  misc_feature (1)..(245): Homolog of NCBI NO: 30687920 NR Description: oligopeptide transporter -related [Arabidopsis
  misc_feature (4)..(115): Homolog of NCBI NO: 34908688 NR Description: P0039A07.25 [Oryza sativa (japonica
  misc_feature (120)..(513): Homolog of NCBI NO: 34908688 NR Description: P0039A07.25 [Oryza sativa (japonica
  misc_feature (1)..(529): Homolog of NCBI NO: 34908690 NR Description: P0039A07.26 [Oryza sativa (japonica
MGDAVAGAVDYRGRPASRAATGGWKSSVFVMAMEIAERFAYKGVAANLITYLTGPLGQPMARAAASIDAWKGVSQMLPLPVACVADAWLGRYRAIVLASILFVVSMGTLSLSSAFHIFRSGGHVAVFYVALYLVALGEGAHKPCAQAFAADQFDEKDPKENVARSSFFNWWYFGMCAGTAVTTMVSSYVQDNVGWGLGFGIPCIVILVSLAVFLIGTPSYRYYTTKEPSPVARVGKALLVLIKSWRSKHRTNPASGKVEAHKNSDEDLVEEVSSVFRLLPIWASCIIYAIIFSQTSTFFTKQAATLDRRIGPNFKVPPAALQTFISVSIVAFIPVYDRLFVPLARRYTGRPTGITMLQRVGAGLSLSLVAVVLSALVEMKRLAVARDAGLLDAPKASHLPMTLWWMVPQYVLIGVSDVFAMIGLQEFFYDQVPDAVRSLGLALFLSIFGVGHLLSSFLISVIDRATARRGASWFSNNLNRAHLDYFYWLLAGLCVVELVAFFFFSRAYVYKKKSDDGDYRGGDADATLV

SEQ ID NO: 68199 - protein, 499 aa, Triticum aestivum
  peptide (1)..(499): Ceres Seq. ID no. 12613728
  misc_feature (62)..(418): Pfam Name: POT family Pfam Description: POT family
  misc_feature (1)..(229): Homolog of NCBI NO: 28416707 NR Description: At1g22550 [Arabidopsis thaliana]
  misc_feature (1)..(216): Homolog of NCBI NO: 18086410 NR Description: At1g72120/F28P5_2 [Arabidopsis thaliana]
  misc_feature (222)..(482): Homolog of NCBI NO: 18086410 NR Description: At1g72120/F28P5_2 [Arabidopsis thaliana]
  misc_feature (223)..(482): Homolog of NCBI NO: 15219905 NR Description: peptide transporter, putative; protein id:
  misc_feature (1)..(229): Homolog of NCBI NO: 15219905 NR Description: peptide transporter, putative; protein id:
  misc_feature (237)..(482): Homolog of NCBI NO: 30687920 NR Description: oligopeptide transporter -related [Arabidopsis
  misc_feature (1)..(215): Homolog of NCBI NO: 30687920 NR Description: oligopeptide transporter -related [Arabidopsis
  misc_feature (1)..(85): Homolog of NCBI NO: 34908688 NR Description: P0039A07.25 [Oryza sativa (japonica
  misc_feature (90)..(483): Homolog of NCBI NO: 34908688 NR Description: P0039A07.25 [Oryza sativa (japonica
  misc_feature (1)..(499): Homolog of NCBI NO: 34908690 NR Description: P0039A07.26 [Oryza sativa (japonica
MAMEIAERFAYKGVAANLITYLTGPLGQPMARAAASIDAWKGVSQMLPLPVACVADAWLGRYRAIVLASILFVVSMGTLSLSSAFHIFRSGGHVAVFYVALYLVALGEGAHKPCAQAFAADQFDEKDPKENVARSSFFNWWYFGMCAGTAVTTMVSSYVQDNVGWGLGFGIPCIVILVSLAVFLIGTPSYRYYTTKEPSPVARVGKALLVLIKSWRSKHRTNPASGKVEAHKNSDEDLVEEVSSVFRLLPIWASCIIYAIIFSQTSTFFTKQAATLDRRIGPNFKVPPAALQTFISVSIVAFIPVYDRLFVPLARRYTGRPTGITMLQRVGAGLSLSLVAVVLSALVEMKRLAVARDAGLLDAPKASHLPMTLWWMVPQYVLIGVSDVFAMIGLQEFFYDQVPDAVRSLGLALFLSIFGVGHLLSSFLISVIDRATARRGASWFSNNLNRAHLDYFYWLLAGLCVVELVAFFFFSRAYVYKKKSDDGDYRGGDADATLV

SEQ ID NO: 68200 - DNA, 734 bp, Triticum aestivum
  misc_feature (1)..(734): Ceres Seq. ID no. 13595953
tctattcactccgtcgctcggcgccctagagcaagaacatggcgatcgcgatctcgcaggaggccttcgatgacatggtccgggagaacatggaggacctcggaatggaccccgacgaggccctcgccgacgccgtcgacgccctcaccctccagggcgccaacctctccgggatcatcaggcgcgtgcctggggacgccgtggcggaggaggtgaacccggtgatgcgggtgctggacgaactgaaggcctctgccagtggtaggtcgggggaggatcttgacaggctggtctctttgctcgacgagttgctcgagctgtgctccggcgagggggcggagaatgcggccgtggcggcacggaacggtggcgtggaggcgctcgtcgccctgtgcgcttcggctggggttatgcaggaggggctgcttgcttcgggcttgaaggcgctgagctccctgatccgtgatgttgggagcactgaaaagttcaggcaaagccaagggcccaaaattgtcatggatatcttgaaaggagccctggaaaattcagatatactcgatggtggttttagtgtcatggcagcggcatctgctggcaatgaagttgtgaaagacgcctttatggacttgaaggtcgatgaactcattctggaggttatgaggaacaaatnnnntagtaaantgcaaagcgtgtatgatgccatacgtgttctgttgacacccgatgataaccga

SEQ ID NO: 68201 - protein, 232 aa, Triticum aestivum
  peptide (1)..(232): Ceres Seq. ID no. 13595954
  misc_feature (1)..(231): Homolog of NCBI NO: 19922518 NR Description: CG5721-PA [Drosophila melanogaster]
  misc_feature (5)..(231): Homolog of NCBI NO: 15529984 NR Description: hypothetical gene MGC19595 [Homo sapiens]
  misc_feature (1)..(231): Homolog of NCBI NO: 4106984 NR Description: R30923_1 [Homo sapiens]
  misc_feature (5)..(231): Homolog of NCBI NO: 26348633 NR Description: unnamed protein product [Mus musculus]
  misc_feature (5)..(231): Homolog of NCBI NO: 29789345 NR Description: arginine/serine-rich 14 splicing factor [Mus
  misc_feature (5)..(231): Homolog of NCBI NO: 26340074 NR Description: unnamed protein product [Mus musculus]
  misc_feature (5)..(231): Homolog of NCBI NO: 34877647 NR Description: similar to hypothetical gene MGC19595 [Rattus
  misc_feature (5)..(231): Homolog of NCBI NO: 12846520 NR Description: unnamed protein product [Mus musculus]
  misc_feature (40)..(231): Homolog of NCBI NO: 7485612 NR Description: hypothetical protein F17I5.130 - Arabidopsis
  misc_feature (5)..(231): Homolog of NCBI NO: 18418335 NR Description: expressed protein [Arabidopsis thaliana]
  misc_feature (211)..(211): Xaa is any aa, unknown or other
  misc_feature (212)..(212): Xaa is any aa, unknown or other
  misc_feature (215)..(215): Xaa is any aa, unknown or other
MAIAISQEAFDDMVRENMEDLGMDPDEALADAVDALTLQGANLSGIIRRVPGDAVAEEVNPVMRVLDELKASASGRSGEDLDRLVSLLDELLELCSGEGAENAAVAARNGGVEALVALCASAGVMQEGLLASGLKALSSLIRDVGSTEKFRQSQGPKIVMDILKGALENSDILDGGFSVMAAASAGNEVVKDAFMDLKVDELILEVMRNKXXSKXQSVYDAIRVLLTPDDNR

SEQ ID NO: 68202 - protein, 220 aa, Triticum aestivum
  peptide (1)..(220): Ceres Seq. ID no. 13595955
  misc_feature (1)..(219): Homolog of NCBI NO: 19922518 NR Description: CG5721-PA [Drosophila melanogaster]
  misc_feature (1)..(219): Homolog of NCBI NO: 15529984 NR Description: hypothetical gene MGC19595 [Homo sapiens]
  misc_feature (1)..(219): Homolog of NCBI NO: 4106984 NR Description: R30923_1 [Homo sapiens]
  misc_feature (1)..(219): Homolog of NCBI NO: 26348633 NR Description: unnamed protein product [Mus musculus]
  misc_feature (1)..(219): Homolog of NCBI NO: 29789345 NR Description: arginine/serine-rich 14 splicing factor [Mus
  misc_feature (1)..(219): Homolog of NCBI NO: 26340074 NR Description: unnamed protein product [Mus musculus]
  misc_feature (1)..(219): Homolog of NCBI NO: 34877647 NR Description: similar to hypothetical gene MGC19595 [Rattus
  misc_feature (1)..(219): Homolog of NCBI NO: 12846520 NR Description: unnamed protein product [Mus musculus]
  misc_feature (28)..(219): Homolog of NCBI NO: 7485612 NR Description: hypothetical protein F17I5.130 - Arabidopsis
  misc_feature (1)..(219): Homolog of NCBI NO: 18418335 NR Description: expressed protein [Arabidopsis thaliana]
  misc_feature (199)..(199): Xaa is any aa, unknown or other
  misc_feature (200)..(200): Xaa is any aa, unknown or other
  misc_feature (203)..(203): Xaa is any aa, unknown or other
MVRENMEDLGMDPDEALADAVDALTLQGANLSGIIRRVPGDAVAEEVNPVMRVLDELKASASGRSGEDLDRLVSLLDELLELCSGEGAENAAVAARNGGVEALVALCASAGVMQEGLLASGLKALSSLIRDVGSTEKFRQSQGPKIVMDILKGALENSDILDGGFSVMAAASAGNEVVKDAFMDLKVDELILEVMRNKXXSKXQSVYDAIRVLLTPDDNR

SEQ ID NO: 68203 - protein, 215 aa, Triticum aestivum
  peptide (1)..(215): Ceres Seq. ID no. 13595956
  misc_feature (1)..(214): Homolog of NCBI NO: 19922518 NR Description: CG5721-PA [Drosophila melanogaster]
  misc_feature (1)..(214): Homolog of NCBI NO: 15529984 NR Description: hypothetical gene MGC19595 [Homo sapiens]
  misc_feature (1)..(214): Homolog of NCBI NO: 4106984 NR Description: R30923_1 [Homo sapiens]
  misc_feature (1)..(214): Homolog of NCBI NO: 26348633 NR Description: unnamed protein product [Mus musculus]
  misc_feature (1)..(214): Homolog of NCBI NO: 29789345 NR Description: arginine/serine-rich 14 splicing factor [Mus
  misc_feature (1)..(214): Homolog of NCBI NO: 26340074 NR Description: unnamed protein product [Mus musculus]
  misc_feature (1)..(214): Homolog of NCBI NO: 34877647 NR Description: similar to hypothetical gene MGC19595 [Rattus
  misc_feature (1)..(214): Homolog of NCBI NO: 12846520 NR Description: unnamed protein product [Mus musculus]
  misc_feature (23)..(214): Homolog of NCBI NO: 7485612 NR Description: hypothetical protein F17I5.130 - Arabidopsis
  misc_feature (1)..(214): Homolog of NCBI NO: 18418335 NR Description: expressed protein [Arabidopsis thaliana]
  misc_feature (194)..(194): Xaa is any aa, unknown or other
  misc_feature (195)..(195): Xaa is any aa, unknown or other
  misc_feature (198)..(198): Xaa is any aa, unknown or other
MEDLGMDPDEALADAVDALTLQGANLSGIIRRVPGDAVAEEVNPVMRVLDELKASASGRSGEDLDRLVSLLDELLELCSGEGAENAAVAARNGGVEALVALCASAGVMQEGLLASGLKALSSLIRDVGSTEKFRQSQGPKIVMDILKGALENSDILDGGFSVMAAASAGNEVVKDAFMDLKVDELILEVMRNKXXSKXQSVYDAIRVLLTPDDNR

SEQ ID NO: 68204 - DNA, 1246 bp, Triticum aestivum
  misc_feature (1)..(1246): Ceres Seq. ID no. 13596350
agaacatcctaatcgaaaaacgagaagccacagggaggcgaaccgaaagcaaaaccgcaggactagcaggagagacagagatcccccgaaccctaaccctaccagcacctcccgtcgccggttgagatggcgatggacgcggagcggaggcaggcggagctgatcgagcagttctcggcgcaggcggcggcgctctcctcggctcctcagctggcggcgctcgtgctcgaggccacctcccacccggcgctctttgccttctccgagctcctcacccttccagccctctccaagctaacgggcacgcagtacgcctcgtcgctggacctgctccgcctcttcgcctacggcaccctcaaggactacaagagtaattctagcgccctccctgcattgttgcctgatcaagcccggaagctgaagcaactcagcgtgctaactttggctgagtcaaccaaggtacttccatatgatcagctcatgcaagagctagacgtttccaatgtgagagaacttgaagatttcctcatcaacgagtgcatgtactcaggtattgtcagaggcaagttggaccaactgcggcggtgctttgaagtacaatttgcagctggaagggacctcacacctgatcagctaaccaacatgattgagaccttgtctgactggttgggaacatcagataatttattacaccacattcaggagaaaatcaagtgggctgatacaacaagtgaattgaacaagaagcaccagaaagaatttgaagacagagtggaagaagccaagaagtcagtcaaggcagacaatgacttacgggggcatgacgactttctctctgaatctggaggaataatggattttgaggaggaccgcatccgaccaaaaaggaggcgacaaccaatggcgtagtttgactgaagtatcacacctatggtccctgctcgcagaagtgccgatgctgttcttgagacattttgtcaccggagtttaggagcatcaattagggtgcttcccatgaagcgagtctctgttgagaaaacgcttgtttttggtatgagatgttacaaagagatgatttactgccgtatttatttagtagcacgaagggcatatgggtgacttcgcactgtaaagattatggttctgaaaagtttggtgacctaaggtgttcgccaaaaaaaaaaaaaaaaaagcttatcgataccgtcgactgtttaaacacaataaagtgggaactggagggggg

SEQ ID NO: 68205 - protein, 260 aa, Triticum aestivum
  peptide (1)..(260): Ceres Seq. ID no. 13596351
  misc_feature (66)..(159): Pfam Name: PCI domain Pfam Description: PCI domain
  misc_feature (14)..(224): Homolog of NCBI NO: 7242142 NR Description: COP9 (constitutive photomorphogenic) homolog,
  misc_feature (14)..(224): Homolog of NCBI NO: 34858454 NR Description: similar to COP9 complex subunit 7a
  misc_feature (6)..(225): Homolog of NCBI NO: 3309176 NR Description: COP9 complex subunit 7b [Mus musculus]
  misc_feature (6)..(225): Homolog of NCBI NO: 27764886 NR Description: COP9 (constitutive photomorphogenic) homolog,
  misc_feature (6)..(225): Homolog of NCBI NO: 34877558 NR Description: similar to Cops7b protein [Rattus norvegicus]
  misc_feature (6)..(225): Homolog of NCBI NO: 15215085 NR Description: Cops7b protein [Mus musculus]
  misc_feature (6)..(225): Homolog of NCBI NO: 12232385 NR Description: COP9 constitutive photomorphogenic homolog
  misc_feature (1)..(260): Homolog of NCBI NO: 37589772 NR Description: Unknown (protein for IMAGE:4786730) [Danio rerio]
  misc_feature (3)..(223): Homolog of NCBI NO: 30678240 NR Description: COP9 complex subunit, FUS5 [Arabidopsis thaliana]
  misc_feature (3)..(259): Homolog of NCBI NO: 18378920 NR Description: COP9 complex subunit, FUS5 [Arabidopsis thaliana]
MAMDAERRQAELIEQFSAQAAALSSAPQLAALVLEATSHPALFAFSELLTLPALSKLTGTQYASSLDLLRLFAYGTLKDYKSNSSALPALLPDQARKLKQLSVLTLAESTKVLPYDQLMQELDVSNVRELEDFLINECMYSGIVRGKLDQLRRCFEVQFAAGRDLTPDQLTNMIETLSDWLGTSDNLLHHIQEKIKWADTTSELNKKHQKEFEDRVEEAKKSVKADNDLRGHDDFLSESGGIMDFEEDRIRPKRRRQPMA

SEQ ID NO: 68206 - protein, 258 aa, Triticum aestivum
  peptide (1)..(258): Ceres Seq. ID no. 13596352
  misc_feature (64)..(157): Pfam Name: PCI domain Pfam Description: PCI domain
  misc_feature (12)..(222): Homolog of NCBI NO: 7242142 NR Description: COP9 (constitutive photomorphogenic) homolog,
  misc_feature (12)..(222): Homolog of NCBI NO: 34858454 NR Description: similar to COP9 complex subunit 7a
  misc_feature (4)..(223): Homolog of NCBI NO: 3309176 NR Description: COP9 complex subunit 7b [Mus musculus]
  misc_feature (4)..(223): Homolog of NCBI NO: 27764886 NR Description: COP9 (constitutive photomorphogenic) homolog,
  misc_feature (4)..(223): Homolog of NCBI NO: 34877558 NR Description: similar to Cops7b protein [Rattus norvegicus]
  misc_feature (4)..(223): Homolog of NCBI NO: 15215085 NR Description: Cops7b protein [Mus musculus]
  misc_feature (4)..(223): Homolog of NCBI NO: 12232385 NR Description: COP9 constitutive photomorphogenic homolog
  misc_feature (1)..(258): Homolog of NCBI NO: 37589772 NR Description: Unknown (protein for IMAGE:4786730) [Danio rerio]
  misc_feature (1)..(221): Homolog of NCBI NO: 30678240 NR Description: COP9 complex subunit, FUS5 [Arabidopsis thaliana]
  misc_feature (1)..(257): Homolog of NCBI NO: 18378920 NR Description: COP9 complex subunit, FUS5 [Arabidopsis thaliana]
MDAERRQAELIEQFSAQAAALSSAPQLAALVLEATSHPALFAFSELLTLPALSKLTGTQYASSLDLLRLFAYGTLKDYKSNSSALPALLPDQARKLKQLSVLTLAESTKVLPYDQLMQELDVSNVRELEDFLINECMYSGIVRGKLDQLRRCFEVQFAAGRDLTPDQLTNMIETLSDWLGTSDNLLHHIQEKIKWADTTSELNKKHQKEFEDRVEEAKKSVKADNDLRGHDDFLSESGGIMDFEEDRIRPKRRRQPMA

SEQ ID NO: 68207 - protein, 142 aa, Triticum aestivum
  peptide (1)..(142): Ceres Seq. ID no. 13596353
  misc_feature (1)..(106): Homolog of NCBI NO: 7242142 NR Description: COP9 (constitutive photomorphogenic) homolog,
  misc_feature (1)..(106): Homolog of NCBI NO: 34858454 NR Description: similar to COP9 complex subunit 7a
  misc_feature (1)..(107): Homolog of NCBI NO: 3309176 NR Description: COP9 complex subunit 7b [Mus musculus]
  misc_feature (1)..(107): Homolog of NCBI NO: 27764886 NR Description: COP9 (constitutive photomorphogenic) homolog,
  misc_feature (1)..(107): Homolog of NCBI NO: 34877558 NR Description: similar to Cops7b protein [Rattus norvegicus]
  misc_feature (1)..(107): Homolog of NCBI NO: 15215085 NR Description: Cops7b protein [Mus musculus]
  misc_feature (1)..(107): Homolog of NCBI NO: 12232385 NR Description: COP9 constitutive photomorphogenic homolog
  misc_feature (1)..(142): Homolog of NCBI NO: 37589772 NR Description: Unknown (protein for IMAGE:4786730) [Danio rerio]
  misc_feature (1)..(105): Homolog of NCBI NO: 30678240 NR Description: COP9 complex subunit, FUS5 [Arabidopsis thaliana]
  misc_feature (1)..(141): Homolog of NCBI NO: 18378920 NR Description: COP9 complex subunit, FUS5 [Arabidopsis thaliana]
MQELDVSNVRELEDFLINECMYSGIVRGKLDQLRRCFEVQFAAGRDLTPDQLTNMIETLSDWLGTSDNLLHHIQEKIKWADTTSELNKKHQKEFEDRVEEAKKSVKADNDLRGHDDFLSESGGIMDFEEDRIRPKRRRQPMA

SEQ ID NO: 68208 - DNA, 1591 bp, Triticum aestivum
  misc_feature (1)..(1591): Ceres Seq. ID no. 13590671
ccttctcttgttggcgtcgcctccatccggctcggcttcttccacccgtacccgtagattgatttccatccgggtcccttccgttccacggcaagtatccgtcgcacgattcaggtcccccccctcgccgtcgtccatggcgctgcagtacgtggaggcgcagcggcaggcgcggccggacctcgccgactggtacgccgacctcgccgacctctaccagcgcaagctctggcaccagctcaccctcaagctcgaccaattcctccagatcccggccgcacagactggcgacacgctcatacagctctacaacaacttcatctccgatttcgaaacaaagatcaatttgctcaaacttgcccagtttgccgtcatagcctcgcgccaatatcccgacaaggatgccgccatcgccttcctcgaggggataatcgccaagcttcgcgaaaccagggagctgcggatcaatgagcctatccttcatgtcaagatgcagattgcggcaattcacctcgacaaagggaaccacaaggagtgcaagaacctgctggaggaagggaagaccaccctggatggcatgactgatgtggatcctacggtccacgctagcttctactggatatcgtctcagtaccataagtcgctccaagagtttgctgagttctataagaacgcgcttctctatctggcctacacaaccgtagggtctctctcagggtcattcaagctggacttggcatttgacctttcccttgcagccttgctgggggacaacatctacaacttcggggaattgttagctcaccctattatcaatagtcttattgggaccaaggtggagtgggtctatcacatgttacaagcgttcaacaccggcaacctagctctctaccaagagctttgtggggttcacaatgctgctcttagtgcacagcctgcattggtgcagaatgaacagaaactgcttgagaagatcaatattctgtgtctgatggagataatcttcagccggccatcagaagatagaactatcccattaagtgttattgccaagcagactaagctttcaaccagcgaagtggaatgtcttcttatgaagagcctctcggttcatctcatagaaggaatcatcgatgaagtcgacagcacggttcatgtttcgtgggtccagcctagagtacttggcatcccacaggtgaaggcgttgcgtgagcgcctggactcgtgggtcggcaaagtgcataccacactgttgtccatcgaggcagagacccccgatctcgtggcggcttagcttgttggccaaaaatgattctgaataggctttggttgtcagcaaggcggcggtgtaaaacgagagaccatctggctgtgctgcgcgtgctagctgctcttttcttgataacgaaaacttgttgccttgggtgtcctattggtctggacttgtaacttccttctatcatcacggatcgaaacagagaaatcataccggcagagggtgtcactagttttttcctgttgaactttataatctgtaatccagcggtttgacattttttcttcttccattgtgctatggacatggactcgc

SEQ ID NO: 68209 - protein, 430 aa, Triticum aestivum
  peptide (1)..(430): Ceres Seq. ID no. 13590672
  misc_feature (280)..(388): Pfam Name: PCI domain Pfam Description: PCI domain
  misc_feature (52)..(428): Homolog of NCBI NO: 3618343 NR Description: 26S proteasome subunit p40.5 [Homo sapiens]
  misc_feature (48)..(428): Homolog of NCBI NO: 3746882 NR Description: 26S proteasome subunit 11 [Homo sapiens]
  misc_feature (48)..(428): Homolog of NCBI NO: 32880133 NR Description: proteasome (prosome, macropain) 26S subunit,
  misc_feature (48)..(428): Homolog of NCBI NO: 28872728 NR Description: proteasome 26S non-ATPase subunit 13 isoform 1
  misc_feature (52)..(428): Homolog of NCBI NO: 29612578 NR Description: Similar to proteasome (prosome, macropain) 26S
  misc_feature (47)..(369): Homolog of NCBI NO: 9758666 NR Description: 26S proteasome subunit-like protein [Arabidopsis
  misc_feature (150)..(430): Homolog of NCBI NO: 17298163 NR Description: 26S proteasome regulatory particle non-ATPase
  misc_feature (47)..(430): Homolog of NCBI NO: 22327608 NR Description: 26S proteasome regulatory subunit (RPN9),
  misc_feature (47)..(430): Homolog of NCBI NO: 30684612 NR Description: 26S proteasome regulatory subunit (RPN9) -related
  misc_feature (46)..(430): Homolog of NCBI NO: 34914614 NR Description: putative 26S proteasome subunit
LLLLASPPSGSASSTRTRRLISIRVPSVPRQVSVARFRSPPSPSSMALQYVEAQRQARPDLADWYADLADLYQRKLWHQLTLKLDQFLQIPAAQTGDTLIQLYNNFISDFETKINLLKLAQFAVIASRQYPDKDAAIAFLEGIIAKLRETRELRINEPILHVKMQIAAIHLDKGNHKECKNLLEEGKTTLDGMTDVDPTVHASFYWISSQYHKSLQEFAEFYKNALLYLAYTTVGSLSGSFKLDLAFDLSLAALLGDNIYNFGELLAHPIINSLIGTKVEWVYHMLQAFNTGNLALYQELCGVHNAALSAQPALVQNEQKLLEKINILCLMEIIFSRPSEDRTIPLSVIAKQTKLSTSEVECLLMKSLSVHLIEGIIDEVDSTVHVSWVQPRVLGIPQVKALRERLDSWVGKVHTTLLSIEAETPDLVAA

SEQ ID NO: 68210 - protein, 385 aa, Triticum aestivum
  peptide (1)..(385): Ceres Seq. ID no. 13590673
  misc_feature (235)..(343): Pfam Name: PCI domain Pfam Description: PCI domain
  misc_feature (7)..(383): Homolog of NCBI NO: 3618343 NR Description: 26S proteasome subunit p40.5 [Homo sapiens]
  misc_feature (3)..(383): Homolog of NCBI NO: 3746882 NR Description: 26S proteasome subunit 11 [Homo sapiens]
  misc_feature (3)..(383): Homolog of NCBI NO: 32880133 NR Description: proteasome (prosome, macropain) 26S subunit,
  misc_feature (3)..(383): Homolog of NCBI NO: 28872728 NR Description: proteasome 26S non-ATPase subunit 13 isoform 1
  misc_feature (7)..(383): Homolog of NCBI NO: 29612578 NR Description: Similar to proteasome (prosome, macropain) 26S
  misc_feature (2)..(324): Homolog of NCBI NO: 9758666 NR Description: 26S proteasome subunit-like protein [Arabidopsis
  misc_feature (105)..(385): Homolog of NCBI NO: 17298163 NR Description: 26S proteasome regulatory particle non-ATPase
  misc_feature (2)..(385): Homolog of NCBI NO: 22327608 NR Description: 26S proteasome regulatory subunit (RPN9),
  misc_feature (2)..(385): Homolog of NCBI NO: 30684612 NR Description: 26S proteasome regulatory subunit (RPN9) -related
  misc_feature (1)..(385): Homolog of NCBI NO: 34914614 NR Description: putative 26S proteasome subunit
MALQYVEAQRQARPDLADWYADLADLYQRKLWHQLTLKLDQFLQIPAAQTGDTLIQLYNNFISDFETKINLLKLAQFAVIASRQYPDKDAAIAFLEGIIAKLRETRELRINEPILHVKMQIAAIHLDKGNHKECKNLLEEGKTTLDGMTDVDPTVHASFYWISSQYHKSLQEFAEFYKNALLYLAYTTVGSLSGSFKLDLAFDLSLAALLGDNIYNFGELLAHPIINSLIGTKVEWVYHMLQAFNTGNLALYQELCGVHNAALSAQPALVQNEQKLLEKINILCLMEIIFSRPSEDRTIPLSVIAKQTKLSTSEVECLLMKSLSVHLIEGIIDEVDSTVHVSWVQPRVLGIPQVKALRERLDSWVGKVHTTLLSIEAETPDLVAA

SEQ ID NO: 68211 - protein, 267 aa, Triticum aestivum
  peptide (1)..(267): Ceres Seq. ID no. 13590674
  misc_feature (117)..(225): Pfam Name: PCI domain Pfam Description: PCI domain
  misc_feature (1)..(265): Homolog of NCBI NO: 3618343 NR Description: 26S proteasome subunit p40.5 [Homo sapiens]
  misc_feature (1)..(265): Homolog of NCBI NO: 3746882 NR Description: 26S proteasome subunit 11 [Homo sapiens]
  misc_feature (1)..(265): Homolog of NCBI NO: 32880133 NR Description: proteasome (prosome, macropain) 26S subunit,
  misc_feature (1)..(265): Homolog of NCBI NO: 28872728 NR Description: proteasome 26S non-ATPase subunit 13 isoform 1
  misc_feature (1)..(265): Homolog of NCBI NO: 29612578 NR Description: Similar to proteasome (prosome, macropain) 26S
  misc_feature (1)..(206): Homolog of NCBI NO: 9758666 NR Description: 26S proteasome subunit-like protein [Arabidopsis
  misc_feature (1)..(267): Homolog of NCBI NO: 17298163 NR Description: 26S proteasome regulatory particle non-ATPase
  misc_feature (1)..(267): Homolog of NCBI NO: 22327608 NR Description: 26S proteasome regulatory subunit (RPN9),
  misc_feature (1)..(267): Homolog of NCBI NO: 30684612 NR Description: 26S proteasome regulatory subunit (RPN9) -related
  misc_feature (1)..(267): Homolog of NCBI NO: 34914614 NR Description: putative 26S proteasome subunit
MQIAAIHLDKGNHKECKNLLEEGKTTLDGMTDVDPTVHASFYWISSQYHKSLQEFAEFYKNALLYLAYTTVGSLSGSFKLDLAFDLSLAALLGDNIYNFGELLAHPIINSLIGTKVEWVYHMLQAFNTGNLALYQELCGVHNAALSAQPALVQNEQKLLEKINILCLMEIIFSRPSEDRTIPLSVIAKQTKLSTSEVECLLMKSLSVHLIEGIIDEVDSTVHVSWVQPRVLGIPQVKALRERLDSWVGKVHTTLLSIEAETPDLVAA

SEQ ID NO: 68212 - DNA, 1564 bp, Triticum aestivum
  misc_feature (1)..(1564): Ceres Seq. ID no. 13596004
aaaaacaaacaaaaggcggacccaactccccctcctccaccttccccggagcgcaaatctcccctcccaatccccacccccgtcggtagccgatcgcgtcgacgatgctgggcgccgcgaggagatccggatgcgtgctggggcaactgatgcagaccctccgcccggcggcgtcggcggccacggcggcgaggagctactccgcgaccccgaaggagatgactgtgcgtgaagcattgaattccgcccttgacgaggagatgtctgccgacccttctgttttcttaatgggagaagaggttggagagtaccaaggtgcgtacaagataacaaagggtttgctggacaagtatggtcctgatagggttctcgatacaccaatcacagaggctggttttactggcattggcgttggtgctgcctaccaaggtcttagacctgtagtagagttcatgacatttaacttctcgatgcaggcaattgatcacatcatcaattcagctgccaaatcaaactacatgtcagctggtcagatatccgttcctattgtttttcgaggaccaaatggggcagctgctggagttggtgctcaacactcgcagtgctatgcagcatggtatgcccatgttccaggattgaaggtcctaactccttattctgcagaagatgctcgtggcttgctaaaagcagcaatcagggatccagaccctgtagttttcctggaaaatgaactactctatggtgaatcgtttcctattaaggctgaagtacttgattctagcttcagtgtcccaatcggcaaagctaagatagaacgggaaggaaaagatgttacaattactgcattctctaagatggttgggtatgctcttcaggcggcagagatactgtccaaggagggaatcagtgctgaggtgatcaaccttcggtcaattagaccattggatagagctgctatcaatgcatccgttaggaaaaccaacagattggtaaccgtcgaagaaggctttccacaacatggtgttggtgctgaaatatgcatgtccgtagtggaggacagctttgagtatcttgatgcaccagttgagaggattgccggagctgatgtacctatgccctatgcggcaaaccttgaaagattggcagttccacaggttgaggacatcgtccgtgctgcaaagcgagcttgctacagatcatcatgaatggcggcaaccgcctaagcacaaatgcacgttttgtttatcggccttcttctttgttccttgtccagaaaagatgtactgaatcgcataattgtatcccccaactcttgtgagctaattttgtagatctgcatgcattgttgattccaatctgtcggcggcagtcggatgactgcattcagttcatggttcatcctgaggcgtttgaatcgtgcaacttctggaggtttacatcactgagggatgtctcaataacatgtatgtaactgaattacagacgttcacatgattttgctgtggcttaggccgatctgtaagtgtgatcaatatcgcggagaaaactggaacattgaaatgct

SEQ ID NO: 68213 - protein, 366 aa, Triticum aestivum
  peptide (1)..(366): Ceres Seq. ID no. 13596005
  misc_feature (232)..(354): Pfam Name: Transketolase, C-terminal domain Pfam Description: Transketolase, C-terminal domain
  misc_feature (15)..(357): Homolog of NCBI NO: 25012844 NR Description: RH05604p [Drosophila melanogaster]
  misc_feature (15)..(357): Homolog of NCBI NO: 21358145 NR Description: CG11876-PD [Drosophila melanogaster]
  misc_feature (39)..(365): Homolog of NCBI NO: 22968973 NR Description: hypothetical protein [Rhodospirillum rubrum]
  misc_feature (11)..(366): Homolog of NCBI NO: 1709454 NR Description: Pyruvate dehydrogenase E1 component beta subunit,
  misc_feature (1)..(365): Homolog of NCBI NO: 520478 NR Description: pyruvate dehydrogenase E1 beta subunit
  misc_feature (1)..(365): Homolog of NCBI NO: 15241286 NR Description: pyruvate dehydrogenase E1 component beta subunit,
  misc_feature (1)..(366): Homolog of NCBI NO: 3851001 NR Description: pyruvate dehydrogenase E1 beta subunit isoform 2
  misc_feature (1)..(366): Homolog of NCBI NO: 3850999 NR Description: pyruvate dehydrogenase E1 beta subunit isoform 1
  misc_feature (1)..(366): Homolog of NCBI NO: 3851003 NR Description: pyruvate dehydrogenase E1 beta subunit isoform 3
  misc_feature (1)..(366): Homolog of NCBI NO: 38175533 NR Description: putative pyruvate dehydrogenase E1 beta subunit
MLGAARRSGCVLGQLMQTLRPAASAATAARSYSATPKEMTVREALNSALDEEMSADPSVFLMGEEVGEYQGAYKITKGLLDKYGPDRVLDTPITEAGFTGIGVGAAYQGLRPVVEFMTFNFSMQAIDHIINSAAKSNYMSAGQISVPIVFRGPNGAAAGVGAQHSQCYAAWYAHVPGLKVLTPYSAEDARGLLKAAIRDPDPVVFLENELLYGESFPIKAEVLDSSFSVPIGKAKIEREGKDVTITAFSKMVGYALQAAEILSKEGISAEVINLRSIRPLDRAAINASVRKTNRLVTVEEGFPQHGVGAEICMSVVEDSFEYLDAPVERIAGADVPMPYAANLERLAVPQVEDIVRAAKRACYRSS

SEQ ID NO: 68214 - protein, 351 aa, Triticum aestivum
  peptide (1)..(351): Ceres Seq. ID no. 13596006
  misc_feature (217)..(339): Pfam Name: Transketolase, C-terminal domain Pfam Description: Transketolase, C-terminal domain
  misc_feature (1)..(342): Homolog of NCBI NO: 25012844 NR Description: RH05604p [Drosophila melanogaster]
  misc_feature (1)..(342): Homolog of NCBI NO: 21358145 NR Description: CG11876-PD [Drosophila melanogaster]
  misc_feature (24)..(350): Homolog of NCBI NO: 22968973 NR Description: hypothetical protein [Rhodospirillum rubrum]
  misc_feature (1)..(351): Homolog of NCBI NO: 1709454 NR Description: Pyruvate dehydrogenase E1 component beta subunit,
  misc_feature (1)..(350): Homolog of NCBI NO: 520478 NR Description: pyruvate dehydrogenase E1 beta subunit
  misc_feature (1)..(350): Homolog of NCBI NO: 15241286 NR Description: pyruvate dehydrogenase E1 component beta subunit,
  misc_feature (1)..(351): Homolog of NCBI NO: 3851001 NR Description: pyruvate dehydrogenase E1 beta subunit isoform 2
  misc_feature (1)..(351): Homolog of NCBI NO: 3850999 NR Description: pyruvate dehydrogenase E1 beta subunit isoform 1
  misc_feature (1)..(351): Homolog of NCBI NO: 3851003 NR Description: pyruvate dehydrogenase E1 beta subunit isoform 3
  misc_feature (1)..(351): Homolog of NCBI NO: 38175533 NR Description: putative pyruvate dehydrogenase E1 beta subunit
MQTLRPAASAATAARSYSATPKEMTVREALNSALDEEMSADPSVFLMGEEVGEYQGAYKITKGLLDKYGPDRVLDTPITEAGFTGIGVGAAYQGLRPVVEFMTFNFSMQAIDHIINSAAKSNYMSAGQISVPIVFRGPNGAAAGVGAQHSQCYAAWYAHVPGLKVLTPYSAEDARGLLKAAIRDPDPVVFLENELLYGESFPIKAEVLDSSFSVPIGKAKIEREGKDVTITAFSKMVGYALQAAEILSKEGISAEVINLRSIRPLDRAAINASVRKTNRLVTVEEGFPQHGVGAEICMSVVEDSFEYLDAPVERIAGADVPMPYAANLERLAVPQVEDIVRAAKRACYRSS

SEQ ID NO: 68215 - protein, 328 aa, Triticum aestivum
  peptide (1)..(328): Ceres Seq. ID no. 13596007
  misc_feature (194)..(316): Pfam Name: Transketolase, C-terminal domain Pfam Description: Transketolase, C-terminal domain
  misc_feature (1)..(319): Homolog of NCBI NO: 25012844 NR Description: RH05604p [Drosophila melanogaster]
  misc_feature (1)..(319): Homolog of NCBI NO: 21358145 NR Description: CG11876-PD [Drosophila melanogaster]
  misc_feature (1)..(327): Homolog of NCBI NO: 22968973 NR Description: hypothetical protein [Rhodospirillum rubrum]
  misc_feature (1)..(328): Homolog of NCBI NO: 1709454 NR Description: Pyruvate dehydrogenase E1 component beta subunit,
  misc_feature (1)..(327): Homolog of NCBI NO: 520478 NR Description: pyruvate dehydrogenase E1 beta subunit
  misc_feature (1)..(327): Homolog of NCBI NO: 15241286 NR Description: pyruvate dehydrogenase E1 component beta subunit,
  misc_feature (1)..(328): Homolog of NCBI NO: 3851001 NR Description: pyruvate dehydrogenase E1 beta subunit isoform 2
  misc_feature (1)..(328): Homolog of NCBI NO: 3850999 NR Description: pyruvate dehydrogenase E1 beta subunit isoform 1
  misc_feature (1)..(328): Homolog of NCBI NO: 3851003 NR Description: pyruvate dehydrogenase E1 beta subunit isoform 3
  misc_feature (1)..(328): Homolog of NCBI NO: 38175533 NR Description: putative pyruvate dehydrogenase E1 beta subunit
MTVREALNSALDEEMSADPSVFLMGEEVGEYQGAYKITKGLLDKYGPDRVLDTPITEAGFTGIGVGAAYQGLRPVVEFMTFNFSMQAIDHIINSAAKSNYMSAGQISVPIVFRGPNGAAAGVGAQHSQCYAAWYAHVPGLKVLTPYSAEDARGLLKAAIRDPDPVVFLENELLYGESFPIKAEVLDSSFSVPIGKAKIEREGKDVTITAFSKMVGYALQAAEILSKEGISAEVINLRSIRPLDRAAINASVRKTNRLVTVEEGFPQHGVGAEICMSVVEDSFEYLDAPVERIAGADVPMPYAANLERLAVPQVEDIVRAAKRACYRSS

SEQ ID NO: 68216 - DNA, 605 bp, Triticum aestivum
  misc_feature (1)..(605): Ceres Seq. ID no. 15224958
aggctttgagtccattttgggaccggttcaggggatagatacagcagcaagtccaacaacggtagtagtaacaaagatggaggagtaccaggggcagcacggtcacgccgtcgacgagtacggcgaccccgtggccgggcacggcaaccctgtggcaccctccgccgccggcgcgttcacgggcgccggcgggcagctccagcacggcagggaggagcacaagaccggcgggatactgcaccgctccggcagctccagctccagctcgtcttctgaggacgacggcatgggcgggaggaggaagaagggcgtcaaggagaagctcccgggtggccacaaagacaaccagcagcacatggccgcgggaactggagctggcggggcttatgggcagcacacggccgcgggaactggggccggcggagactacggccagcatgggcacgcaggaatggccggcgccggcgccggcgagaagaagggactcgtggacaagatcaaggagaagctgcccggacagcactgagctgccggccccggctggctgtccgctgcctactagtcctcttgagctaaggctcgagctgaataaaaacaaattgagg

SEQ ID NO: 68217 - protein, 174 aa, Triticum aestivum
  peptide (1)..(174): Ceres Seq. ID no. 15224959
  misc_feature (35)..(174): Pfam Name: Dehydrin Pfam Description: Dehydrin
  misc_feature (32)..(174): Homolog of NCBI NO: 6017932 NR Description: dehydrin; DHN3 [Hordeum vulgare]
  misc_feature (32)..(174): Homolog of NCBI NO: 4105107 NR Description: dehydrin 3 [Hordeum vulgare]
  misc_feature (26)..(174): Homolog of NCBI NO: 118481 NR Description: DEHYDRIN RAB 16C
  misc_feature (32)..(174): Homolog of NCBI NO: 118487 NR Description: DEHYDRIN DHN3 (B17)
  misc_feature (28)..(174): Homolog of NCBI NO: 1181292 NR Description: dehydrin [Triticum turgidum subsp. durum]
  misc_feature (28)..(174): Homolog of NCBI NO: 231983 NR Description: DEHYDRIN RAB 15
  misc_feature (28)..(174): Homolog of NCBI NO: 2970213 NR Description: dehydrin-/LEA group 2-like protein [Lophopyrum
  misc_feature (28)..(174): Homolog of NCBI NO: 4105117 NR Description: dehydrin 9 [Hordeum vulgare]
  misc_feature (28)..(174): Homolog of NCBI NO: 1181296 NR Description: dehydrin [Triticum turgidum subsp. durum]
  misc_feature (28)..(174): Homolog of NCBI NO: 5052009 NR Description: dehydrin 12 [Hordeum vulgare]
GFESILGPVQGIDTAASPTTVVVTKMEEYQGQHGHAVDEYGDPVAGHGNPVAPSAAGAFTGAGGQLQHGREEHKTGGILHRSGSSSSSSSSEDDGMGGRRKKGVKEKLPGGHKDNQQHMAAGTGAGGAYGQHTAAGTGAGGDYGQHGHAGMAGAGAGEKKGLVDKIKEKLPGQH

SEQ ID NO: 68218 - protein, 149 aa, Triticum aestivum
  peptide (1)..(149): Ceres Seq. ID no. 15224960
  misc_feature (10)..(149): Pfam Name: Dehydrin Pfam Description: Dehydrin
  misc_feature (7)..(149): Homolog of NCBI NO: 6017932 NR Description: dehydrin; DHN3 [Hordeum vulgare]
  misc_feature (7)..(149): Homolog of NCBI NO: 4105107 NR Description: dehydrin 3 [Hordeum vulgare]
  misc_feature (1)..(149): Homolog of NCBI NO: 118481 NR Description: DEHYDRIN RAB 16C
  misc_feature (7)..(149): Homolog of NCBI NO: 118487 NR Description: DEHYDRIN DHN3 (B17)
  misc_feature (3)..(149): Homolog of NCBI NO: 1181292 NR Description: dehydrin [Triticum turgidum subsp. durum]
  misc_feature (3)..(149): Homolog of NCBI NO: 231983 NR Description: DEHYDRIN RAB 15
  misc_feature (3)..(149): Homolog of NCBI NO: 2970213 NR Description: dehydrin-/LEA group 2-like protein [Lophopyrum
  misc_feature (3)..(149): Homolog of NCBI NO: 4105117 NR Description: dehydrin 9 [Hordeum vulgare]
  misc_feature (3)..(149): Homolog of NCBI NO: 1181296 NR Description: dehydrin [Triticum turgidum subsp. durum]
  misc_feature (3)..(149): Homolog of NCBI NO: 5052009 NR Description: dehydrin 12 [Hordeum vulgare]
MEEYQGQHGHAVDEYGDPVAGHGNPVAPSAAGAFTGAGGQLQHGREEHKTGGILHRSGSSSSSSSSEDDGMGGRRKKGVKEKLPGGHKDNQQHMAAGTGAGGAYGQHTAAGTGAGGDYGQHGHAGMAGAGAGEKKGLVDKIKEKLPGQH

SEQ ID NO: 68219 - DNA, 1335 bp, Triticum aestivum
  misc_feature (1)..(1335): Ceres Seq. ID no. 13654187
aaaaaccgcaacccccaccccaccccaccccaccccacccaccacagcaacgagggcaagcgtgcgtcaacatcagacgactcgtcccggattgtgattcgcggaggcgtttcccggcgcccagatgagctcacggatggccggatcggtcctcctccgccgcgccggcgccggcgccagccgcctcttcgccaccaccccgtctccggcggccagggccgtcctcggtggaggtgagggcgcgtgggtgcggctgatgtccacctccgcggcctcgcaggtcaaggacgaggcggccaaggcggtcaaggcggaggcggccaaggcggtcaaggcggaggcggccaagggcgacggggagaagaaggaggtggccatcagcagctactgggggatcgagcagtcgaagaagctggtgcgcgaggacggcaccgagtggaagtggtcttgcttcaggccatgggagacgtacaccgcggacacgtcgatcgatctgaccaagcaccacgtgcccaacacgatgctcgacaagatcgcctactacaccgtcaagtccctgcgcttccccaccgacatcttcttccagaggaggtatggctgccgcgcaatgatgctggagactgttgccgcagtgccggggatggtgggcggcatgctcctccacctgcgctcgctccggcgcttcgagcagagcggcggctggatccgcgcgctgctggaggaggccgagaacgagcgcatgcacctcatgaccttcatggaggtggcgcagcccaggtggtacgagcgcgccctcgtcatcgccgtccagggcgtcttcttcaacgcctacttcttcggctacctcatctcgcccaagttcgcgcaccgcgtcgtcgggtacctcgaggaggaggccgtccactcctacacggagttcctcaaggacctcgacgacggcaagatcgacaacgtccccgccccggccatcgccatcgactactggcgcctccctgccaacgccaccctcaaggacgtggtcaccgtggtgcgcgccgacgaggctcaccaccgcgacgtcaaccacttcgcatcggacgtgtactaccagggtatgcagctgaaggccaccccggccccgatcggataccactgaggctggccgtgttctgctgaattttgcatcgctactattactactactaccaagcaaatgagtgtttcgttttgaaggcagaggaaatgagagctctttagctgtataggatgttgcaattgttgctcgtttggtaactattccgtactgagaaataagcagtgtgcttgtcagttacgtatctaggatattgttgaacc

SEQ ID NO: 68220 - protein, 336 aa, Triticum aestivum
  peptide (1)..(336): Ceres Seq. ID no. 13654188
  misc_feature (75)..(334): Pfam Name: Alternative oxidase Pfam Description: Alternative oxidase
  misc_feature (53)..(336): Homolog of NCBI NO: 15228734 NR Description: alternative oxidase 1a, mitochondrial (AOX1A)
  misc_feature (53)..(336): Homolog of NCBI NO: 11278947 NR Description: alternative respiratory pathway oxidase (EC
  misc_feature (53)..(336): Homolog of NCBI NO: 421824 NR Description: alternative respiratory pathway oxidase (EC
  misc_feature (1)..(336): Homolog of NCBI NO: 16902306 NR Description: alternative oxidase 1c [Oryza sativa (japonica
  misc_feature (1)..(336): Homolog of NCBI NO: 25989197 NR Description: alternative oxidase AOX1 precursor [Zea mays]
  misc_feature (1)..(336): Homolog of NCBI NO: 19912727 NR Description: alternative oxidase [Triticum aestivum]
  misc_feature (75)..(336): Homolog of NCBI NO: 5802557 NR Description: alternative oxidase [Triticum aestivum]
  misc_feature (1)..(336): Homolog of NCBI NO: 25989199 NR Description: alternative oxidase AOX2 precursor [Zea mays]
  misc_feature (1)..(336): Homolog of NCBI NO: 3218544 NR Description: alternative oxidase [Oryza sativa (japonica
  misc_feature (1)..(336): Homolog of NCBI NO: 19912725 NR Description: alternative oxidase [Triticum aestivum]
MSSRMAGSVLLRRAGAGASRLFATTPSPAARAVLGGGEGAWVRLMSTSAASQVKDEAAKAVKAEAAKAVKAEAAKGDGEKKEVAISSYWGIEQSKKLVREDGTEWKWSCFRPWETYTADTSIDLTKHHVPNTMLDKIAYYTVKSLRFPTDIFFQRRYGCRAMMLETVAAVPGMVGGMLLHLRSLRRFEQSGGWIRALLEEAENERMHLMTFMEVAQPRWYERALVIAVQGVFFNAYFFGYLISPKFAHRVVGYLEEEAVHSYTEFLKDLDDGKIDNVPAPAIAIDYWRLPANATLKDVVTVVRADEAHHRDVNHFASDVYYQGMQLKATPAPIGYH

SEQ ID NO: 68221 - protein, 332 aa, Triticum aestivum
  peptide (1)..(332): Ceres Seq. ID no. 13654189
  misc_feature (71)..(330): Pfam Name: Alternative oxidase Pfam Description: Alternative oxidase
  misc_feature (49)..(332): Homolog of NCBI NO: 1872517 NR Description: alternative oxidase [Arabidopsis thaliana]
  misc_feature (49)..(332): Homolog of NCBI NO: 15228734 NR Description: alternative oxidase 1a, mitochondrial (AOX1A)
  misc_feature (49)..(332): Homolog of NCBI NO: 421824 NR Description: alternative respiratory pathway oxidase (EC
  misc_feature (1)..(332): Homolog of NCBI NO: 16902306 NR Description: alternative oxidase 1c [Oryza sativa (japonica
  misc_feature (1)..(332): Homolog of NCBI NO: 25989197 NR Description: alternative oxidase AOX1 precursor [Zea mays]
  misc_feature (1)..(332): Homolog of NCBI NO: 19912727 NR Description: alternative oxidase [Triticum aestivum]
  misc_feature (71)..(332): Homolog of NCBI NO: 5802557 NR Description: alternative oxidase [Triticum aestivum]
  misc_feature (1)..(332): Homolog of NCBI NO: 25989199 NR Description: alternative oxidase AOX2 precursor [Zea mays]
  misc_feature (1)..(332): Homolog of NCBI NO: 3218544 NR Description: alternative oxidase [Oryza sativa (japonica
  misc_feature (1)..(332): Homolog of NCBI NO: 19912725 NR Description: alternative oxidase [Triticum aestivum]
MAGSVLLRRAGAGASRLFATTPSPAARAVLGGGEGAWVRLMSTSAASQVKDEAAKAVKAEAAKAVKAEAAKGDGEKKEVAISSYWGIEQSKKLVREDGTEWKWSCFRPWETYTADTSIDLTKHHVPNTMLDKIAYYTVKSLRFPTDIFFQRRYGCRAMMLETVAAVPGMVGGMLLHLRSLRRFEQSGGWIRALLEEAENERMHLMTFMEVAQPRWYERALVIAVQGVFFNAYFFGYLISPKFAHRVVGYLEEEAVHSYTEFLKDLDDGKIDNVPAPAIAIDYWRLPANATLKDVVTVVRADEAHHRDVNHFASDVYYQGMQLKATPAPIGYH

SEQ ID NO: 68222 - protein, 292 aa, Triticum aestivum
  peptide (1)..(292): Ceres Seq. ID no. 13654190
  misc_feature (31)..(290): Pfam Name: Alternative oxidase Pfam Description: Alternative oxidase
  misc_feature (9)..(292): Homolog of NCBI NO: 1872517 NR Description: alternative oxidase [Arabidopsis thaliana]
  misc_feature (9)..(292): Homolog of NCBI NO: 11278947 NR Description: alternative respiratory pathway oxidase (EC
  misc_feature (9)..(292): Homolog of NCBI NO: 421824 NR Description: alternative respiratory pathway oxidase (EC
  misc_feature (1)..(292): Homolog of NCBI NO: 16902306 NR Description: alternative oxidase 1c [Oryza sativa (japonica
  misc_feature (1)..(292): Homolog of NCBI NO: 25989197 NR Description: alternative oxidase AOX1 precursor [Zea mays]
  misc_feature (1)..(292): Homolog of NCBI NO: 19912727 NR Description: alternative oxidase [Triticum aestivum]
  misc_feature (31)..(292): Homolog of NCBI NO: 5802557 NR Description: alternative oxidase [Triticum aestivum]
  misc_feature (1)..(292): Homolog of NCBI NO: 25989199 NR Description: alternative oxidase AOX2 precursor [Zea mays]
  misc_feature (1)..(292): Homolog of NCBI NO: 3218544 NR Description: alternative oxidase [Oryza sativa (japonica
  misc_feature (1)..(292): Homolog of NCBI NO: 19912725 NR Description: alternative oxidase [Triticum aestivum]
MSTSAASQVKDEAAKAVKAEAAKAVKAEAAKGDGEKKEVAISSYWGIEQSKKLVREDGTEWKWSCFRPWETYTADTSIDLTKHHVPNTMLDKIAYYTVKSLRFPTDIFFQRRYGCRAMMLETVAAVPGMVGGMLLHLRSLRRFEQSGGWIRALLEEAENERMHLMTFMEVAQPRWYERALVIAVQGVFFNAYFFGYLISPKFAHRVVGYLEEEAVHSYTEFLKDLDDGKIDNVPAPAIAIDYWRLPANATLKDVVTVVRADEAHHRDVNHFASDVYYQGMQLKATPAPIGYH

SEQ ID NO: 68223 - DNA, 1654 bp, Triticum aestivum
  misc_feature (1)..(1654): Ceres Seq. ID no. 13595961
accaagcaaagctgaatcagaacactccaatgtcaacgccaagaagggtggtcgtcgtcgccggccagagcctaagccacctcatctccatgctggagttcgccgcgatgtgcctccgtcgcggcctcgcggtgaccgtcgccgtcccggacccgtccctcaccgccccggccttccgctccaccatcggccggtacgcctcccggctccccaccctctccgtccactccctccctccccctcccgccctcgacgccgcctccgctgccgcccacccgttcatccgcatgcaggccgcctcccgctcccaggcacctgtcctgcgggacttcctccatagcctccccgacgtccacgcgctcgtggccgacatgctcgccgtctgtgacctcgacgtagccacggagctgggcatcccggggcacctgttcttctccacaggcgccgccagcctctccgtcttcctccaattgcctttgttttgctccgggcgcgccggaaacttgaaagatctcggcgacacgcccgtgtcgttccccggcatgtccccgatgccggcgtctcacttggtcgacgcggtgctcgacagagggacggacctctacgcgactgtgctggacgtattcggtcggatcgcgggtgcgcgcggcattctggtgaataccttcgacgcgctggagggctcagcggtgtcggcgcttagagacgggcgctgcctgcgcggccgcgccacgccgccagtttactgcgtcgggccgttgatcgcggagggggaagaggaggaggaaagacacccatgcctcccgtggctggacgcgcagcccgagcgtagcgtcgtgttcctctgcttcggcagccgatgcacggtgtcgctccagcagatcggtgagatggccaaggggctggagaagtccgggcacaggttcttgtgggtgctgcgcgcgcctcctgccttcgccgcagccggcggcggaccggacgcggcgctgtctcttctcccggaggggttcttggcccggaccgcggacaggggcttcgtggtgactgcgtcctgggtgcctcaggtggaggtgctgcgtcactcatccactggtgcgttcgtaacccactgtggatggaactcgacgctggaggcggtggtcgccggtgtgccaatggtgtgctggccgttggtagccgagcagtggatgaacaaggtgtacattgtccaagatatgaaggttggcgtggaggtgagagggtataagcgcgggggccttgtcagggccgacgatgttgacgcggcggttaggcagatcatggacatggagccggagagacggcgagcactcgaggaacggatcatggcggtaaagaagagcgctcaagcagtatggaaggaagatggctcctcctgtaccgcgttcaccgagtttatgatgcaaacggagtaaccattgtaatcattagcagcaactatccatgaagcaaatggagtgatcattagtttatgaagcaaagggacatcagcagcagatgcttaggtgtgggtaaggatatgtaagttgcacgttgcagcattgcgcaccattgggttgtaattaagcttgaattatatgagtatagtccaatctgttggtccaaaaaaaaaaaaaaaaaagcttatcgataccgt

SEQ ID NO: 68224 - protein, 476 aa, Triticum aestivum
  peptide (1)..(476): Ceres Seq. ID no. 13595962
  misc_feature (16)..(476): Pfam Name: UDP-glucoronosyl and UDP-glucosyl transferase Pfam Description: UDP-glucoronosyl and UDP-glucosyl transferase
  misc_feature (9)..(476): Homolog of NCBI NO: 19911209 NR Description: glucosyltransferase-13 [Vigna angularis]
  misc_feature (117)..(474): Homolog of NCBI NO: 34394688 NR Description: putative glucosyltransferase
  misc_feature (16)..(472): Homolog of NCBI NO: 21593785 NR Description: putative glucosyltransferase [Arabidopsis
  misc_feature (16)..(472): Homolog of NCBI NO: 18401158 NR Description: glycosyltransferase family [Arabidopsis thaliana]
  misc_feature (16)..(464): Homolog of NCBI NO: 22535568 NR Description: putative glucosyltransferase
  misc_feature (14)..(472): Homolog of NCBI NO: 34910204 NR Description: putative flavonol glucosyltransferase
  misc_feature (15)..(472): Homolog of NCBI NO: 34910218 NR Description: putative flavonol glucosyltransferase
  misc_feature (14)..(472): Homolog of NCBI NO: 34910222 NR Description: putative flavonol glucosyltransferase
  misc_feature (11)..(472): Homolog of NCBI NO: 34910228 NR Description: putative flavonol glucosyltransferase
  misc_feature (16)..(476): Homolog of NCBI NO: 34910206 NR Description: putative flavonol glucosyltransferase
QAKLNQNTPMSTPRRVVVVAGQSLSHLISMLEFAAMCLRRGLAVTVAVPDPSLTAPAFRSTIGRYASRLPTLSVHSLPPPPALDAASAAAHPFIRMQAASRSQAPVLRDFLHSLPDVHALVADMLAVCDLDVATELGIPGHLFFSTGAASLSVFLQLPLFCSGRAGNLKDLGDTPVSFPGMSPMPASHLVDAVLDRGTDLYATVLDVFGRIAGARGILVNTFDALEGSAVSALRDGRCLRGRATPPVYCVGPLIAEGEEEEERHPCLPWLDAQPERSVVFLCFGSRCTVSLQQIGEMAKGLEKSGHRFLWVLRAPPAFAAAGGGPDAALSLLPEGFLARTADRGFVVTASWVPQVEVLRHSSTGAFVTHCGWNSTLEAVVAGVPMVCWPLVAEQWMNKVYIVQDMKVGVEVRGYKRGGLVRADDVDAAVRQIMDMEPERRRALEERIMAVKKSAQAVWKEDGSSCTAFTEFMMQTE

SEQ ID NO: 68225 - protein, 467 aa, Triticum aestivum
  peptide (1)..(467): Ceres Seq. ID no. 13595963
  misc_feature (7)..(467): Pfam Name: UDP-glucoronosyl and UDP-glucosyl transferase Pfam Description: UDP-glucoronosyl and UDP-glucosyl transferase
  misc_feature (1)..(467): Homolog of NCBI NO: 19911209 NR Description: glucosyltransferase-13 [Vigna angularis]
  misc_feature (108)..(465): Homolog of NCBI NO: 34394688 NR Description: putative glucosyltransferase
  misc_feature (7)..(463): Homolog of NCBI NO: 21593785 NR Description: putative glucosyltransferase [Arabidopsis
  misc_feature (7)..(463): Homolog of NCBI NO: 18401158 NR Description: glycosyltransferase family [Arabidopsis thaliana]
  misc_feature (7)..(455): Homolog of NCBI NO: 22535568 NR Description: putative glucosyltransferase
  misc_feature (5)..(463): Homolog of NCBI NO: 34910204 NR Description: putative flavonol glucosyltransferase
  misc_feature (6)..(463): Homolog of NCBI NO: 34910218 NR Description: putative flavonol glucosyltransferase
  misc_feature (5)..(463): Homolog of NCBI NO: 34910222 NR Description: putative flavonol glucosyltransferase
  misc_feature (2)..(463): Homolog of NCBI NO: 34910228 NR Description: putative flavonol glucosyltransferase
  misc_feature (7)..(467): Homolog of NCBI NO: 34910206 NR Description: putative flavonol glucosyltransferase
MSTPRRVVVVAGQSLSHLISMLEFAAMCLRRGLAVTVAVPDPSLTAPAFRSTIGRYASRLPTLSVHSLPPPPALDAASAAAHPFIRMQAASRSQAPVLRDFLHSLPDVHALVADMLAVCDLDVATELGIPGHLFFSTGAASLSVFLQLPLFCSGRAGNLKDLGDTPVSFPGMSPMPASHLVDAVLDRGTDLYATVLDVFGRIAGARGILVNTFDALEGSAVSALRDGRCLRGRATPPVYCVGPLIAEGEEEEERHPCLPWLDAQPERSVVFLCFGSRCTVSLQQIGEMAKGLEKSGHRFLWVLRAPPAFAAAGGGPDAALSLLPEGFLARTADRGFVVTASWVPQVEVLRHSSTGAFVTHCGWNSTLEAVVAGVPMVCWPLVAEQWMNKVYIVQDMKVGVEVRGYKRGGLVRADDVDAAVRQIMDMEPERRRALEERIMAVKKSAQAVWKEDGSSCTAFTEFMMQTE

SEQ ID NO: 68226 - protein, 447 aa, Triticum aestivum
  peptide (1)..(447): Ceres Seq. ID no. 13595964
  misc_feature (1)..(447): Pfam Name: UDP-glucoronosyl and UDP-glucosyl transferase Pfam Description: UDP-glucoronosyl and UDP-glucosyl transferase
  misc_feature (1)..(447): Homolog of NCBI NO: 19911209 NR Description: glucosyltransferase-13 [Vigna angularis]
  misc_feature (88)..(445): Homolog of NCBI NO: 34394688 NR Description: putative glucosyltransferase
  misc_feature (1)..(443): Homolog of NCBI NO: 21593785 NR Description: putative glucosyltransferase [Arabidopsis
  misc_feature (1)..(443): Homolog of NCBI NO: 18401158 NR Description: glycosyltransferase family [Arabidopsis thaliana]
  misc_feature (1)..(435): Homolog of NCBI NO: 22535568 NR Description: putative glucosyltransferase
  misc_feature (1)..(443): Homolog of NCBI NO: 34910204 NR Description: putative flavonol glucosyltransferase
  misc_feature (1)..(443): Homolog of NCBI NO: 34910218 NR Description: putative flavonol glucosyltransferase
  misc_feature (1)..(443): Homolog of NCBI NO: 34910222 NR Description: putative flavonol glucosyltransferase
  misc_feature (1)..(443): Homolog of NCBI NO: 34910228 NR Description: putative flavonol glucosyltransferase
  misc_feature (1)..(447): Homolog of NCBI NO: 34910206 NR Description: putative flavonol glucosyltransferase
MLEFAAMCLRRGLAVTVAVPDPSLTAPAFRSTIGRYASRLPTLSVHSLPPPPALDAASAAAHPFIRMQAASRSQAPVLRDFLHSLPDVHALVADMLAVCDLDVATELGIPGHLFFSTGAASLSVFLQLPLFCSGRAGNLKDLGDTPVSFPGMSPMPASHLVDAVLDRGTDLYATVLDVFGRIAGARGILVNTFDALEGSAVSALRDGRCLRGRATPPVYCVGPLIAEGEEEEERHPCLPWLDAQPERSVVFLCFGSRCTVSLQQIGEMAKGLEKSGHRFLWVLRAPPAFAAAGGGPDAALSLLPEGFLARTADRGFVVTASWVPQVEVLRHSSTGAFVTHCGWNSTLEAVVAGVPMVCWPLVAEQWMNKVYIVQDMKVGVEVRGYKRGGLVRADDVDAAVRQIMDMEPERRRALEERIMAVKKSAQAVWKEDGSSCTAFTEFMMQTE

SEQ ID NO: 68227 - DNA, 965 bp, Triticum aestivum
  misc_feature (1)..(965): Ceres Seq. ID no. 13654535
aaaccatcgtcactcacgacagaaacagaaataggaagacgagagaacagaagagccagagacactaaaacgaaatggcatcctcctcttccttccttctcattgctgcacttcttgcgttggtctcatggcaggccactgcttttgatcctagcccactccaggacttttgtgtcgccgacatgaattcaccagtccgtgtcaatgggtttgtttgcaagaacccgttggaggttaatgcagatgacttcttcaaggcggccaacctcgacaagcctagggtgcccaacaaggttggatccaacgtcactttgatcaacgccatgcagattgctggactcaacaccctcggcatctcaattgcacgcatcgactatgctcccttgggtcaaaacccaccacacacgcaccctcgcgccactgagatcctcacggtgctcgaggggacactgtatgttggatttgtcacatccaaccagcccgcccccaacagaaacaagttcctctccaaggtgctcaacaaaggtgatgtgtttgtcttccccgtggggctcatccacttccaattcaaccccaacccccaccagcctgctgttgcaattgccgcgctaagcagccagaacccaggggctatcacaattgccaatgcagtgtttgggtcagacccaccaatatcagatgatgttcttgccaaggcatttcaggtggaaaagaatacaattgactatctccaggctcagttctgggagaacaaccactactaagtcagacctttgttaattagccggaagaccagtgcacaagcgaaggacatggttgagttcctagatatgcatcctaatctataaaataaatggagcatatgtcatgccattgtgtgtctgtaatcagtgaatgtatttctaccttctgaataattgacaatattgtatttatcacactaatatgatctcatttgcttcttt

SEQ ID NO: 68228 - protein, 229 aa, Triticum aestivum
  peptide (1)..(229): Ceres Seq. ID no. 13654536
  misc_feature (63)..(217): Pfam Name: Cupin Pfam Description: Cupin
  misc_feature (3)..(229): Homolog of NCBI NO: 5499732 NR Description: germin-like protein 2 precursor [Oryza sativa]
  misc_feature (3)..(229): Homolog of NCBI NO: 40253800 NR Description: putative germin A [Oryza sativa (japonica
  misc_feature (3)..(229): Homolog of NCBI NO: 40253804 NR Description: putative germin A [Oryza sativa (japonica
  misc_feature (1)..(229): Homolog of NCBI NO: 40253797 NR Description: putative germin A [Oryza sativa (japonica
  misc_feature (1)..(229): Homolog of NCBI NO: 7447336 NR Description: germin-like protein 6 - rice
  misc_feature (3)..(229): Homolog of NCBI NO: 5499730 NR Description: germin-like protein 1 precursor [Oryza sativa]
  misc_feature (1)..(228): Homolog of NCBI NO: 5869973 NR Description: germin-like protein [Triticum aestivum]
  misc_feature (1)..(228): Homolog of NCBI NO: 7447340 NR Description: germin-like protein - barley
  misc_feature (1)..(228): Homolog of NCBI NO: 9837111 NR Description: germin A [Hordeum vulgare]
  misc_feature (1)..(229): Homolog of NCBI NO: 5869975 NR Description: germin-like protein [Triticum aestivum]
MASSSSFLLIAALLALVSWQATAFDPSPLQDFCVADMNSPVRVNGFVCKNPLEVNADDFFKAANLDKPRVPNKVGSNVTLINAMQIAGLNTLGISIARIDYAPLGQNPPHTHPRATEILTVLEGTLYVGFVTSNQPAPNRNKFLSKVLNKGDVFVFPVGLIHFQFNPNPHQPAVAIAALSSQNPGAITIANAVFGSDPPISDDVLAKAFQVEKNTIDYLQAQFWENNHY

SEQ ID NO: 68229 - protein, 193 aa, Triticum aestivum
  peptide (1)..(193): Ceres Seq. ID no. 13654537
  misc_feature (27)..(181): Pfam Name: Cupin Pfam Description: Cupin
  misc_feature (1)..(193): Homolog of NCBI NO: 5499732 NR Description: germin-like protein 2 precursor [Oryza sativa]
  misc_feature (1)..(193): Homolog of NCBI NO: 40253800 NR Description: putative germin A [Oryza sativa (japonica
  misc_feature (1)..(193): Homolog of NCBI NO: 40253804 NR Description: putative germin A [Oryza sativa (japonica
  misc_feature (1)..(193): Homolog of NCBI NO: 40253797 NR Description: putative germin A [Oryza sativa (japonica
  misc_feature (1)..(193): Homolog of NCBI NO: 7447336 NR Description: germin-like protein 6 - rice
  misc_feature (1)..(193): Homolog of NCBI NO: 5499730 NR Description: germin-like protein 1 precursor [Oryza sativa]
  misc_feature (1)..(192): Homolog of NCBI NO: 5869973 NR Description: germin-like protein [Triticum aestivum]
  misc_feature (1)..(192): Homolog of NCBI NO: 7447340 NR Description: germin-like protein - barley
  misc_feature (1)..(192): Homolog of NCBI NO: 9837111 NR Description: germin A [Hordeum vulgare]
  misc_feature (1)..(193): Homolog of NCBI NO: 5869975 NR Description: germin-like protein [Triticum aestivum]
MNSPVRVNGFVCKNPLEVNADDFFKAANLDKPRVPNKVGSNVTLINAMQIAGLNTLGISIARIDYAPLGQNPPHTHPRATEILTVLEGTLYVGFVTSNQPAPNRNKFLSKVLNKGDVFVFPVGLIHFQFNPNPHQPAVAIAALSSQNPGAITIANAVFGSDPPISDDVLAKAFQVEKNTIDYLQAQFWENNHY

SEQ ID NO: 68230 - protein, 146 aa, Triticum aestivum
  peptide (1)..(146): Ceres Seq. ID no. 13654538
  misc_feature (1)..(134): Pfam Name: Cupin Pfam Description: Cupin
  misc_feature (1)..(146): Homolog of NCBI NO: 5499732 NR Description: germin-like protein 2 precursor [Oryza sativa]
  misc_feature (1)..(146): Homolog of NCBI NO: 40253800 NR Description: putative germin A [Oryza sativa (japonica
  misc_feature (1)..(146): Homolog of NCBI NO: 40253804 NR Description: putative germin A [Oryza sativa (japonica
  misc_feature (1)..(146): Homolog of NCBI NO: 40253797 NR Description: putative germin A [Oryza sativa (japonica
  misc_feature (1)..(146): Homolog of NCBI NO: 7447336 NR Description: germin-like protein 6 - rice
  misc_feature (1)..(146): Homolog of NCBI NO: 5499730 NR Description: germin-like protein 1 precursor [Oryza sativa]
  misc_feature (1)..(145): Homolog of NCBI NO: 5869973 NR Description: germin-like protein [Triticum aestivum]
  misc_feature (1)..(145): Homolog of NCBI NO: 7447340 NR Description: germin-like protein - barley
  misc_feature (1)..(145): Homolog of NCBI NO: 9837111 NR Description: germin A [Hordeum vulgare]
  misc_feature (1)..(146): Homolog of NCBI NO: 5869975 NR Description: germin-like protein [Triticum aestivum]
MQIAGLNTLGISIARIDYAPLGQNPPHTHPRATEILTVLEGTLYVGFVTSNQPAPNRNKFLSKVLNKGDVFVFPVGLIHFQFNPNPHQPAVAIAALSSQNPGAITIANAVFGSDPPISDDVLAKAFQVEKNTIDYLQAQFWENNHY

SEQ ID NO: 68231 - DNA, 1723 bp, Triticum aestivum
  misc_feature (1)..(1723): Ceres Seq. ID no. 13595965
ctagccgccgccactgcaccggcgcctcccccgccccactgactggcttcctagggctgccctccgcccgcttcttcaccggcgcgttggtcgcgaccccgccaccccgccaccctcgccagcgctggtccctgcacggacggcacgaacgccgccgccccgtacaagatactgcaccgactccgcagcccgtcctcgtcctagggcagaccccacccccgcggctccgctttcttagcactctcgccgtcgcgccgccgggagccaggcatgacgacgcgtatcgcgcccggcgtgggcgcgaacctcctcgggcagcactcggcggagcgcaaccaggacgccaccacctacgtcggcaacctcgacccgcaggtttccgaggaattactgtgggagttgtttgtccaagcaggccctgttgttaatgtctatgtcccgaaagacagagttacaaatctacaccagggctatgggtttgtagaatttaggagtgaggaagatgcagattatgctattaagattttgaacatgctcaaattgtatggaaagccaataagagtaaacaaggcttcccaagacaagaagagcttggatgtgggtgcgaatctttttattggcaatcttgatccggaagtcgatgagaagcttctctatgacaccttcagtgcatttggtgtgattgtgaccaaccctaagataatgcgggaccctgaaactggaaattctcgagggtttggctttgtgagctatgactcctttgaatcatctgatcaagctatagaggccatgaacaaccagcatttatgtaatcggccaatcactgtctcatatgcttacaagaaagacacgaaaggagagcgccatggcacaccagcagagaggttgcttgcggcgaacaacccaggatctcagaagcataggccacacacaatgtttgcaactgctccgccaacccaagggcttcaaaacggtggtgttggtgcacctgtgccacggccttttgccaatgggaatgtcccaggacagatgcaacatgtcagaccgccgccgccacctgttggtcaataccctcccatgcagatgcatggacagcctgcctggcctggtcctccacagaatatgcaacaagtaccacctccgatgcaacagcagcttcaatacaggcttccagggatgcccccgccgccgcaaaacatgatgcccccaccgcaaaacatgatgccgccacctcatcacatggccaggccgccgccgccacctcccaatatgcaagctccacctatgtggaggccacccccacccccacaacaaggtggtggaatgccgccacctccaatgtccatgccacctcctccaccgccaccttctggttaaaaatacaaatgggtgtcttccatgggttaatttggcgcgcagcagttgtagaccaagggtgttaaaagtctttcatatattgtcatgtaacttgcagcactaggagaatatcagaattgagagaattagcggacggtgatacaaaatgcgtggcttttgtgattgcatgtacggtacctgccttgtgggtgctgctgctgtgtgctctgcttaggacaattatggaccgtgatctgcgctatctctttacattgttattactgacagaatcgtgttttaaacaggcccctggtgattgacagttgtcgcgcataaaaaaaaaaaaaaaaaagcttatcgataccgt

SEQ ID NO: 68232 - protein, 368 aa, Triticum aestivum
  peptide (1)..(368): Ceres Seq. ID no. 13595966
  misc_feature (28)..(98): Pfam Name: RNA recognition motif. (a.k.a. RRM, RBD, or RNP domain) Pfam Description: RNA recognition motif. (a.k.a. RRM, RBD, or RNP
  misc_feature (19)..(365): Homolog of NCBI NO: 34858075 NR Description: similar to Sf3b4 protein [Rattus norvegicus]
  misc_feature (19)..(365): Homolog of NCBI NO: 23346437 NR Description: splicing factor 3b, subunit 4
  misc_feature (19)..(365): Homolog of NCBI NO: 5032069 NR Description: splicing factor 3b, subunit 4
  misc_feature (19)..(366): Homolog of NCBI NO: 28374170 NR Description: Similar to splicing factor 3b, subunit 4, 49kD
  misc_feature (19)..(368): Homolog of NCBI NO: 24119253 NR Description: splicing factor 3b, subunit 4 [Danio rerio]
  misc_feature (19)..(368): Homolog of NCBI NO: 34193906 NR Description: Splicing factor 3b, subunit 4 [Danio rerio]
  misc_feature (1)..(364): Homolog of NCBI NO: 21593441 NR Description: putative spliceosome associated protein
  misc_feature (1)..(364): Homolog of NCBI NO: 14334958 NR Description: putative spliceosome associated protein
  misc_feature (1)..(364): Homolog of NCBI NO: 15224186 NR Description: pre-mRNA splicing factor SF3b, putative
  misc_feature (1)..(368): Homolog of NCBI NO: 37535012 NR Description: putative spliceosomal protein
MTTRIAPGVGANLLGQHSAERNQDATTYVGNLDPQVSEELLWELFVQAGPVVNVYVPKDRVTNLHQGYGFVEFRSEEDADYAIKILNMLKLYGKPIRVNKASQDKKSLDVGANLFIGNLDPEVDEKLLYDTFSAFGVIVTNPKIMRDPETGNSRGFGFVSYDSFESSDQAIEAMNNQHLCNRPITVSYAYKKDTKGERHGTPAERLLAANNPGSQKHRPHTMFATAPPTQGLQNGGVGAPVPRPFANGNVPGQMQHVRPPPPPVGQYPPMQMHGQPAWPGPPQNMQQVPPPMQQQLQYRLPGMPPPPQNMMPPPQNMMPPPHHMARPPPPPPNMQAPPMWRPPPPPQQGGGMPPPPMSMPPPPPPPSG

SEQ ID NO: 68233 - protein, 281 aa, Triticum aestivum
  peptide (1)..(281): Ceres Seq. ID no. 13595967
  misc_feature (171)..(280): Pfam Name: Extensin-like region Pfam Description: Extensin-like region
  misc_feature (1)..(278): Homolog of NCBI NO: 34858075 NR Description: similar to Sf3b4 protein [Rattus norvegicus]
  misc_feature (1)..(278): Homolog of NCBI NO: 23346437 NR Description: splicing factor 3b, subunit 4
  misc_feature (1)..(278): Homolog of NCBI NO: 5032069 NR Description: splicing factor 3b, subunit 4
  misc_feature (1)..(279): Homolog of NCBI NO: 28374170 NR Description: Similar to splicing factor 3b, subunit 4, 49kD
  misc_feature (1)..(281): Homolog of NCBI NO: 24119253 NR Description: splicing factor 3b, subunit 4 [Danio rerio]
  misc_feature (1)..(281): Homolog of NCBI NO: 34193906 NR Description: Splicing factor 3b, subunit 4 [Danio rerio]
  misc_feature (1)..(277): Homolog of NCBI NO: 21593441 NR Description: putative spliceosome associated protein
  misc_feature (1)..(277): Homolog of NCBI NO: 14334958 NR Description: putative spliceosome associated protein
  misc_feature (1)..(277): Homolog of NCBI NO: 15224186 NR Description: pre-mRNA splicing factor SF3b, putative
  misc_feature (1)..(281): Homolog of NCBI NO: 37535012 NR Description: putative spliceosomal protein
MLKLYGKPIRVNKASQDKKSLDVGANLFIGNLDPEVDEKLLYDTFSAFGVIVTNPKIMRDPETGNSRGFGFVSYDSFESSDQAIEAMNNQHLCNRPITVSYAYKKDTKGERHGTPAERLLAANNPGSQKHRPHTMFATAPPTQGLQNGGVGAPVPRPFANGNVPGQMQHVRPPPPPVGQYPPMQMHGQPAWPGPPQNMQQVPPPMQQQLQYRLPGMPPPPQNMMPPPQNMMPPPHHMARPPPPPPNMQAPPMWRPPPPPQQGGGMPPPPMSMPPPPPPPSG

SEQ ID NO: 68234 - protein, 224 aa, Triticum aestivum
  peptide (1)..(224): Ceres Seq. ID no. 13595968
  misc_feature (114)..(223): Pfam Name: Extensin-like region Pfam Description: Extensin-like region
  misc_feature (1)..(221): Homolog of NCBI NO: 34858075 NR Description: similar to Sf3b4 protein [Rattus norvegicus]
  misc_feature (1)..(221): Homolog of NCBI NO: 23346437 NR Description: splicing factor 3b, subunit 4
  misc_feature (1)..(221): Homolog of NCBI NO: 5032069 NR Description: splicing factor 3b, subunit 4
  misc_feature (1)..(222): Homolog of NCBI NO: 28374170 NR Description: Similar to splicing factor 3b, subunit 4, 49kD
  misc_feature (1)..(224): Homolog of NCBI NO: 24119253 NR Description: splicing factor 3b, subunit 4 [Danio rerio]
  misc_feature (1)..(224): Homolog of NCBI NO: 34193906 NR Description: Splicing factor 3b, subunit 4 [Danio rerio]
  misc_feature (1)..(220): Homolog of NCBI NO: 21593441 NR Description: putative spliceosome associated protein
  misc_feature (1)..(220): Homolog of NCBI NO: 14334958 NR Description: putative spliceosome associated protein
  misc_feature (1)..(220): Homolog of NCBI NO: 15224186 NR Description: pre-mRNA splicing factor SF3b, putative
  misc_feature (1)..(224): Homolog of NCBI NO: 37535012 NR Description: putative spliceosomal protein
MRDPETGNSRGFGFVSYDSFESSDQAIEAMNNQHLCNRPITVSYAYKKDTKGERHGTPAERLLAANNPGSQKHRPHTMFATAPPTQGLQNGGVGAPVPRPFANGNVPGQMQHVRPPPPPVGQYPPMQMHGQPAWPGPPQNMQQVPPPMQQQLQYRLPGMPPPPQNMMPPPQNMMPPPHHMARPPPPPPNMQAPPMWRPPPPPQQGGGMPPPPMSMPPPPPPPSG

SEQ ID NO: 68235 - DNA, 1250 bp, Triticum aestivum
  misc_feature (1)..(1250): Ceres Seq. ID no. 13654191
ctcccccctccacgtctcgctagaaacgcacgcacacgcgtatagtagcagtgtagcaccaacgggcagtcgggcactagctagctccttcgagtccgatcgatcggatcggcatgacgctggatgccctgtgcgcggccggcgacgtcctcgtctacgacaccttcaacgcggcggcggccgtgagtgccgcgccggccgagagcagcctcctcttctgcgacgtcgccggagcggcatggatggcggggtctgctgccgctgaggcgccggctgtgaccatagtgccggtggaagaaggggagaaggcgcaggggaggaggaagcggcggcggcgggcgaggagctgcaagaatcgcgaggacgccgagagccagcggatgacccacattgccgtcgagcgcaaccgccgccgccagatgaacgagtacctcgccgtgctccgctccctcatgccggagtcctacgcccaccggggcgaccaagcatccattgtcggcggcgccatcgatttcgtcaaggagctcgagcagctgctgcagtccctggaggcgcagaagcgcacgctcctcgcccagccgcagcaggagcacaagccgctgcccatccgtgacgcgatgccatcgtcgagcaaaacggtcacggccgcggcgacaactacgacgagcagcggcagcggcgagggcaagcaggcgtcggcgatgcgcgaggggatgggtccgccgttcgcggggttcttcacgtacccacagtacgtgtgtcgcctcccgccgcgggacgacgccgacgaccgcgccggggcggcggacatcgaggtgacgctggtggagacgcacgccaacgtccgggtgatggcgccgcggcggccggggcagctgctcaggatggtcgccgggatggaggcgctcaggctcaccgtgctgcacctcaacgtcaccacgctcggctcgctcgcgctctactccctcagcgtcaaggtggaggaagggtgcgggccgacgacggcggacgacatcgccgcggcggtgcaccatgtgctctgcctcgtcgacgccgaggcgacgtcgcagcggctgctcgccggtgggcagcaggagattttaagttagctaggtggaccggggcaacgccggcaagcttgccgtctgaggcaggggtagtaatttgtaaagtgtagtggacctctacgaggctttggagcatggttaataagagcatgtgcagccggactttgcaaatccgcacgcctg

SEQ ID NO: 68236 - protein, 331 aa, Triticum aestivum
  peptide (1)..(331): Ceres Seq. ID no. 13654192
  misc_feature (88)..(139): Pfam Name: Helix-loop-helix DNA-binding domain Pfam Description: Helix-loop-helix DNA-binding domain
  misc_feature (67)..(315): Homolog of NCBI NO: 21593074 NR Description: bHLH DNA-binding protein-like protein
  misc_feature (228)..(309): Homolog of NCBI NO: 37533680 NR Description: putative helix-loop-helix DNA-binding protein
  misc_feature (49)..(152): Homolog of NCBI NO: 37533680 NR Description: putative helix-loop-helix DNA-binding protein
  misc_feature (66)..(151): Homolog of NCBI NO: 15218391 NR Description: bHLH protein family [Arabidopsis thaliana]
  misc_feature (51)..(157): Homolog of NCBI NO: 21593808 NR Description: unknown [Arabidopsis thaliana]
  misc_feature (204)..(315): Homolog of NCBI NO: 21593808 NR Description: unknown [Arabidopsis thaliana]
  misc_feature (180)..(317): Homolog of NCBI NO: 15218391 NR Description: bHLH protein family [Arabidopsis thaliana]
  misc_feature (51)..(157): Homolog of NCBI NO: 18395124 NR Description: bHLH protein family [Arabidopsis thaliana]
  misc_feature (182)..(315): Homolog of NCBI NO: 18395124 NR Description: bHLH protein family [Arabidopsis thaliana]
  misc_feature (1)..(288): Homolog of NCBI NO: 38346722 NR Description: OSJNBa0086O06.20 [Oryza sativa (japonica
MTLDALCAAGDVLVYDTFNAAAAVSAAPAESSLLFCDVAGAAWMAGSAAAEAPAVTIVPVEEGEKAQGRRKRRRRARSCKNREDAESQRMTHIAVERNRRRQMNEYLAVLRSLMPESYAHRGDQASIVGGAIDFVKELEQLLQSLEAQKRTLLAQPQQEHKPLPIRDAMPSSSKTVTAAATTTTSSGSGEGKQASAMREGMGPPFAGFFTYPQYVCRLPPRDDADDRAGAADIEVTLVETHANVRVMAPRRPGQLLRMVAGMEALRLTVLHLNVTTLGSLALYSLSVKVEEGCGPTTADDIAAAVHHVLCLVDAEATSQRLLAGGQQEILS

SEQ ID NO: 68237 - protein, 288 aa, Triticum aestivum
  peptide (1)..(288): Ceres Seq. ID no. 13654193
  misc_feature (45)..(96): Pfam Name: Helix-loop-helix DNA-binding domain Pfam Description: Helix-loop-helix DNA-binding domain
  misc_feature (24)..(272): Homolog of NCBI NO: 21593074 NR Description: bHLH DNA-binding protein-like protein
  misc_feature (185)..(266): Homolog of NCBI NO: 37533680 NR Description: putative helix-loop-helix DNA-binding protein
  misc_feature (6)..(109): Homolog of NCBI NO: 37533680 NR Description: putative helix-loop-helix DNA-binding protein
  misc_feature (23)..(108): Homolog of NCBI NO: 15218391 NR Description: bHLH protein family [Arabidopsis thaliana]
  misc_feature (8)..(114): Homolog of NCBI NO: 21593808 NR Description: unknown [Arabidopsis thaliana]
  misc_feature (161)..(272): Homolog of NCBI NO: 21593808 NR Description: unknown [Arabidopsis thaliana]
  misc_feature (137)..(274): Homolog of NCBI NO: 15218391 NR Description: bHLH protein family [Arabidopsis thaliana]
  misc_feature (8)..(114): Homolog of NCBI NO: 18395124 NR Description: bHLH protein family [Arabidopsis thaliana]
  misc_feature (139)..(272): Homolog of NCBI NO: 18395124 NR Description: bHLH protein family [Arabidopsis thaliana]
  misc_feature (1)..(245): Homolog of NCBI NO: 38346722 NR Description: OSJNBa0086O06.20 [Oryza sativa (japonica
MAGSAAAEAPAVTIVPVEEGEKAQGRRKRRRRARSCKNREDAESQRMTHIAVERNRRRQMNEYLAVLRSLMPESYAHRGDQASIVGGAIDFVKELEQLLQSLEAQKRTLLAQPQQEHKPLPIRDAMPSSSKTVTAAATTTTSSGSGEGKQASAMREGMGPPFAGFFTYPQYVCRLPPRDDADDRAGAADIEVTLVETHANVRVMAPRRPGQLLRMVAGMEALRLTVLHLNVTTLGSLALYSLSVKVEEGCGPTTADDIAAAVHHVLCLVDAEATSQRLLAGGQQEILS

SEQ ID NO: 68238 - protein, 242 aa, Triticum aestivum
  peptide (1)..(242): Ceres Seq. ID no. 13654194
  misc_feature (1)..(50): Pfam Name: Helix-loop-helix DNA-binding domain Pfam Description: Helix-loop-helix DNA-binding domain
  misc_feature (1)..(226): Homolog of NCBI NO: 21593074 NR Description: bHLH DNA-binding protein-like protein
  misc_feature (139)..(220): Homolog of NCBI NO: 37533680 NR Description: putative helix-loop-helix DNA-binding protein
  misc_feature (1)..(63): Homolog of NCBI NO: 37533680 NR Description: putative helix-loop-helix DNA-binding protein
  misc_feature (1)..(62): Homolog of NCBI NO: 15218391 NR Description: bHLH protein family [Arabidopsis thaliana]
  misc_feature (1)..(68): Homolog of NCBI NO: 21593808 NR Description: unknown [Arabidopsis thaliana]
  misc_feature (115)..(226): Homolog of NCBI NO: 21593808 NR Description: unknown [Arabidopsis thaliana]
  misc_feature (91)..(228): Homolog of NCBI NO: 15218391 NR Description: bHLH protein family [Arabidopsis thaliana]
  misc_feature (1)..(68): Homolog of NCBI NO: 18395124 NR Description: bHLH protein family [Arabidopsis thaliana]
  misc_feature (93)..(226): Homolog of NCBI NO: 18395124 NR Description: bHLH protein family [Arabidopsis thaliana]
  misc_feature (1)..(199): Homolog of NCBI NO: 38346722 NR Description: OSJNBa0086O06.20 [Oryza sativa (japonica
MTHIAVERNRRRQMNEYLAVLRSLMPESYAHRGDQASIVGGAIDFVKELEQLLQSLEAQKRTLLAQPQQEHKPLPIRDAMPSSSKTVTAAATTTTSSGSGEGKQASAMREGMGPPFAGFFTYPQYVCRLPPRDDADDRAGAADIEVTLVETHANVRVMAPRRPGQLLRMVAGMEALRLTVLHLNVTTLGSLALYSLSVKVEEGCGPTTADDIAAAVHHVLCLVDAEATSQRLLAGGQQEILS

SEQ ID NO: 68239 - DNA, 2304 bp, Triticum aestivum
  misc_feature (1)..(2304): Ceres Seq. ID no. 12465083
ggatctcacctctgccccttttctccatcctccgactcgccgccgccgccgggagccgacccaacaagcccgagcgccagccatggccatcggatctctcctcgcctcgcggctggccaggtccggccacgccctcgccacgcgcgccatcgctcaggctccccggacccacaatcatcatcacgcgacgtctcccctgctctccaggctcggagccgtggcccgcgctttcagctcaaggcccgccgccgccgatgtcatcgggatcgatttgggcacgacgaactcatgtgtctccgtcatggaaggaaagacaccacgggtgattgagaatgctgaaggtgcgaggacaacgccctccattgttgccacaaacagcaaaggcgagatcttgattggcatcactgccagtcgacaggcagtgacaaatgccgagaacacagttcgtgggtccaagcgcctgattggtagagcttttgatgacccccaaacacagaaggaaatgaagatggtgccttacaagattgtcaggggaacaaatggtgatgcctgggtggagatggctgggaagtcatactccccgagtcagattggtgcgtttgttcttaccaagatgaaggaaactgcagaggcttaccttggcaagtcggtctccaaggctgttattacagtcccagcttatttcaatgatgcccagcgtcaggccaccaaggatgctggtaggattgctgggttggaggtgatgaggattatcaatgagcccactgctgcagctctgtcgtatggaatgaacaacaaggagggcctgattgctgtatttgacttgggcggtggaacatttgatgtatcaatccttgagatttctaatggcgtttttgaggtcaaggcgaccaatggagatactttccttggtggtgaggactttgatgctacattgctcaactacctggttagtgaatataagaactctgacaacattgatctgagcaaggacaagttggccctgcaaaggctcagggaagctgctgagaaggcgaaggttgagctttcctcaactccacagactgaaatcaatctccccttcatcacagcagatgcctctggtgcgaagcatttcaacattaccttgaccagatcaaagtttgagtctcttgtgggcaacctcattgagagaactcgcatcccatgtacaaactgcctcaaggatgctggtgtttctgcaaaggagattgatgaggttctactggttggtggtatgacaagggtgccaaaggtccaggatattgtttctcagatattcggcaagtcgccaagcaagggtgtcaatcctgatgaggctgttgccatgggagctgccattcagggtggcattttgaggggtgatgtgaaggagctcttgctgctggatgtcacgcccctttcccttggtattgagactcttggaggcatcttcacaaggctaatcaacaggaacactacaattccaaccaagaagagccagaccttctccactgctgcagataaccagacgcaggttggaatcaaggtgcttcagggtgagagggagatggccacagataacaagcttcttggtgaattccagcttgaaggcattccaccggccccgaggggtatgccacagattgaggtcacttttgacattgatgccaatggtattgtcaaggtgtcagcaaaggacaagtccactggcaaagagcaggatatcaccatcaaatcttcaggtggtttgtctgacagtgacatcgagaagatggtgaaggaggcggagctaaattctcagagggatcaggaaaggaagtcgttgattgacctcaggaactctgcagataccaccatctacagcattgagaagagcgtcagcgagtacaaagacaaggtccctgctgaagttgtcacggagatccagtctgctgtctctgatctgagagcagcaatggctggcgacgattcggacgccatcaagcagaagctggaggcggcgaacaaggcagtctcaaagattggacagcacatgcagggtggtggcggcgctgccgccggcgacagcggcagcagtggtggtggcgaccagactccggaagctgaataccaggaccccaaggaggccaagatgtagatttgttctgcatcaggtttcttctacttttttgtgtacccagtttaggaagttaatatctttatcctacctccgtctgcttaggtttctaagagggctacgacgatacctgtaacattttggcaattgttcgaattgcggataaattgtgagaggagcaaactcat

SEQ ID NO: 68240 - protein, 711 aa, Triticum aestivum
  peptide (1)..(711): Ceres Seq. ID no. 12465084
  misc_feature (86)..(680): Pfam Name: Hsp70 protein Pfam Description: Hsp70 protein
  misc_feature (20)..(710): Homolog of NCBI NO: 34878657 NR Description: similar to grp75 [Rattus norvegicus]
  misc_feature (86)..(710): Homolog of NCBI NO: 22962329 NR Description: hypothetical protein [Rhodopseudomonas palustris]
  misc_feature (28)..(708): Homolog of NCBI NO: 585273 NR Description: Heat shock 70 kDa protein, mitochondrial
  misc_feature (63)..(708): Homolog of NCBI NO: 7441881 NR Description: dnaK-type molecular chaperone HSC70-10,
  misc_feature (74)..(708): Homolog of NCBI NO: 15242459 NR Description: heat shock protein 70 (Hsc70-5)
  misc_feature (68)..(708): Homolog of NCBI NO: 27476086 NR Description: Putative heat shock 70 KD protein, mitochondrial
  misc_feature (63)..(708): Homolog of NCBI NO: 7441879 NR Description: dnaK-type molecular chaperone HSC70-11,
  misc_feature (34)..(708): Homolog of NCBI NO: 585272 NR Description: HEAT SHOCK 70 KD PROTEIN, MITOCHONDRIAL PRECURSOR
  misc_feature (34)..(708): Homolog of NCBI NO: 7441844 NR Description: dnaK-type molecular chaperone PHSP1 precursor,
  misc_feature (62)..(708): Homolog of NCBI NO: 399940 NR Description: HEAT SHOCK 70 KD PROTEIN, MITOCHONDRIAL PRECURSOR
DLTSAPFLHPPTRRRRREPTQQARAPAMAIGSLLASRLARSGHALATRAIAQAPRTHNHHHATSPLLSRLGAVARAFSSRPAAADVIGIDLGTTNSCVSVMEGKTPRVIENAEGARTTPSIVATNSKGEILIGITASRQAVTNAENTVRGSKRLIGRAFDDPQTQKEMKMVPYKIVRGTNGDAWVEMAGKSYSPSQIGAFVLTKMKETAEAYLGKSVSKAVITVPAYFNDAQRQATKDAGRIAGLEVMRIINEPTAAALSYGMNNKEGLIAVFDLGGGTFDVSILEISNGVFEVKATNGDTFLGGEDFDATLLNYLVSEYKNSDNIDLSKDKLALQRLREAAEKAKVELSSTPQTEINLPFITADASGAKHFNITLTRSKFESLVGNLIERTRIPCTNCLKDAGVSAKEIDEVLLVGGMTRVPKVQDIVSQIFGKSPSKGVNPDEAVAMGAAIQGGILRGDVKELLLLDVTPLSLGIETLGGIFTRLINRNTTIPTKKSQTFSTAADNQTQVGIKVLQGEREMATDNKLLGEFQLEGIPPAPRGMPQIEVTFDIDANGIVKVSAKDKSTGKEQDITIKSSGGLSDSDIEKMVKEAELNSQRDQERKSLIDLRNSADTTIYSIEKSVSEYKDKVPAEVVTEIQSAVSDLRAAMAGDDSDAIKQKLEAANKAVSKIGQHMQGGGGAAAGDSGSSGGGDQTPEAEYQDPKEAKM

SEQ ID NO: 68241 - protein, 684 aa, Triticum aestivum
  peptide (1)..(684): Ceres Seq. ID no. 12465085
  misc_feature (59)..(653): Pfam Name: Hsp70 protein Pfam Description: Hsp70 protein
  misc_feature (1)..(683): Homolog of NCBI NO: 34878657 NR Description: similar to grp75 [Rattus norvegicus]
  misc_feature (59)..(683): Homolog of NCBI NO: 22962329 NR Description: hypothetical protein [Rhodopseudomonas palustris]
  misc_feature (1)..(681): Homolog of NCBI NO: 585273 NR Description: Heat shock 70 kDa protein, mitochondrial
  misc_feature (36)..(681): Homolog of NCBI NO: 7441881 NR Description: dnaK-type molecular chaperone HSC70-10,
  misc_feature (47)..(681): Homolog of NCBI NO: 15242459 NR Description: heat shock protein 70 (Hsc70-5)
  misc_feature (41)..(681): Homolog of NCBI NO: 27476086 NR Description: Putative heat shock 70 KD protein, mitochondrial
  misc_feature (36)..(681): Homolog of NCBI NO: 7441879 NR Description: dnaK-type molecular chaperone HSC70-11,
  misc_feature (7)..(681): Homolog of NCBI NO: 585272 NR Description: HEAT SHOCK 70 KD PROTEIN, MITOCHONDRIAL PRECURSOR
  misc_feature (7)..(681): Homolog of NCBI NO: 7441844 NR Description: dnaK-type molecular chaperone PHSP1 precursor,
  misc_feature (35)..(681): Homolog of NCBI NO: 399940 NR Description: HEAT SHOCK 70 KD PROTEIN, MITOCHONDRIAL PRECURSOR
MAIGSLLASRLARSGHALATRAIAQAPRTHNHHHATSPLLSRLGAVARAFSSRPAAADVIGIDLGTTNSCVSVMEGKTPRVIENAEGARTTPSIVATNSKGEILIGITASRQAVTNAENTVRGSKRLIGRAFDDPQTQKEMKMVPYKIVRGTNGDAWVEMAGKSYSPSQIGAFVLTKMKETAEAYLGKSVSKAVITVPAYFNDAQRQATKDAGRIAGLEVMRIINEPTAAALSYGMNNKEGLIAVFDLGGGTFDVSILEISNGVFEVKATNGDTFLGGEDFDATLLNYLVSEYKNSDNIDLSKDKLALQRLREAAEKAKVELSSTPQTEINLPFITADASGAKHFNITLTRSKFESLVGNLIERTRIPCTNCLKDAGVSAKEIDEVLLVGGMTRVPKVQDIVSQIFGKSPSKGVNPDEAVAMGAAIQGGILRGDVKELLLLDVTPLSLGIETLGGIFTRLINRNTTIPTKKSQTFSTAADNQTQVGIKVLQGEREMATDNKLLGEFQLEGIPPAPRGMPQIEVTFDIDANGIVKVSAKDKSTGKEQDITIKSSGGLSDSDIEKMVKEAELNSQRDQERKSLIDLRNSADTTIYSIEKSVSEYKDKVPAEVVTEIQSAVSDLRAAMAGDDSDAIKQKLEAANKAVSKIGQHMQGGGGAAAGDSGSSGGGDQTPEAEYQDPKEAKM

SEQ ID NO: 68242 - protein, 611 aa, Triticum aestivum
  peptide (1)..(611): Ceres Seq. ID no. 12465086
  misc_feature (1)..(580): Pfam Name: Hsp70 protein Pfam Description: Hsp70 protein
  misc_feature (1)..(610): Homolog of NCBI NO: 34878657 NR Description: similar to grp75 [Rattus norvegicus]
  misc_feature (1)..(610): Homolog of NCBI NO: 22962329 NR Description: hypothetical protein [Rhodopseudomonas palustris]
  misc_feature (1)..(608): Homolog of NCBI NO: 585273 NR Description: Heat shock 70 kDa protein, mitochondrial
  misc_feature (1)..(608): Homolog of NCBI NO: 7441881 NR Description: dnaK-type molecular chaperone HSC70-10,
  misc_feature (1)..(608): Homolog of NCBI NO: 15242459 NR Description: heat shock protein 70 (Hsc70-5)
  misc_feature (1)..(608): Homolog of NCBI NO: 27476086 NR Description: Putative heat shock 70 KD protein, mitochondrial
  misc_feature (1)..(608): Homolog of NCBI NO: 7441879 NR Description: dnaK-type molecular chaperone HSC70-11,
  misc_feature (1)..(608): Homolog of NCBI NO: 585272 NR Description: HEAT SHOCK 70 KD PROTEIN, MITOCHONDRIAL PRECURSOR
  misc_feature (1)..(608): Homolog of NCBI NO: 7441844 NR Description: dnaK-type molecular chaperone PHSP1 precursor,
  misc_feature (1)..(608): Homolog of NCBI NO: 399940 NR Description: HEAT SHOCK 70 KD PROTEIN, MITOCHONDRIAL PRECURSOR
MEGKTPRVIENAEGARTTPSIVATNSKGEILIGITASRQAVTNAENTVRGSKRLIGRAFDDPQTQKEMKMVPYKIVRGTNGDAWVEMAGKSYSPSQIGAFVLTKMKETAEAYLGKSVSKAVITVPAYFNDAQRQATKDAGRIAGLEVMRIINEPTAAALSYGMNNKEGLIAVFDLGGGTFDVSILEISNGVFEVKATNGDTFLGGEDFDATLLNYLVSEYKNSDNIDLSKDKLALQRLREAAEKAKVELSSTPQTEINLPFITADASGAKHFNITLTRSKFESLVGNLIERTRIPCTNCLKDAGVSAKEIDEVLLVGGMTRVPKVQDIVSQIFGKSPSKGVNPDEAVAMGAAIQGGILRGDVKELLLLDVTPLSLGIETLGGIFTRLINRNTTIPTKKSQTFSTAADNQTQVGIKVLQGEREMATDNKLLGEFQLEGIPPAPRGMPQIEVTFDIDANGIVKVSAKDKSTGKEQDITIKSSGGLSDSDIEKMVKEAELNSQRDQERKSLIDLRNSADTTIYSIEKSVSEYKDKVPAEVVTEIQSAVSDLRAAMAGDDSDAIKQKLEAANKAVSKIGQHMQGGGGAAAGDSGSSGGGDQTPEAEYQDPKEAKM

SEQ ID NO: 68243 - DNA, 851 bp, Triticum aestivum
  misc_feature (1)..(851): Ceres Seq. ID no. 12613614
acaacttgggtcccccggcggtttcctccttcctctcggacaaaaccaaacgaaccaagatacaaacttcttcttcttcttcttcttcctccggcggatctcatcttcagatcacatccaagcagcgcaagcaggagacgagacgcgctccctcgctcgctccaccgtccacaaccaaaccaggcaaagggcagcgatgacgttcgacaaggtggaggagctgcggccgggcacctacggccacaacctccagctccgggtgctcagctccaagcccgtcgtcctccacaggccgcagggcggcagggccggcggcaacatgcgcatcgccgagtgcatcgtcggcgacgacaccggcgtcgtcgtattcaccgcccgcaacgagcaagtggacgtcatgaagcccggggctgtcgtggaggcgaggaaggcgagggtggacatgtacaaggggtcgatgcgcctggccgtggacaagtgggggacgctcaaggccgccgagagccctgcggacttcaaggtgaaggaggacaacaatgtgtccttggtcgagtttgagctcatcactgtgatgcagtgattgaagagggctcctcctcccccttgcctaggaggaggaggaggaggaggaggcagaggaggctcagcagctgttaggctgagcacaaagcaataagtcggccaatcatggctcatgttcttcaccccctcccccctctctctgtttactctttatttgctgaaagttttgctagtcctgctaccttggattaattgtcgttagtaataccatatatgtttgtgaggagttacaaaaaaaaaaaaaaaaaagcttatcgataccgtcgacc

SEQ ID NO: 68244 - protein, 192 aa, Triticum aestivum
  peptide (1)..(192): Ceres Seq. ID no. 12613615
  misc_feature (68)..(190): Homolog of NCBI NO: 15235304 NR Description: putative protein
  misc_feature (68)..(191): Homolog of NCBI NO: 24413970 NR Description: contains EST AU181579(C50456)~similar to Oryza
  misc_feature (68)..(190): Homolog of NCBI NO: 34909622 NR Description: P0435B05.31 [Oryza sativa (japonica
  misc_feature (48)..(192): Homolog of NCBI NO: 18403397 NR Description: Expressed protein
  misc_feature (68)..(192): Homolog of NCBI NO: 34904470 NR Description: OSJNBa0086P08.14 [Oryza sativa (japonica
  misc_feature (130)..(190): Homolog of NCBI NO: 6573753 NR Description: F20B24.1 [Arabidopsis thaliana]
  misc_feature (68)..(129): Homolog of NCBI NO: 6573753 NR Description: F20B24.1 [Arabidopsis thaliana]
  misc_feature (68)..(192): Homolog of NCBI NO: 18395285 NR Description: expressed protein
  misc_feature (68)..(190): Homolog of NCBI NO: 30681801 NR Description: expressed protein [Arabidopsis thaliana]
  misc_feature (68)..(190): Homolog of NCBI NO: 18391179 NR Description: expressed protein
QLGSPGGFLLPLGQNQTNQDTNFFFFFFFLRRISSSDHIQAAQAGDETRSLARSTVHNQTRQRAAMTFDKVEELRPGTYGHNLQLRVLSSKPVVLHRPQGGRAGGNMRIAECIVGDDTGVVVFTARNEQVDVMKPGAVVEARKARVDMYKGSMRLAVDKWGTLKAAESPADFKVKEDNNVSLVEFELITVMQ

SEQ ID NO: 68245 - protein, 185 aa, Triticum aestivum
  peptide (1)..(185): Ceres Seq. ID no. 12613616
TTWVPRRFPPSSRTKPNEPRYKLLLLLLLPPADLIFRSHPSSASRRRDALPRSLHRPQPNQAKGSDDVRQGGGAAAGHLRPQPPAPGAQLQARRPPQAAGRQGRRQHAHRRVHRRRRHRRRRIHRPQRASGRHEARGCRGGEEGEGGHVQGVDAPGRGQVGDAQGRREPCGLQGEGGQQCVLGRV

SEQ ID NO: 68246 - protein, 127 aa, Triticum aestivum
  peptide (1)..(127): Ceres Seq. ID no. 12613617
  misc_feature (3)..(125): Homolog of NCBI NO: 15235304 NR Description: putative protein
  misc_feature (3)..(126): Homolog of NCBI NO: 24413970 NR Description: contains EST AU181579(C50456)~similar to Oryza
  misc_feature (3)..(125): Homolog of NCBI NO: 34909622 NR Description: P0435B05.31 [Oryza sativa (japonica
  misc_feature (1)..(127): Homolog of NCBI NO: 18403397 NR Description: Expressed protein
  misc_feature (3)..(127): Homolog of NCBI NO: 34904470 NR Description: OSJNBa0086P08.14 [Oryza sativa (japonica
  misc_feature (65)..(125): Homolog of NCBI NO: 6573753 NR Description: F20B24.1 [Arabidopsis thaliana]
  misc_feature (3)..(64): Homolog of NCBI NO: 6573753 NR Description: F20B24.1 [Arabidopsis thaliana]
  misc_feature (3)..(127): Homolog of NCBI NO: 18395285 NR Description: expressed protein
  misc_feature (3)..(125): Homolog of NCBI NO: 30681801 NR Description: expressed protein [Arabidopsis thaliana]
  misc_feature (3)..(125): Homolog of NCBI NO: 18391179 NR Description: expressed protein
MTFDKVEELRPGTYGHNLQLRVLSSKPVVLHRPQGGRAGGNMRIAECIVGDDTGVVVFTARNEQVDVMKPGAVVEARKARVDMYKGSMRLAVDKWGTLKAAESPADFKVKEDNNVSLVEFELITVMQ

SEQ ID NO: 68247 - DNA, 732 bp, Triticum aestivum
  misc_feature (1)..(732): Ceres Seq. ID no. 12613751
atctacttgtagtacgtgttctttcccctccaccgcggccagagaaggaggagcatcgatccatggcgcgcttcttcggccgcctgtgggacagagctcaaggcaagctggatgttgtgaggatatgtgagaaggtgttcgacgaactggccgtcctcaacgccgagaagaacgccaagctcctggacgtcaaaaatctccacgtcgccaccctcatggtttacaactccatcaacaagcaactggtgggacctcacaaggaccctccatgcatgcaggtcgtcaaggagaaagcggagggcttccgcgacaaggggataacgcagcaggagttccgggagctgatcatggagtgggtgaggatcgacctccgcctcgtcctcgccaacaaggccgcggtggccgtcctggcggcaccgctgctcgccgtcacggccaagaacgccggcaggcaggtgccgaggatgagggacgcggtggataaggtgcccacgccgctgctcttcgtcgtcttctccgccgggctcatgctcctgcaggacatcagggcaggcaagcagtgaacacctgaaccggacgcggtgagcaatgcgcgatgtatttaagatgagtgtgcacctttactggaaatttgtatgcaggcagctcggtgtgaaaaatttgtagccaaagaaagtggtaaagggccgtacgtaatggcattcaatcttaatatggttatcaggcggctcc

SEQ ID NO: 68248 - protein, 186 aa, Triticum aestivum
  peptide (1)..(186): Ceres Seq. ID no. 12613752
  misc_feature (21)..(176): Homolog of NCBI NO: 18408144 NR Description: expressed protein
  misc_feature (21)..(184): Homolog of NCBI NO: 38344137 NR Description: OSJNBa0041A02.4 [Oryza sativa (japonica
  misc_feature (21)..(186): Homolog of NCBI NO: 38344138 NR Description: OSJNBa0041A02.5 [Oryza sativa (japonica
LLVVRVLSPPPRPEKEEHRSMARFFGRLWDRAQGKLDVVRICEKVFDELAVLNAEKNAKLLDVKNLHVATLMVYNSINKQLVGPHKDPPCMQVVKEKAEGFRDKGITQQEFRELIMEWVRIDLRLVLANKAAVAVLAAPLLAVTAKNAGRQVPRMRDAVDKVPTPLLFVVFSAGLMLLQDIRAGKQ

SEQ ID NO: 68249 - protein, 166 aa, Triticum aestivum
  peptide (1)..(166): Ceres Seq. ID no. 12613753
  misc_feature (1)..(156): Homolog of NCBI NO: 18408144 NR Description: expressed protein
  misc_feature (1)..(164): Homolog of NCBI NO: 38344137 NR Description: OSJNBa0041A02.4 [Oryza sativa (japonica
  misc_feature (1)..(166): Homolog of NCBI NO: 38344138 NR Description: OSJNBa0041A02.5 [Oryza sativa (japonica
MARFFGRLWDRAQGKLDVVRICEKVFDELAVLNAEKNAKLLDVKNLHVATLMVYNSINKQLVGPHKDPPCMQVVKEKAEGFRDKGITQQEFRELIMEWVRIDLRLVLANKAAVAVLAAPLLAVTAKNAGRQVPRMRDAVDKVPTPLLFVVFSAGLMLLQDIRAGKQ

SEQ ID NO: 68250 - protein, 115 aa, Triticum aestivum
  peptide (1)..(115): Ceres Seq. ID no. 12613754
  misc_feature (1)..(105): Homolog of NCBI NO: 18408144 NR Description: expressed protein
  misc_feature (1)..(113): Homolog of NCBI NO: 38344137 NR Description: OSJNBa0041A02.4 [Oryza sativa (japonica
  misc_feature (1)..(115): Homolog of NCBI NO: 38344138 NR Description: OSJNBa0041A02.5 [Oryza sativa (japonica
MVYNSINKQLVGPHKDPPCMQVVKEKAEGFRDKGITQQEFRELIMEWVRIDLRLVLANKAAVAVLAAPLLAVTAKNAGRQVPRMRDAVDKVPTPLLFVVFSAGLMLLQDIRAGKQ

SEQ ID NO: 68251 - DNA, 781 bp, Triticum aestivum
  misc_feature (1)..(781): Ceres Seq. ID no. 13582876
aaaaaaaactcgctattctcaaaaaagaaaaaagaaaaactcgctgttcttgctctcggccggctgtactgctgctgctccttgagctctccgccctctcccggtctccccaatcgccccgccgccgcggcctccttgctgcctgcgtccgcttccgaccttccgtgctccgtcttctcctcgtcttccccgctcccacctccgcgctgccctcgaggatggaagagccgctgcggtacaagttcgggccgtataagattgacgcgagggaggtcttccacgccacgcccctcacctacgccatggtcaacctccgccccctcctccctggtcatgtgctcgtgtgccccaaacgtgaggtgaaacgatttgctgatctaagttctgatgagactagtgatttgtgggtaactgcaaaagaagttggtgcaaagctcgagcagtaccacaaagcttcttccatcacattcgcgattcaggatggtcctcaggctggccaaacagttgcccatgtccacatccacgtcatccccaggaagaaaggagattttgagaaaaacgatgaaatatatgatgcgattgacgtgaaagagaaggaaatgaaggagaagcttgacctggacgtcgaaagaaaagatagaagcatggaagaaatggctcatgaggccaccgagtaccgcgctcttttctcctagccagatagatgtatttctgatgaactctctaattatcatccgctgccactcttgcctaaaataagccttgtgactgcttgtcctcg

SEQ ID NO: 68252 - protein, 230 aa, Triticum aestivum
  peptide (1)..(230): Ceres Seq. ID no. 13582877
  misc_feature (77)..(229): Homolog of NCBI NO: 6753862 NR Description: fragile histidine triad gene [Mus musculus]
  misc_feature (77)..(229): Homolog of NCBI NO: 15215093 NR Description: Fhit protein [Mus musculus]
  misc_feature (77)..(229): Homolog of NCBI NO: 4503719 NR Description: fragile histidine triad gene
  misc_feature (77)..(229): Homolog of NCBI NO: 11120730 NR Description: fragile histidine triad protein [Rattus
  misc_feature (81)..(229): Homolog of NCBI NO: 28828402 NR Description: similar to diadenosine tetraphosphatase
  misc_feature (79)..(230): Homolog of NCBI NO: 37589828 NR Description: Unknown (protein for MGC:73176) [Danio rerio]
  misc_feature (79)..(229): Homolog of NCBI NO: 30697031 NR Description: bis(5'-adenosyl)-triphosphatase-related
  misc_feature (79)..(229): Homolog of NCBI NO: 8777325 NR Description: bis(5'-adenosyl)-triphosphatase-like protein
  misc_feature (79)..(229): Homolog of NCBI NO: 27808510 NR Description: At5g58240 [Arabidopsis thaliana]
  misc_feature (79)..(230): Homolog of NCBI NO: 27542770 NR Description: ATPase-like protein [Sorghum bicolor]
KKLAILKKEKRKTRCSCSRPAVLLLLLELSALSRSPQSPRRRGLLAACVRFRPSVLRLLLVFPAPTSALPSRMEEPLRYKFGPYKIDAREVFHATPLTYAMVNLRPLLPGHVLVCPKREVKRFADLSSDETSDLWVTAKEVGAKLEQYHKASSITFAIQDGPQAGQTVAHVHIHVIPRKKGDFEKNDEIYDAIDVKEKEMKEKLDLDVERKDRSMEEMAHEATEYRALFS

SEQ ID NO: 68253 - protein, 158 aa, Triticum aestivum
  peptide (1)..(158): Ceres Seq. ID no. 13582878
  misc_feature (5)..(157): Homolog of NCBI NO: 6753862 NR Description: fragile histidine triad gene [Mus musculus]
  misc_feature (5)..(157): Homolog of NCBI NO: 15215093 NR Description: Fhit protein [Mus musculus]
  misc_feature (5)..(157): Homolog of NCBI NO: 4503719 NR Description: fragile histidine triad gene
  misc_feature (5)..(157): Homolog of NCBI NO: 11120730 NR Description: fragile histidine triad protein [Rattus
  misc_feature (9)..(157): Homolog of NCBI NO: 28828402 NR Description: similar to diadenosine tetraphosphatase
  misc_feature (7)..(158): Homolog of NCBI NO: 37589828 NR Description: Unknown (protein for MGC:73176) [Danio rerio]
  misc_feature (7)..(157): Homolog of NCBI NO: 30697031 NR Description: bis(5'-adenosyl)-triphosphatase-related
  misc_feature (7)..(157): Homolog of NCBI NO: 8777325 NR Description: bis(5'-adenosyl)-triphosphatase-like protein
  misc_feature (7)..(157): Homolog of NCBI NO: 27808510 NR Description: At5g58240 [Arabidopsis thaliana]
  misc_feature (7)..(158): Homolog of NCBI NO: 27542770 NR Description: ATPase-like protein [Sorghum bicolor]
MEEPLRYKFGPYKIDAREVFHATPLTYAMVNLRPLLPGHVLVCPKREVKRFADLSSDETSDLWVTAKEVGAKLEQYHKASSITFAIQDGPQAGQTVAHVHIHVIPRKKGDFEKNDEIYDAIDVKEKEMKEKLDLDVERKDRSMEEMAHEATEYRALFS

SEQ ID NO: 68254 - protein, 130 aa, Triticum aestivum
  peptide (1)..(130): Ceres Seq. ID no. 13582879
  misc_feature (1)..(129): Homolog of NCBI NO: 6753862 NR Description: fragile histidine triad gene [Mus musculus]
  misc_feature (1)..(129): Homolog of NCBI NO: 15215093 NR Description: Fhit protein [Mus musculus]
  misc_feature (1)..(129): Homolog of NCBI NO: 4503719 NR Description: fragile histidine triad gene
  misc_feature (1)..(129): Homolog of NCBI NO: 11120730 NR Description: fragile histidine triad protein [Rattus
  misc_feature (1)..(129): Homolog of NCBI NO: 28828402 NR Description: similar to diadenosine tetraphosphatase
  misc_feature (1)..(130): Homolog of NCBI NO: 37589828 NR Description: Unknown (protein for MGC:73176) [Danio rerio]
  misc_feature (1)..(129): Homolog of NCBI NO: 30697031 NR Description: bis(5'-adenosyl)-triphosphatase-related
  misc_feature (1)..(129): Homolog of NCBI NO: 8777325 NR Description: bis(5'-adenosyl)-triphosphatase-like protein
  misc_feature (1)..(129): Homolog of NCBI NO: 27808510 NR Description: At5g58240 [Arabidopsis thaliana]
  misc_feature (1)..(130): Homolog of NCBI NO: 27542770 NR Description: ATPase-like protein [Sorghum bicolor]
MVNLRPLLPGHVLVCPKREVKRFADLSSDETSDLWVTAKEVGAKLEQYHKASSITFAIQDGPQAGQTVAHVHIHVIPRKKGDFEKNDEIYDAIDVKEKEMKEKLDLDVERKDRSMEEMAHEATEYRALFS

SEQ ID NO: 68255 - DNA, 810 bp, Triticum aestivum
  misc_feature (1)..(810): Ceres Seq. ID no. 13582830
cttctttctccttccctgcccaccagtccaccgccgccgcctctccccccatccccctctcccacctcctccggcgtcggccagcaagcagccatggcgagccccgcgcgcatcgacgtggataagctgagcgtggagcagctcaaggcgctcaaggagcagaccgatctggaggtcaatctcctccaggacagcctatccaagatccgcaccgccgccacccgcctcgagaacgccacggccgccctccacgagctctccctccgcccccaagggaagaagctgctcgtgccgctcacggcgtccctctacgtgcccggcacgctcgacgacgccgagaaggtcctcgtcgacgttggcaccggctactacattgagaaaactatgactcaaggaaaagaatactgtgaaaggaaaattaatttgctgaagtccaacttcgatgaactacttgagatggcgaccaaaaagaagagcatagcagatgaaatgggcatgtttctgcaagccaagctgaggcaggcatcaccgagctcgagttcgtgagagcggaatgcgcgccctgtcccttgctttgttgccttgttggagcgccggggtggttcgctcactcgcagccctcagggaacataggaggttctttagctgttttggccgtgtgtgcaaggttctctgagatgatttactgaaacagcctgctccatcgtcagacttcatcctcgagtaatttggaattcggtatcaaacgtgtgtgtcttggatgcacaatctgctttaatggctttgacaatcaattatgagtttgttgct

SEQ ID NO: 68256 - protein, 181 aa, Triticum aestivum
  peptide (1)..(181): Ceres Seq. ID no. 13582831
  misc_feature (55)..(174): Pfam Name: Prefoldin subunit Pfam Description: Prefoldin subunit
  misc_feature (15)..(181): Homolog of NCBI NO: 40746642 NR Description: hypothetical protein AN1205.2 [Aspergillus
  misc_feature (38)..(174): Homolog of NCBI NO: 12643929 NR Description: Prefoldin subunit 5 (C-myc binding protein Mm-1)
  misc_feature (38)..(174): Homolog of NCBI NO: 26348121 NR Description: unnamed protein product [Mus musculus]
  misc_feature (38)..(174): Homolog of NCBI NO: 30585355 NR Description: Homo sapiens prefoldin 5 [synthetic construct]
  misc_feature (38)..(174): Homolog of NCBI NO: 27665420 NR Description: similar to Prefoldin subunit 5 (C-myc binding
  misc_feature (38)..(174): Homolog of NCBI NO: 22202633 NR Description: prefoldin 5 isoform alpha
  misc_feature (38)..(174): Homolog of NCBI NO: 9910216 NR Description: prefoldin 5
  misc_feature (38)..(174): Homolog of NCBI NO: 1731809 NR Description: c-myc binding protein [Homo sapiens]
  misc_feature (33)..(181): Homolog of NCBI NO: 15237277 NR Description: c-myc binding protein MM-1-related protein
  misc_feature (32)..(181): Homolog of NCBI NO: 37535560 NR Description: putative c-myc binding protein
LLSPSLPTSPPPPPLPPSPSPTSSGVGQQAAMASPARIDVDKLSVEQLKALKEQTDLEVNLLQDSLSKIRTAATRLENATAALHELSLRPQGKKLLVPLTASLYVPGTLDDAEKVLVDVGTGYYIEKTMTQGKEYCERKINLLKSNFDELLEMATKKKSIADEMGMFLQAKLRQASPSSSS

SEQ ID NO: 68257 - protein, 150 aa, Triticum aestivum
  peptide (1)..(150): Ceres Seq. ID no. 13582832
  misc_feature (24)..(143): Pfam Name: Prefoldin subunit Pfam Description: Prefoldin subunit
  misc_feature (1)..(150): Homolog of NCBI NO: 40746642 NR Description: hypothetical protein AN1205.2 [Aspergillus
  misc_feature (7)..(143): Homolog of NCBI NO: 22202633 NR Description: prefoldin 5 isoform alpha
  misc_feature (7)..(143): Homolog of NCBI NO: 27665420 NR Description: similar to Prefoldin subunit 5 (C-myc binding
  misc_feature (7)..(143): Homolog of NCBI NO: 30585355 NR Description: Homo sapiens prefoldin 5 [synthetic construct]
  misc_feature (7)..(143): Homolog of NCBI NO: 26348121 NR Description: unnamed protein product [Mus musculus]
  misc_feature (7)..(143): Homolog of NCBI NO: 9910216 NR Description: prefoldin 5
  misc_feature (7)..(143): Homolog of NCBI NO: 12643929 NR Description: Prefoldin subunit 5 (C-myc binding protein Mm-1)
  misc_feature (7)..(143): Homolog of NCBI NO: 1731809 NR Description: c-myc binding protein [Homo sapiens]
  misc_feature (2)..(150): Homolog of NCBI NO: 15237277 NR Description: c-myc binding protein MM-1-related protein
  misc_feature (1)..(150): Homolog of NCBI NO: 37535560 NR Description: putative c-myc binding protein
MASPARIDVDKLSVEQLKALKEQTDLEVNLLQDSLSKIRTAATRLENATAALHELSLRPQGKKLLVPLTASLYVPGTLDDAEKVLVDVGTGYYIEKTMTQGKEYCERKINLLKSNFDELLEMATKKKSIADEMGMFLQAKLRQASPSSSS

SEQ ID NO: 68258 - DNA, 1030 bp, Triticum aestivum
  misc_feature (1)..(1030): Ceres Seq. ID no. 13596009
gaataaaagtctacttcccccggttccgttccgttccgtttctcaggttctctttcctcacaccatcgacacgaatcgaccctgagtccccaatcgaatctcactgagtcccgagtcggtcgaaccgaatccctctcatccccgttgatcgcccacgcccaacattcggggaggaggaatagcggaggaggaggccaaggaccgccgccgccgccgccgccatggccgcgctgccggtgatgaagctggggacgctgctcctgcggacgctgtccaagcctatcgctaaccgcctcaagagccaggccgccgtccaccccaagtttcgcgacttcatcatcagcatcgcccagacaaaccatcgtatcactacaaggatacaaaggcgcatttatgggcatgctactaatgtggctatcagacctttagatgaggagaaggcagtacaagttgctacagatctcattggagaaggcttcatcttttcggttgctgtcgctgctttaattttcgaggtgcaaagaagtgctaggtcagaggctagaaaggaggaagctcgtaaacaggaacttgaggaactgagacaaaaggaagagattttagctaaagatttagaagatctcaagctgaagctggctgaacttgagcgcctcgccaaaggccggggcctttctggaatattgaacttcaaaggtgtcaatgcagcagatagcagcaaggaagcaacacctgcttgatttatcgattcaactttggtcaggagaaagggggatgttgtgttgttgagtttatgcacaaagcacctcacaattggctaattggtttcttctgtcacagttctttgatattatagccatgcccattctttgggtgaatggatcaaattttatggtggttgatccattagacatcctgaaataatagagtgattgtgtgaggaaaaagcccgggtacttttgggtaagtgaccgcagaacaagatataaagatgaatgtattcttactttgggcctttggctcgctgtytaac

SEQ ID NO: 68259 - protein, 171 aa, Triticum aestivum
  peptide (1)..(171): Ceres Seq. ID no. 15221738
  misc_feature (1)..(144): Homolog of NCBI NO: 24649440 NR Description: CG13601-PA [Drosophila melanogaster]
  misc_feature (1)..(145): Homolog of NCBI NO: 26342969 NR Description: unnamed protein product [Mus musculus]
  misc_feature (1)..(138): Homolog of NCBI NO: 13376717 NR Description: OPA3 protein; Optic atrophy 3 (Iraqi-Jewish
  misc_feature (1)..(145): Homolog of NCBI NO: 27676608 NR Description: similar to OPA3 protein
  misc_feature (1)..(138): Homolog of NCBI NO: 21758920 NR Description: unnamed protein product [Homo sapiens]
  misc_feature (1)..(138): Homolog of NCBI NO: 39849948 NR Description: Unknown (protein for MGC:75494) [Homo sapiens]
  misc_feature (1)..(146): Homolog of NCBI NO: 19112998 NR Description: hypothetical coiled-coil protein
  misc_feature (4)..(146): Homolog of NCBI NO: 15230967 NR Description: hypothetical protein [Arabidopsis thaliana]
  misc_feature (4)..(157): Homolog of NCBI NO: 18396819 NR Description: expressed protein [Arabidopsis thaliana]
  misc_feature (1)..(171): Homolog of NCBI NO: 34904528 NR Description: B1066G12.9 [Oryza sativa (japonica
MAALPVMKLGTLLLRTLSKPIANRLKSQAAVHPKFRDFIISIAQTNHRITTRIQRRIYGHATNVAIRPLDEEKAVQVATDLIGEGFIFSVAVAALIFEVQRSARSEARKEEARKQELEELRQKEEILAKDLEDLKLKLAELERLAKGRGLSGILNFKGVNAADSSKEATPA

SEQ ID NO: 68260 - protein, 165 aa, Triticum aestivum
  peptide (1)..(165): Ceres Seq. ID no. 15221739
  misc_feature (1)..(138): Homolog of NCBI NO: 24649440 NR Description: CG13601-PA [Drosophila melanogaster]
  misc_feature (1)..(139): Homolog of NCBI NO: 26342969 NR Description: unnamed protein product [Mus musculus]
  misc_feature (1)..(132): Homolog of NCBI NO: 13376717 NR Description: OPA3 protein; Optic atrophy 3 (Iraqi-Jewish
  misc_feature (1)..(139): Homolog of NCBI NO: 27676608 NR Description: similar to OPA3 protein
  misc_feature (1)..(132): Homolog of NCBI NO: 21758920 NR Description: unnamed protein product [Homo sapiens]
  misc_feature (1)..(132): Homolog of NCBI NO: 39849948 NR Description: Unknown (protein for MGC:75494) [Homo sapiens]
  misc_feature (1)..(140): Homolog of NCBI NO: 19112998 NR Description: hypothetical coiled-coil protein
  misc_feature (1)..(140): Homolog of NCBI NO: 15230967 NR Description: hypothetical protein [Arabidopsis thaliana]
  misc_feature (1)..(151): Homolog of NCBI NO: 18396819 NR Description: expressed protein [Arabidopsis thaliana]
  misc_feature (1)..(165): Homolog of NCBI NO: 34904528 NR Description: B1066G12.9 [Oryza sativa (japonica
MKLGTLLLRTLSKPIANRLKSQAAVHPKFRDFIISIAQTNHRITTRIQRRIYGHATNVAIRPLDEEKAVQVATDLIGEGFIFSVAVAALIFEVQRSARSEARKEEARKQELEELRQKEEILAKDLEDLKLKLAELERLAKGRGLSGILNFKGVNAADSSKEATPA

SEQ ID NO: 68261 - DNA, 1072 bp, Triticum aestivum
  misc_feature (1)..(1072): Ceres Seq. ID no. 13585188
agaacatcctaatcgaaaagcaaaagctactcaagaattgacccaacccacccggccttctcctaccaaccaagcagctccaaacaccaagaaatccacagaaaccgagatctctctctccccgacccgacggatccctggttgttgttgtagctgggcaatggcgaccgacgcgatcctggagaccatcaagcctcggcggagcccgtggctggaggacctcccagtgacgaatgggggcgcagcgaagggcggcaaggtcaacctgtccgggatgcgccggcgcgtgtcgtcgtccttgtcattgagcctccagccgctgtcctcgtcttcgtccgcggcgttccggcgcgcgcggtcgatgccgtcgatcaaggcgctggcggcggcgggcgcggtgcggcagtggtgggagtgggggctcggttgggtgatgacccggaagccctccttcgcgcgtggcctcgagatgagcgatgacgaggccgccctgctcgggtgccactgccgcggcacgctccggcacgtcttctacaaggcacgcgccgaggtgcgccgcctccttggccgcgacggccgcccgctcggaggcgtcgccgcgcaggacttcaggtacgactccgtcagctacgctcagaacttcgacaacggcgacgtcgacgccagatgctagctgctgcgccggcgcacgcatggattcggacgccgccaatcgtgccgaaagtgaaggtatacatggctcgattaatggctacgaactatatcttcttggacgtggcaataaaccgaattgtttgcaagacactagcagcatatagcacggcgtgtgtgtgtgtgtgttttggcggaacgatcgcagatgatccagcagcgagtgatgcgcactgttcagggaccagatgtatatttcttccactcttctttcttgtgtttttccgagtcttttcttggatacatccgtccctacaatgtaatcgagcccgtggatcgggatggggatcctgagctggctaaatgtacatgttgctgtaacacattgcaaaagcaaatcaataagcattcctggaacctg

SEQ ID NO: 68262 - protein, 223 aa, Triticum aestivum
  peptide (1)..(223): Ceres Seq. ID no. 13585189
  misc_feature (60)..(195): Homolog of NCBI NO: 7486016 NR Description: hypothetical protein F23E12.120 - Arabidopsis
  misc_feature (58)..(195): Homolog of NCBI NO: 18418660 NR Description: expressed protein [Arabidopsis thaliana]
  misc_feature (58)..(195): Homolog of NCBI NO: 21593793 NR Description: unknown [Arabidopsis thaliana]
  misc_feature (54)..(221): Homolog of NCBI NO: 28411879 NR Description: OSJNBa0016N23.32 [Oryza sativa (japonica
EHPNRKAKATQELTQPTRPSPTNQAAPNTKKSTETEISLSPTRRIPGCCCSWAMATDAILETIKPRRSPWLEDLPVTNGGAAKGGKVNLSGMRRRVSSSLSLSLQPLSSSSSAAFRRARSMPSIKALAAAGAVRQWWEWGLGWVMTRKPSFARGLEMSDDEAALLGCHCRGTLRHVFYKARAEVRRLLGRDGRPLGGVAAQDFRYDSVSYAQNFDNGDVDARC

SEQ ID NO: 68263 - protein, 170 aa, Triticum aestivum
  peptide (1)..(170): Ceres Seq. ID no. 13585190
  misc_feature (7)..(142): Homolog of NCBI NO: 7486016 NR Description: hypothetical protein F23E12.120 - Arabidopsis
  misc_feature (5)..(142): Homolog of NCBI NO: 18418660 NR Description: expressed protein [Arabidopsis thaliana]
  misc_feature (5)..(142): Homolog of NCBI NO: 21593793 NR Description: unknown [Arabidopsis thaliana]
  misc_feature (1)..(168): Homolog of NCBI NO: 28411879 NR Description: OSJNBa0016N23.32 [Oryza sativa (japonica
MATDAILETIKPRRSPWLEDLPVTNGGAAKGGKVNLSGMRRRVSSSLSLSLQPLSSSSSAAFRRARSMPSIKALAAAGAVRQWWEWGLGWVMTRKPSFARGLEMSDDEAALLGCHCRGTLRHVFYKARAEVRRLLGRDGRPLGGVAAQDFRYDSVSYAQNFDNGDVDARC

SEQ ID NO: 68264 - protein, 132 aa, Triticum aestivum
  peptide (1)..(132): Ceres Seq. ID no. 13585191
  misc_feature (1)..(104): Homolog of NCBI NO: 7486016 NR Description: hypothetical protein F23E12.120 - Arabidopsis
  misc_feature (1)..(104): Homolog of NCBI NO: 18418660 NR Description: expressed protein [Arabidopsis thaliana]
  misc_feature (1)..(104): Homolog of NCBI NO: 21593793 NR Description: unknown [Arabidopsis thaliana]
  misc_feature (1)..(130): Homolog of NCBI NO: 28411879 NR Description: OSJNBa0016N23.32 [Oryza sativa (japonica
MRRRVSSSLSLSLQPLSSSSSAAFRRARSMPSIKALAAAGAVRQWWEWGLGWVMTRKPSFARGLEMSDDEAALLGCHCRGTLRHVFYKARAEVRRLLGRDGRPLGGVAAQDFRYDSVSYAQNFDNGDVDARC

SEQ ID NO: 68265 - DNA, 1135 bp, Triticum aestivum
  misc_feature (1)..(1135): Ceres Seq. ID no. 14301534
atggcagtttgatctcatctcctcctcctcctcctccaccgccgcacgccacccccatccccatccccaccggagccgactgcggcggagcggagcgcaccggagatcttccttctttccttgtcggtaaggttctgtggccatgtctgacagcgagaaagaggtgccagtggaagtggaagaaggcgccacccgcggggccgactgggaggtcgtcacgctcaccgcgtccacctacgccgccgcgcccagcgggccagaaggagcagcagagggcaagaggctcggcgacggcaacgacggccgcgcctcgtccaccacgctgctcatgtcggaccacttcgtgttcccacccagcgagcacgagaacctgcccatagagaccgccctgctcgacccgcctcaggagagcaccagcgtggacgacgccggcttcaagaacgtcggtgggggctacgatgatgggtccgagacggtcaagtactatgacgaggggaagagcctgtcggtgcatgatgccgagatgatgatgggtgacgtggctgagttccacgcccaagatgacggacgcggttacgttgtccatgatgatgatgatgactcccaggacaagtctgatgcgcctctggacagcagcagcagcaagggccgtggctctggtgccccctgccagtgctggttgaagaagcacatgtcatgcctgtatgaccaggccaaggagaccaatcatctctggggtgcggttgtcgtggctgccctggttggccttgtcatcttgtggcgcaaagacaagttgcacatgagctgccttaaatggcgctctcgctcggcagtcagttaatgatccaatccgaattcctggactggtgggtctgtttgtggtcttcttcgtcgatacaatctctgacgagtcttcgcagatcgccctggaagtcattataaccaagaagaagatggccatgccaatatgattcgtgacaatgacgaaaggggtctctagttgtaataatatcaagtttgacagggtattttcttgttgccaggcttgtgagatgccaaagtttcttattgctcttgtacccatagtcgtcgtacctttgcactgtttaatacgaacggcgcgccctttcaagct

SEQ ID NO: 68266 - protein, 232 aa, Triticum aestivum
  peptide (1)..(232): Ceres Seq. ID no. 14301535
  misc_feature (1)..(112): Homolog of NCBI NO: 10241633 NR Description: hypothetical protein [Oryza sativa (indica
  misc_feature (1)..(168): Homolog of NCBI NO: 38346457 NR Description: OSJNBa0019G23.5 [Oryza sativa (japonica
  misc_feature (13)..(227): Homolog of NCBI NO: 30678620 NR Description: expressed protein [Arabidopsis thaliana]
  misc_feature (13)..(227): Homolog of NCBI NO: 18411306 NR Description: expressed protein [Arabidopsis thaliana]
  misc_feature (13)..(227): Homolog of NCBI NO: 21553358 NR Description: unknown [Arabidopsis thaliana]
  misc_feature (13)..(227): Homolog of NCBI NO: 18406940 NR Description: expressed protein [Arabidopsis thaliana]
  misc_feature (13)..(227): Homolog of NCBI NO: 7486469 NR Description: hypothetical protein At2g45980 [imported] -
  misc_feature (33)..(141): Homolog of NCBI NO: 10241633 NR Description: hypothetical protein [Oryza sativa (indica
  misc_feature (33)..(231): Homolog of NCBI NO: 38346457 NR Description: OSJNBa0019G23.5 [Oryza sativa (japonica
  misc_feature (1)..(231): Homolog of NCBI NO: 1808686 NR Description: hypothetical protein [Sporobolus stapfianus]
MSDSEKEVPVEVEEGATRGADWEVVTLTASTYAAAPSGPEGAAEGKRLGDGNDGRASSTTLLMSDHFVFPPSEHENLPIETALLDPPQESTSVDDAGFKNVGGGYDDGSETVKYYDEGKSLSVHDAEMMMGDVAEFHAQDDGRGYVVHDDDDDSQDKSDAPLDSSSSKGRGSGAPCQCWLKKHMSCLYDQAKETNHLWGAVVVAALVGLVILWRKDKLHMSCLKWRSRSAVS

SEQ ID NO: 68267 - protein, 170 aa, Triticum aestivum
  peptide (1)..(170): Ceres Seq. ID no. 14301536
  misc_feature (1)..(50): Homolog of NCBI NO: 10241633 NR Description: hypothetical protein [Oryza sativa (indica
  misc_feature (1)..(106): Homolog of NCBI NO: 38346457 NR Description: OSJNBa0019G23.5 [Oryza sativa (japonica
  misc_feature (1)..(165): Homolog of NCBI NO: 30678620 NR Description: expressed protein [Arabidopsis thaliana]
  misc_feature (1)..(165): Homolog of NCBI NO: 18411306 NR Description: expressed protein [Arabidopsis thaliana]
  misc_feature (1)..(165): Homolog of NCBI NO: 21553358 NR Description: unknown [Arabidopsis thaliana]
  misc_feature (1)..(165): Homolog of NCBI NO: 18406940 NR Description: expressed protein [Arabidopsis thaliana]
  misc_feature (1)..(165): Homolog of NCBI NO: 7486469 NR Description: hypothetical protein At2g45980 [imported] -
  misc_feature (1)..(79): Homolog of NCBI NO: 10241633 NR Description: hypothetical protein [Oryza sativa (indica
  misc_feature (1)..(169): Homolog of NCBI NO: 38346457 NR Description: OSJNBa0019G23.5 [Oryza sativa (japonica
  misc_feature (1)..(169): Homolog of NCBI NO: 1808686 NR Description: hypothetical protein [Sporobolus stapfianus]
MSDHFVFPPSEHENLPIETALLDPPQESTSVDDAGFKNVGGGYDDGSETVKYYDEGKSLSVHDAEMMMGDVAEFHAQDDGRGYVVHDDDDDSQDKSDAPLDSSSSKGRGSGAPCQCWLKKHMSCLYDQAKETNHLWGAVVVAALVGLVILWRKDKLHMSCLKWRSRSAVS

SEQ ID NO: 68268 - protein, 125 aa, Triticum aestivum
  peptide (1)..(125): Ceres Seq. ID no. 14301537
  misc_feature (7)..(125): Pfam Name: Formin Homology 2 Domain Pfam Description: Formin Homology 2 Domain
GSLISSPPPPPPPPHATPIPIPTGADCGGAERTGDLPSFLVGKVLWPCLTARKRCQWKWKKAPPAGPTGRSSRSPRPPTPPRPAGQKEQQRARGSATATTAAPRPPRCSCRTTSCSHPASTRTCP

SEQ ID NO: 68269 - DNA, 1052 bp, Triticum aestivum
  misc_feature (1)..(1052): Ceres Seq. ID no. 13598314
aatcgaaaacattcagacccatcccagccaaaagcacctggccatcagcgttccttctcctagctttgtctcagttgtcttccggtcttctgctctgctctttggactaatggcccatgggaagaggtctaggcagcaggccgagtcgacctcggtcagcctgctggacctggacagcggcgacatggcgcgcatcctgctgctcttctccggccaccaccagcaccacgcccactacgggccttcgtcgcctgagagggtgttcgagtgcaagacctgcaaccggcggttcccgtccttccaggcgctcggtgggcaccgcgccagccacaagaagccgcgcctggcggacggcgccggcgccgagccgcccaagcccaaggtgcacggctgctccatctgcgggctcgagttcgccgtcggccaggcgctcggcggccacatgcgccgccaccgcgctgtcgcggcggcagggcccggcgtcgggcttgggctcagcctcggcctcggtctcgggccgaacgaggacggcaacaagaaggcggcggcggcggccgagctggcgctcgacctgaacgagccggcactggaggaggagccggccgatcgcgccatgcttgggctcgccgtgggattccggccccgtggtggttgactttcgacgttaggttgaacagaagaaatttgcgtctgaaccatacaaattttttgtagttcaatactatttgcattgagctgctcgagaagtcaacgacccttggaacattagaaatgctggctcgcgtatagtataacatttctaaagtctcaggggcaggggctctatatttacaaggtttgacttctggcggtatttgtagtactagacgggtttttctcttctgctccccctttttccacggggagttcagtttttttatgctccttggccttgaggcatatctactacggagtacgtatgaatatggttgtaaacctctcgaattacgcgaatattatacaaggattaaaaaaaaaaaaaaaaaagcttatcgatrccgtcgamacwcaat

SEQ ID NO: 68270 - protein, 217 aa, Triticum aestivum
  peptide (1)..(217): Ceres Seq. ID no. 15222302
  misc_feature (88)..(110): Pfam Name: Zinc finger, C2H2 type Pfam Description: Zinc finger, C2H2 type
  misc_feature (8)..(132): Homolog of NCBI NO: 2346972 NR Description: ZPT2-11 [Petunia x hybrida]
  misc_feature (62)..(152): Homolog of NCBI NO: 2346976 NR Description: ZPT2-13 [Petunia x hybrida]
  misc_feature (57)..(153): Homolog of NCBI NO: 2346974 NR Description: ZPT2-12 [Petunia x hybrida]
  misc_feature (61)..(199): Homolog of NCBI NO: 15226942 NR Description: C2H2-type zinc finger protein -related
  misc_feature (122)..(211): Homolog of NCBI NO: 34908110 NR Description: P0031D11.12 [Oryza sativa (japonica
  misc_feature (37)..(122): Homolog of NCBI NO: 34908110 NR Description: P0031D11.12 [Oryza sativa (japonica
  misc_feature (62)..(154): Homolog of NCBI NO: 1786134 NR Description: PEThy;ZPT2-5 [Petunia x hybrida]
  misc_feature (59)..(122): Homolog of NCBI NO: 30420734 NR Description: zinc finger transcription factor ZFP19
  misc_feature (122)..(211): Homolog of NCBI NO: 30420734 NR Description: zinc finger transcription factor ZFP19
  misc_feature (62)..(154): Homolog of NCBI NO: 2346978 NR Description: ZPT2-14 [Petunia x hybrida]
IENIQTHPSQKHLAISVPSPSFVSVVFRSSALLFGLMAHGKRSRQQAESTSVSLLDLDSGDMARILLLFSGHHQHHAHYGPSSPERVFECKTCNRRFPSFQALGGHRASHKKPRLADGAGAEPPKPKVHGCSICGLEFAVGQALGGHMRRHRAVAAAGPGVGLGLSLGLGLGPNEDGNKKAAAAAELALDLNEPALEEEPADRAMLGLAVGFRPRGG

SEQ ID NO: 68271 - protein, 181 aa, Triticum aestivum
  peptide (1)..(181): Ceres Seq. ID no. 15222303
  misc_feature (52)..(74): Pfam Name: Zinc finger, C2H2 type Pfam Description: Zinc finger, C2H2 type
  misc_feature (1)..(96): Homolog of NCBI NO: 2346972 NR Description: ZPT2-11 [Petunia x hybrida]
  misc_feature (26)..(116): Homolog of NCBI NO: 2346976 NR Description: ZPT2-13 [Petunia x hybrida]
  misc_feature (21)..(117): Homolog of NCBI NO: 2346974 NR Description: ZPT2-12 [Petunia x hybrida]
  misc_feature (25)..(163): Homolog of NCBI NO: 15226942 NR Description: C2H2-type zinc finger protein -related
  misc_feature (86)..(175): Homolog of NCBI NO: 34908110 NR Description: P0031D11.12 [Oryza sativa (japonica
  misc_feature (1)..(86): Homolog of NCBI NO: 34908110 NR Description: P0031D11.12 [Oryza sativa (japonica
  misc_feature (26)..(118): Homolog of NCBI NO: 1786134 NR Description: PEThy;ZPT2-5 [Petunia x hybrida]
  misc_feature (23)..(86): Homolog of NCBI NO: 30420734 NR Description: zinc finger transcription factor ZFP19
  misc_feature (86)..(175): Homolog of NCBI NO: 30420734 NR Description: zinc finger transcription factor ZFP19
  misc_feature (26)..(118): Homolog of NCBI NO: 2346978 NR Description: ZPT2-14 [Petunia x hybrida]
MAHGKRSRQQAESTSVSLLDLDSGDMARILLLFSGHHQHHAHYGPSSPERVFECKTCNRRFPSFQALGGHRASHKKPRLADGAGAEPPKPKVHGCSICGLEFAVGQALGGHMRRHRAVAAAGPGVGLGLSLGLGLGPNEDGNKKAAAAAELALDLNEPALEEEPADRAMLGLAVGFRPRGG

SEQ ID NO: 68272 - protein, 156 aa, Triticum aestivum
  peptide (1)..(156): Ceres Seq. ID no. 15222304
  misc_feature (27)..(49): Pfam Name: Zinc finger, C2H2 type Pfam Description: Zinc finger, C2H2 type
  misc_feature (1)..(71): Homolog of NCBI NO: 2346972 NR Description: ZPT2-11 [Petunia x hybrida]
  misc_feature (1)..(91): Homolog of NCBI NO: 2346976 NR Description: ZPT2-13 [Petunia x hybrida]
  misc_feature (1)..(92): Homolog of NCBI NO: 2346974 NR Description: ZPT2-12 [Petunia x hybrida]
  misc_feature (1)..(138): Homolog of NCBI NO: 15226942 NR Description: C2H2-type zinc finger protein -related
  misc_feature (61)..(150): Homolog of NCBI NO: 34908110 NR Description: P0031D11.12 [Oryza sativa (japonica
  misc_feature (1)..(61): Homolog of NCBI NO: 34908110 NR Description: P0031D11.12 [Oryza sativa (japonica
  misc_feature (1)..(93): Homolog of NCBI NO: 1786134 NR Description: PEThy;ZPT2-5 [Petunia x hybrida]
  misc_feature (1)..(61): Homolog of NCBI NO: 30420734 NR Description: zinc finger transcription factor ZFP19
  misc_feature (61)..(150): Homolog of NCBI NO: 30420734 NR Description: zinc finger transcription factor ZFP19
  misc_feature (1)..(93): Homolog of NCBI NO: 2346978 NR Description: ZPT2-14 [Petunia x hybrida]
MARILLLFSGHHQHHAHYGPSSPERVFECKTCNRRFPSFQALGGHRASHKKPRLADGAGAEPPKPKVHGCSICGLEFAVGQALGGHMRRHRAVAAAGPGVGLGLSLGLGLGPNEDGNKKAAAAAELALDLNEPALEEEPADRAMLGLAVGFRPRGG

SEQ ID NO: 68273 - DNA, 1438 bp, Triticum aestivum
  misc_feature (1)..(1438): Ceres Seq. ID no. 13596284
aaacgacctgccacttccagttctgctattactttagccacttgctgcgcacatctcggtgagctcgccactccggtggcggcggcggcgggcggagggaagaaaatggcaccgccgcggcgcgtgtgcgtgaccggcggcggcgggttcatcgcctcgtggctcgtcaagctgctcctctcccgcggctacgccgtccacgccaccctccgggacccatgtgaccccaagaatgtccacctcaagcagatggacgaggcccgggagaatctgcacctgctcaaggccgacgtgctcgactacgacgcgctaacacgtgcgtttgagggatgtgagggggtcttccacctcgccactccggtgcctgaagataagattgctgatcctgagtcagaagtattggctcctgctgtgaaaggtacttcaaatgtgctgaaggcctgctcagctatgaaggttcagaaggttattgtcttgtcatccaatgctgctgttgattttaacccgaattggcctcaagacagactcaaagatgagagtagctggtcagacaaagatttctgccaggagaatgaggactggtattctgttgccaagattgtggccgaacaggcatccttggaatattcagagaaacatggattaaatgttgttacgctttgccctcctttggtttttggcccattgttgcagcctactgttagaawaccagtagcaaattcttaatctatgttattaatggaggacctgacgtgatgagcaacaagctgtggcacattgtagacgtccgtgatgtcgcggatgccttgctgcttgtgtacgagaaggccgaatcgtctgggagatacatttgcgcgccgaatagcgtctgcacaaaggacttggtggacttgctgaggaagatgtacccacagtacagctatgtgaacaacatcgacgcggaccgtaaagcgccgctgtcatcgcagaagctgaaggatctgggctggaagccgaggaagctggaggagacgctctcggacagcgtgggctgctacgagaaggccggccttctgcagggttccgctgcgcgtcattgccggcttccgcatctgttccgtctggctggtgatcagtgaatgtaccgtggtgactggtgctttgttttcatatggtcggacttctgtaagctgtagtgtcgctggacggagcctcgcaacagcaacaatggtcgaacctcttcctttgcatccacaaataagcagctatccctgctgtatctgccgccccctgtctgtcacctccggaaatggacaaagtgtaaaacaagcagagcagagacgaaatgcatgtacttcctccgttcctaaataagtactatctctttctagagatttgtataagtgactacatacagagcaaaatgagtgaatctacactctaaattatgtttacatcc

SEQ ID NO: 68274 - protein, 241 aa, Triticum aestivum
  peptide (1)..(241): Ceres Seq. ID no. 15221824
  misc_feature (42)..(233): Pfam Name: NAD dependent epimerase/dehydratase family Pfam Description: NAD dependent epimerase/dehydratase family
  misc_feature (23)..(240): Homolog of NCBI NO: 7431410 NR Description: cinnamoyl CoA reductase - maize
  misc_feature (21)..(240): Homolog of NCBI NO: 3242328 NR Description: cinnamoyl-CoA reductase [Zea mays]
  misc_feature (24)..(240): Homolog of NCBI NO: 25140432 NR Description: cinnamoyl CoA reductase [Hordeum vulgare]
  misc_feature (33)..(238): Homolog of NCBI NO: 17978649 NR Description: cinnamoyl-CoA reductase [Pinus taeda]
  misc_feature (42)..(240): Homolog of NCBI NO: 9964087 NR Description: cinnamoyl CoA reductase [Lolium perenne]
  misc_feature (27)..(240): Homolog of NCBI NO: 3341511 NR Description: cinnamoyl-CoA reductase [Saccharum officinarum]
  misc_feature (10)..(240): Homolog of NCBI NO: 17978549 NR Description: cinnamoyl-CoA reductase [Lolium perenne]
  misc_feature (36)..(234): Homolog of NCBI NO: 6554472 NR Description: putative cinnamoyl-CoA reductase; 14056-15506
  misc_feature (41)..(231): Homolog of NCBI NO: 15226135 NR Description: cinnamoyl-CoA reductase family [Arabidopsis
  misc_feature (36)..(234): Homolog of NCBI NO: 15223068 NR Description: cinnamoyl-CoA reductase family [Arabidopsis
  misc_feature (236)..(236): Xaa is any aa, unknown or other
KRPATSSSAITLATCCAHLGELATPVAAAAGGGKKMAPPRRVCVTGGGGFIASWLVKLLLSRGYAVHATLRDPCDPKNVHLKQMDEARENLHLLKADVLDYDALTRAFEGCEGVFHLATPVPEDKIADPESEVLAPAVKGTSNVLKACSAMKVQKVIVLSSNAAVDFNPNWPQDRLKDESSWSDKDFCQENEDWYSVAKIVAEQASLEYSEKHGLNVVTLCPPLVFGPLLQPTVRXPVANS

SEQ ID NO: 68275 - protein, 206 aa, Triticum aestivum
  peptide (1)..(206): Ceres Seq. ID no. 15221825
  misc_feature (7)..(198): Pfam Name: NAD dependent epimerase/dehydratase family Pfam Description: NAD dependent epimerase/dehydratase family
  misc_feature (1)..(205): Homolog of NCBI NO: 7431410 NR Description: cinnamoyl CoA reductase - maize
  misc_feature (1)..(205): Homolog of NCBI NO: 3242328 NR Description: cinnamoyl-CoA reductase [Zea mays]
  misc_feature (1)..(205): Homolog of NCBI NO: 25140432 NR Description: cinnamoyl CoA reductase [Hordeum vulgare]
  misc_feature (1)..(203): Homolog of NCBI NO: 17978649 NR Description: cinnamoyl-CoA reductase [Pinus taeda]
  misc_feature (7)..(205): Homolog of NCBI NO: 9964087 NR Description: cinnamoyl CoA reductase [Lolium perenne]
  misc_feature (1)..(205): Homolog of NCBI NO: 3341511 NR Description: cinnamoyl-CoA reductase [Saccharum officinarum]
  misc_feature (1)..(205): Homolog of NCBI NO: 17978549 NR Description: cinnamoyl-CoA reductase [Lolium perenne]
  misc_feature (1)..(199): Homolog of NCBI NO: 6554472 NR Description: putative cinnamoyl-CoA reductase; 14056-15506
  misc_feature (6)..(196): Homolog of NCBI NO: 15226135 NR Description: cinnamoyl-CoA reductase family [Arabidopsis
  misc_feature (1)..(199): Homolog of NCBI NO: 15223068 NR Description: cinnamoyl-CoA reductase family [Arabidopsis
  misc_feature (201)..(201): Xaa is any aa, unknown or other
MAPPRRVCVTGGGGFIASWLVKLLLSRGYAVHATLRDPCDPKNVHLKQMDEARENLHLLKADVLDYDALTRAFEGCEGVFHLATPVPEDKIADPESEVLAPAVKGTSNVLKACSAMKVQKVIVLSSNAAVDFNPNWPQDRLKDESSWSDKDFCQENEDWYSVAKIVAEQASLEYSEKHGLNVVTLCPPLVFGPLLQPTVRXPVANS

SEQ ID NO: 68276 - protein, 158 aa, Triticum aestivum
  peptide (1)..(158): Ceres Seq. ID no. 15221826
  misc_feature (1)..(150): Pfam Name: NAD dependent epimerase/dehydratase family Pfam Description: NAD dependent epimerase/dehydratase family
  misc_feature (1)..(157): Homolog of NCBI NO: 7431410 NR Description: cinnamoyl CoA reductase - maize
  misc_feature (1)..(157): Homolog of NCBI NO: 3242328 NR Description: cinnamoyl-CoA reductase [Zea mays]
  misc_feature (1)..(157): Homolog of NCBI NO: 25140432 NR Description: cinnamoyl CoA reductase [Hordeum vulgare]
  misc_feature (1)..(155): Homolog of NCBI NO: 17978649 NR Description: cinnamoyl-CoA reductase [Pinus taeda]
  misc_feature (1)..(157): Homolog of NCBI NO: 9964087 NR Description: cinnamoyl CoA reductase [Lolium perenne]
  misc_feature (1)..(157): Homolog of NCBI NO: 3341511 NR Description: cinnamoyl-CoA reductase [Saccharum officinarum]
  misc_feature (1)..(157): Homolog of NCBI NO: 17978549 NR Description: cinnamoyl-CoA reductase [Lolium perenne]
  misc_feature (1)..(151): Homolog of NCBI NO: 6554472 NR Description: putative cinnamoyl-CoA reductase; 14056-15506
  misc_feature (1)..(148): Homolog of NCBI NO: 15226135 NR Description: cinnamoyl-CoA reductase family [Arabidopsis
  misc_feature (1)..(151): Homolog of NCBI NO: 15223068 NR Description: cinnamoyl-CoA reductase family [Arabidopsis
  misc_feature (153)..(153): Xaa is any aa, unknown or other
MDEARENLHLLKADVLDYDALTRAFEGCEGVFHLATPVPEDKIADPESEVLAPAVKGTSNVLKACSAMKVQKVIVLSSNAAVDFNPNWPQDRLKDESSWSDKDFCQENEDWYSVAKIVAEQASLEYSEKHGLNVVTLCPPLVFGPLLQPTVRXPVANS

SEQ ID NO: 68277 - DNA, 1290 bp, Triticum aestivum
  misc_feature (1)..(1290): Ceres Seq. ID no. 15225786
aattccttccagtcccccctctctctctcctccctacaattcacaattcgaaggcgcatccttgccccggtaagcggcggcggcgagtctacaggtttcctggggcggaggcgatggcggccgcaggcaagttcaaccggagtaacccggcggtgaagcggatcctgcaggaggtgaaggagatgcagtctaatccttcccccgatttcatggccttgcccctcgaggaggacatttttgagtggcaatttgctatcctggggcctcgagacagcgaatttgagggaggaatctaccacgggaggatccagttgccctcagactacccgttcaagccgccatccttcatgctgctcacgccaagtggaagattcgagattcagaagaagatatgtttgagcatatcaaattaccaccccgaacactggcagccatcatggagtgtacgcacagcactagtagcattgattgctttcatgccaacaaatcctggtggggcattgggttcactggactacaaaaaggaagatagacgagcgcttgccatcaaatcacgtgaaacaccaccaaaattcggctccccagaacgccaaagtgtaattgacgagatccatgagcaaatgctcagtaaagctccacctgttcctcaactgctgacaattggctctgaagaggagactaacaagacggcacccgacacttctggtgaacatgctgtcaaggcagcagaaggtgtcaacacttctggcagcagctctggttctgctaatgatactgaccttccaaagcctgattcagagtcagaagttgcagaaaacattgccagagctcaggcagatgtaatccccagggacagcggtccgagagttgttacagcaccgcagaaccccgttgtcacaatccagaagccaaagcatgacaggttgttgacgttggctgcatttgggctgactcttgctatcatggccctcgtgataaagaagttcttcaaaatcaatggtctggctggttacattgagggcaagttttaggtaggtttgtgcgtaagttgatataagaggagcgcctgcattatgcgtctgagcggctatgttatccttaccatatcttatataaaccacctaagaaatgtaaatggttattgtctagctatagatgaagtgaggtggtggtaccacccgtaccctactgtatgtagcactgatggaatacatgatatttcattatatgtgtgcgtgtgtggcttaagttgtaacgtttgttctggatgaagggcctcttggttactgc

SEQ ID NO: 68278 - protein, 342 aa, Triticum aestivum
  peptide (1)..(342): Ceres Seq. ID no. 15225787
  misc_feature (43)..(186): Homolog of NCBI NO: 34867116 NR Description: similar to non-canonical ubquitin conjugating
  misc_feature (43)..(186): Homolog of NCBI NO: 9453733 NR Description: bA11D8.1 (yeast ubiquitin conjugating enzyme UBC6
  misc_feature (43)..(186): Homolog of NCBI NO: 15277421 NR Description: ubiquitin-conjugating enzyme E2, J1
  misc_feature (43)..(186): Homolog of NCBI NO: 6841528 NR Description: HSPC153 [Homo sapiens]
  misc_feature (43)..(305): Homolog of NCBI NO: 39596027 NR Description: Hypothetical protein CBG13052 [Caenorhabditis
  misc_feature (43)..(304): Homolog of NCBI NO: 31980960 NR Description: ubiquitin-conjugating enzyme E2, J1
  misc_feature (43)..(331): Homolog of NCBI NO: 7363050 NR Description: Non-Canonical UBiquitin Conjugating Enzyme 1
  misc_feature (43)..(307): Homolog of NCBI NO: 7362937 NR Description: Non-Canonical UBiquitin Conjugating Enzyme 1
  misc_feature (43)..(329): Homolog of NCBI NO: 38181767 NR Description: Unknown (protein for MGC:63554) [Danio rerio]
  misc_feature (43)..(339): Homolog of NCBI NO: 18401338 NR Description: ubiquitin-conjugating enzyme, putative
FLPVPPLSLLPTIHNSKAHPCPGKRRRRVYRFPGAEAMAAAGKFNRSNPAVKRILQEVKEMQSNPSPDFMALPLEEDIFEWQFAILGPRDSEFEGGIYHGRIQLPSDYPFKPPSFMLLTPSGRFEIQKKICLSISNYHPEHWQPSWSVRTALVALIAFMPTNPGGALGSLDYKKEDRRALAIKSRETPPKFGSPERQSVIDEIHEQMLSKAPPVPQLLTIGSEEETNKTAPDTSGEHAVKAAEGVNTSGSSSGSANDTDLPKPDSESEVAENIARAQADVIPRDSGPRVVTAPQNPVVTIQKPKHDRLLTLAAFGLTLAIMALVIKKFFKINGLAGYIEGKF

SEQ ID NO: 68279 - protein, 305 aa, Triticum aestivum
  peptide (1)..(305): Ceres Seq. ID no. 15225788
  misc_feature (6)..(149): Homolog of NCBI NO: 15277421 NR Description: ubiquitin-conjugating enzyme E2, J1
  misc_feature (6)..(149): Homolog of NCBI NO: 9453733 NR Description: bA11D8.1 (yeast ubiquitin conjugating enzyme UBC6
  misc_feature (6)..(149): Homolog of NCBI NO: 34867116 NR Description: similar to non-canonical ubquitin conjugating
  misc_feature (6)..(149): Homolog of NCBI NO: 6841528 NR Description: HSPC153 [Homo sapiens]
  misc_feature (6)..(268): Homolog of NCBI NO: 39596027 NR Description: Hypothetical protein CBG13052 [Caenorhabditis
  misc_feature (6)..(267): Homolog of NCBI NO: 31980960 NR Description: ubiquitin-conjugating enzyme E2, J1
  misc_feature (6)..(294): Homolog of NCBI NO: 7363050 NR Description: Non-Canonical UBiquitin Conjugating Enzyme 1
  misc_feature (6)..(270): Homolog of NCBI NO: 7362937 NR Description: Non-Canonical UBiquitin Conjugating Enzyme 1
  misc_feature (6)..(292): Homolog of NCBI NO: 38181767 NR Description: Unknown (protein for MGC:63554) [Danio rerio]
  misc_feature (6)..(302): Homolog of NCBI NO: 18401338 NR Description: ubiquitin-conjugating enzyme, putative
MAAAGKFNRSNPAVKRILQEVKEMQSNPSPDFMALPLEEDIFEWQFAILGPRDSEFEGGIYHGRIQLPSDYPFKPPSFMLLTPSGRFEIQKKICLSISNYHPEHWQPSWSVRTALVALIAFMPTNPGGALGSLDYKKEDRRALAIKSRETPPKFGSPERQSVIDEIHEQMLSKAPPVPQLLTIGSEEETNKTAPDTSGEHAVKAAEGVNTSGSSSGSANDTDLPKPDSESEVAENIARAQADVIPRDSGPRVVTAPQNPVVTIQKPKHDRLLTLAAFGLTLAIMALVIKKFFKINGLAGYIEGKF

SEQ ID NO: 68280 - protein, 282 aa, Triticum aestivum
  peptide (1)..(282): Ceres Seq. ID no. 15225789
  misc_feature (1)..(126): Homolog of NCBI NO: 15277421 NR Description: ubiquitin-conjugating enzyme E2, J1
  misc_feature (1)..(126): Homolog of NCBI NO: 9453733 NR Description: bA11D8.1 (yeast ubiquitin conjugating enzyme UBC6
  misc_feature (1)..(126): Homolog of NCBI NO: 34867116 NR Description: similar to non-canonical ubquitin conjugating
  misc_feature (1)..(126): Homolog of NCBI NO: 6841528 NR Description: HSPC153 [Homo sapiens]
  misc_feature (1)..(245): Homolog of NCBI NO: 39596027 NR Description: Hypothetical protein CBG13052 [Caenorhabditis
  misc_feature (1)..(244): Homolog of NCBI NO: 31980960 NR Description: ubiquitin-conjugating enzyme E2, J1
  misc_feature (1)..(271): Homolog of NCBI NO: 7363050 NR Description: Non-Canonical UBiquitin Conjugating Enzyme 1
  misc_feature (1)..(247): Homolog of NCBI NO: 7362937 NR Description: Non-Canonical UBiquitin Conjugating Enzyme 1
  misc_feature (1)..(269): Homolog of NCBI NO: 38181767 NR Description: Unknown (protein for MGC:63554) [Danio rerio]
  misc_feature (1)..(279): Homolog of NCBI NO: 18401338 NR Description: ubiquitin-conjugating enzyme, putative
MQSNPSPDFMALPLEEDIFEWQFAILGPRDSEFEGGIYHGRIQLPSDYPFKPPSFMLLTPSGRFEIQKKICLSISNYHPEHWQPSWSVRTALVALIAFMPTNPGGALGSLDYKKEDRRALAIKSRETPPKFGSPERQSVIDEIHEQMLSKAPPVPQLLTIGSEEETNKTAPDTSGEHAVKAAEGVNTSGSSSGSANDTDLPKPDSESEVAENIARAQADVIPRDSGPRVVTAPQNPVVTIQKPKHDRLLTLAAFGLTLAIMALVIKKFFKINGLAGYIEGKF

SEQ ID NO: 68281 - DNA, 1288 bp, Triticum aestivum
  misc_feature (1)..(1288): Ceres Seq. ID no. 13598301
  misc_feature: Pfam Name: DUF1664 Pfam Description: Protein of unknown function (DUF1664)
cttccccgccccattcgtcactgatcccccttctagaacctcccagaagccgaacgagagagcccgcaggggcggcgcacgggcatggcgatggcgacgcacacgggggtcgccgcctccaaggtcctcatcctcgtcggcgcaggcctgacgggatcgatcgtgcttcggaatggccgcttgtcggatgtattggcggagctccaggagctcatgaagggcgtaaatcaaggagaaggctcgagcgcatatgacatggctcttatccaagctcagattcggcatttagcccaagaagtcagagatttaactttgtcaaagcccattaccatattgagcggcaaatcggactcgggaggcagtttatcgtcctacatactgccagcagctgcagttggagcattaggttattgctatatgtggtgtaagggatggtccttgtcagatgtcatgtttgtcacaaaacgcaatatggccagtgctgtcgatagcatgtcgaagcaattggagcaagtttcatcagcactagcagcaaccaaaagacatctaacaaaacgccttgagaatttggatggcaaaatggacgaacaagtggaggtctccaaacaaatacggaatgaggtcactgatgttaaaactgatctgtcccaaattggctttgacgttgaagcaattcaacagatggtagctggactggaagagaagattgagttgcttgacaataaacaggatgcggctaatgctggtatatggtatctctgccgaatggcaggaggtataaaagagggaataaatgccaagtttttccaagaagcggatgaaaaactcaagctcttggacctggctcatactgaaaagaagccggtgaagggtctggagttatttctggagagcaccaaggaagtcaaggcactcgactccaagcctaagaccatcgtgcagattgatgccaagaaaccgatgaaggcgttcgacgtgcctgtgaagagcgctgcggtgcacaggtcaaacaggttcttaattcgcaaggaaggcctcgcactgtgatggacgccttcccgtgctgcttgcgatgtacattgcgttcttgcttgatttgtttggtagaaaatatagaagaataacctgcatcccgagtggtgattttccaggatagacaggttgatacgtctcaaggcaatttgtatttgttcctttgtattttttgggtcatttcatgttctggtctgaagttgctcgcttgtaaacaagtgaagaaataaataattaaaatacgttttgcattctc

SEQ ID NO: 68282 - protein, 320 aa, Triticum aestivum
  peptide (1)..(320): Ceres Seq. ID no. 15222293
  misc_feature: Pfam Name: DUF1664 Pfam Description: Protein of unknown function (DUF1664)
  misc_feature (13)..(222): Homolog of NCBI NO: 22329773 NR Description: expressed protein [Arabidopsis thaliana]
  misc_feature (9)..(222): Homolog of NCBI NO: 30688826 NR Description: expressed protein [Arabidopsis thaliana]
  misc_feature (14)..(215): Homolog of NCBI NO: 34894218 NR Description: P0439B06.30 [Oryza sativa (japonica
  misc_feature (1)..(225): Homolog of NCBI NO: 34906300 NR Description: unnamed protein product [Oryza sativa (japonica
  misc_feature (3)..(256): Homolog of NCBI NO: 7487252 NR Description: hypothetical protein At2g02730 [imported] -
  misc_feature (3)..(256): Homolog of NCBI NO: 15227027 NR Description: expressed protein [Arabidopsis thaliana]
  misc_feature (3)..(293): Homolog of NCBI NO: 25361065 NR Description: protein T7N9.6 [imported] - Arabidopsis thaliana
  misc_feature (3)..(293): Homolog of NCBI NO: 21537323 NR Description: unknown [Arabidopsis thaliana]
  misc_feature (3)..(293): Homolog of NCBI NO: 18396143 NR Description: bZIP family transcription factor [Arabidopsis
  misc_feature (3)..(281): Homolog of NCBI NO: 18390460 NR Description: expressed protein [Arabidopsis thaliana]
MAMATHTGVAASKVLILVGAGLTGSIVLRNGRLSDVLAELQELMKGVNQGEGSSAYDMALIQAQIRHLAQEVRDLTLSKPITILSGKSDSGGSLSSYILPAAAVGALGYCYMWCKGWSLSDVMFVTKRNMASAVDSMSKQLEQVSSALAATKRHLTKRLENLDGKMDEQVEVSKQIRNEVTDVKTDLSQIGFDVEAIQQMVAGLEEKIELLDNKQDAANAGIWYLCRMAGGIKEGINAKFFQEADEKLKLLDLAHTEKKPVKGLELFLESTKEVKALDSKPKTIVQIDAKKPMKAFDVPVKSAAVHRSNRFLIRKEGLAL

SEQ ID NO: 68283 - protein, 318 aa, Triticum aestivum
  peptide (1)..(318): Ceres Seq. ID no. 15222294
  misc_feature: Pfam Name: DUF1664 Pfam Description: Protein of unknown function (DUF1664)
  misc_feature (11)..(220): Homolog of NCBI NO: 22329773 NR Description: expressed protein [Arabidopsis thaliana]
  misc_feature (7)..(220): Homolog of NCBI NO: 30688826 NR Description: expressed protein [Arabidopsis thaliana]
  misc_feature (12)..(213): Homolog of NCBI NO: 34894218 NR Description: P0439B06.30 [Oryza sativa (japonica
  misc_feature (1)..(223): Homolog of NCBI NO: 34906300 NR Description: unnamed protein product [Oryza sativa (japonica
  misc_feature (1)..(254): Homolog of NCBI NO: 7487252 NR Description: hypothetical protein At2g02730 [imported] -
  misc_feature (1)..(254): Homolog of NCBI NO: 15227027 NR Description: expressed protein [Arabidopsis thaliana]
  misc_feature (1)..(291): Homolog of NCBI NO: 25361065 NR Description: protein T7N9.6 [imported] - Arabidopsis thaliana
  misc_feature (1)..(291): Homolog of NCBI NO: 21537323 NR Description: unknown [Arabidopsis thaliana]
  misc_feature (1)..(291): Homolog of NCBI NO: 18396143 NR Description: bZIP family transcription factor [Arabidopsis
  misc_feature (1)..(279): Homolog of NCBI NO: 18390460 NR Description: expressed protein [Arabidopsis thaliana]
MATHTGVAASKVLILVGAGLTGSIVLRNGRLSDVLAELQELMKGVNQGEGSSAYDMALIQAQIRHLAQEVRDLTLSKPITILSGKSDSGGSLSSYILPAAAVGALGYCYMWCKGWSLSDVMFVTKRNMASAVDSMSKQLEQVSSALAATKRHLTKRLENLDGKMDEQVEVSKQIRNEVTDVKTDLSQIGFDVEAIQQMVAGLEEKIELLDNKQDAANAGIWYLCRMAGGIKEGINAKFFQEADEKLKLLDLAHTEKKPVKGLELFLESTKEVKALDSKPKTIVQIDAKKPMKAFDVPVKSAAVHRSNRFLIRKEGLAL

SEQ ID NO: 68284 - protein, 277 aa, Triticum aestivum
  peptide (1)..(277): Ceres Seq. ID no. 15222295
  misc_feature: Pfam Name: DUF1664 Pfam Description: Protein of unknown function (DUF1664)
  misc_feature (1)..(179): Homolog of NCBI NO: 22329773 NR Description: expressed protein [Arabidopsis thaliana]
  misc_feature (1)..(179): Homolog of NCBI NO: 30688826 NR Description: expressed protein [Arabidopsis thaliana]
  misc_feature (1)..(172): Homolog of NCBI NO: 34894218 NR Description: P0439B06.30 [Oryza sativa (japonica
  misc_feature (1)..(182): Homolog of NCBI NO: 34906300 NR Description: unnamed protein product [Oryza sativa (japonica
  misc_feature (1)..(213): Homolog of NCBI NO: 7487252 NR Description: hypothetical protein At2g02730 [imported] -
  misc_feature (1)..(213): Homolog of NCBI NO: 15227027 NR Description: expressed protein [Arabidopsis thaliana]
  misc_feature (1)..(250): Homolog of NCBI NO: 25361065 NR Description: protein T7N9.6 [imported] - Arabidopsis thaliana
  misc_feature (1)..(250): Homolog of NCBI NO: 21537323 NR Description: unknown [Arabidopsis thaliana]
  misc_feature (1)..(250): Homolog of NCBI NO: 18396143 NR Description: bZIP family transcription factor [Arabidopsis
  misc_feature (1)..(238): Homolog of NCBI NO: 18390460 NR Description: expressed protein [Arabidopsis thaliana]
MKGVNQGEGSSAYDMALIQAQIRHLAQEVRDLTLSKPITILSGKSDSGGSLSSYILPAAAVGALGYCYMWCKGWSLSDVMFVTKRNMASAVDSMSKQLEQVSSALAATKRHLTKRLENLDGKMDEQVEVSKQIRNEVTDVKTDLSQIGFDVEAIQQMVAGLEEKIELLDNKQDAANAGIWYLCRMAGGIKEGINAKFFQEADEKLKLLDLAHTEKKPVKGLELFLESTKEVKALDSKPKTIVQIDAKKPMKAFDVPVKSAAVHRSNRFLIRKEGLAL

SEQ ID NO: 68285 - DNA, 1253 bp, Triticum aestivum
  misc_feature (1)..(1253): Ceres Seq. ID no. 13654231
cttatctcggcgccggagcccacgaccgcttccccgctcaccaccccaaccccgaaatatcccccaattccgacgcgaccgcggaaccctagccccccggcaatcttcgctggacccggagagccgctccggcgccatggcatccccggaaggatcaaactgggtattcgactgccccctcatggacgaccttgctgccgccgacttcgccgcggcatccgcaggaggcttctactggaccccgccgatgcagccgcagatgcacactcttgcgcaggccgtctccgccaccccggctcccaatccctgtgctgaaatcaatagctctgtttcggtggactgggaccatgccaaaggacaaccgaaaaataaacgtcctaggtcagaaactggtgctcaacctagctccaaagcatgcagggagaaagtgagaagggacaagctaaacgagaggttcttggaattgggtgctgtcttggatccggggaaaacacctaaaatcgacaaatgtgctatattaaatgatgctatccgtgcggtaactgaattgcgtagtgaagcagagaagttgaaggattccaatgagtctctccaagagaagattagagagctaaaggctgagaagaatgagctacgagatgagaagcaaaagttgaaggcggagaaagagagcctggagcagcagattaagttcatgaatgcccgtcagagcctcgtaccacacccttctgtcatcccagctgctgcattcgctgccgcccaaggccaagcggcagggcacaagctgatgatgcctgtgatgagctacccaggatttcccatgtggcagttcatgccgccttcagatgttgatacctccgatgaccccaagtcatgccctccggttgcataagccagcaaaaatcatttgcctcatctatctcatggggaaggatggctaaaaagccgtccgttaaattatatcttagtcgtcagtgttactatgcagaagccgtttagtgttactatatgtagttaaatcaagaaccgaactgaagcgtcgtcgttgtatcacccgggaacatttgattatcttgtgaaaccgttgtatattgttagtaaataaataccatccgttgaagcaaatggcgcttggacgccatagcattaccgacttgttactttgttcgacatgttgcccgtgatttttgacctataacataaatatgttgtgctgcaggtcaaaataaaaataaaaatatataggttgtgct

SEQ ID NO: 68286 - protein, 296 aa, Triticum aestivum
  peptide (1)..(296): Ceres Seq. ID no. 13654232
  misc_feature (135)..(184): Pfam Name: Helix-loop-helix DNA-binding domain Pfam Description: Helix-loop-helix DNA-binding domain
  misc_feature (105)..(296): Homolog of NCBI NO: 30682847 NR Description: bHLH protein [Arabidopsis thaliana]
  misc_feature (105)..(296): Homolog of NCBI NO: 18414212 NR Description: bHLH protein [Arabidopsis thaliana]
  misc_feature (105)..(296): Homolog of NCBI NO: 22331274 NR Description: bHLH protein [Arabidopsis thaliana]
  misc_feature (105)..(296): Homolog of NCBI NO: 20127030 NR Description: putative bHLH transcription factor [Arabidopsis
  misc_feature (113)..(296): Homolog of NCBI NO: 15223710 NR Description: bHLH protein [Arabidopsis thaliana]
  misc_feature (46)..(296): Homolog of NCBI NO: 21592325 NR Description: bHLH transcription factor, putative [Arabidopsis
  misc_feature (46)..(296): Homolog of NCBI NO: 15239706 NR Description: bHLH protein [Arabidopsis thaliana]
  misc_feature (96)..(296): Homolog of NCBI NO: 38636768 NR Description: helix-loop-helix-like protein
  misc_feature (96)..(296): Homolog of NCBI NO: 29367409 NR Description: helix-loop-helix-like protein
  misc_feature (46)..(296): Homolog of NCBI NO: 32352190 NR Description: hypothetical protein [Oryza sativa (japonica
LSRRRSPRPLPRSPPQPRNIPQFRRDRGTLAPRQSSLDPESRSGAMASPEGSNWVFDCPLMDDLAAADFAAASAGGFYWTPPMQPQMHTLAQAVSATPAPNPCAEINSSVSVDWDHAKGQPKNKRPRSETGAQPSSKACREKVRRDKLNERFLELGAVLDPGKTPKIDKCAILNDAIRAVTELRSEAEKLKDSNESLQEKIRELKAEKNELRDEKQKLKAEKESLEQQIKFMNARQSLVPHPSVIPAAAFAAAQGQAAGHKLMMPVMSYPGFPMWQFMPPSDVDTSDDPKSCPPVA

SEQ ID NO: 68287 - protein, 251 aa, Triticum aestivum
  peptide (1)..(251): Ceres Seq. ID no. 13654233
  misc_feature (90)..(139): Pfam Name: Helix-loop-helix DNA-binding domain Pfam Description: Helix-loop-helix DNA-binding domain
  misc_feature (60)..(251): Homolog of NCBI NO: 30682847 NR Description: bHLH protein [Arabidopsis thaliana]
  misc_feature (60)..(251): Homolog of NCBI NO: 18414212 NR Description: bHLH protein [Arabidopsis thaliana]
  misc_feature (60)..(251): Homolog of NCBI NO: 22331274 NR Description: bHLH protein [Arabidopsis thaliana]
  misc_feature (60)..(251): Homolog of NCBI NO: 20127030 NR Description: putative bHLH transcription factor [Arabidopsis
  misc_feature (68)..(251): Homolog of NCBI NO: 15223710 NR Description: bHLH protein [Arabidopsis thaliana]
  misc_feature (1)..(251): Homolog of NCBI NO: 21592325 NR Description: bHLH transcription factor, putative [Arabidopsis
  misc_feature (1)..(251): Homolog of NCBI NO: 15239706 NR Description: bHLH protein [Arabidopsis thaliana]
  misc_feature (51)..(251): Homolog of NCBI NO: 38636768 NR Description: helix-loop-helix-like protein
  misc_feature (51)..(251): Homolog of NCBI NO: 29367409 NR Description: helix-loop-helix-like protein
  misc_feature (1)..(251): Homolog of NCBI NO: 32352190 NR Description: hypothetical protein [Oryza sativa (japonica
MASPEGSNWVFDCPLMDDLAAADFAAASAGGFYWTPPMQPQMHTLAQAVSATPAPNPCAEINSSVSVDWDHAKGQPKNKRPRSETGAQPSSKACREKVRRDKLNERFLELGAVLDPGKTPKIDKCAILNDAIRAVTELRSEAEKLKDSNESLQEKIRELKAEKNELRDEKQKLKAEKESLEQQIKFMNARQSLVPHPSVIPAAAFAAAQGQAAGHKLMMPVMSYPGFPMWQFMPPSDVDTSDDPKSCPPVA

SEQ ID NO: 68288 - protein, 236 aa, Triticum aestivum
  peptide (1)..(236): Ceres Seq. ID no. 13654234
  misc_feature (75)..(124): Pfam Name: Helix-loop-helix DNA-binding domain Pfam Description: Helix-loop-helix DNA-binding domain
  misc_feature (45)..(236): Homolog of NCBI NO: 30682847 NR Description: bHLH protein [Arabidopsis thaliana]
  misc_feature (45)..(236): Homolog of NCBI NO: 18414212 NR Description: bHLH protein [Arabidopsis thaliana]
  misc_feature (45)..(236): Homolog of NCBI NO: 22331274 NR Description: bHLH protein [Arabidopsis thaliana]
  misc_feature (45)..(236): Homolog of NCBI NO: 20127030 NR Description: putative bHLH transcription factor [Arabidopsis
  misc_feature (53)..(236): Homolog of NCBI NO: 15223710 NR Description: bHLH protein [Arabidopsis thaliana]
  misc_feature (1)..(236): Homolog of NCBI NO: 21592325 NR Description: bHLH transcription factor, putative [Arabidopsis
  misc_feature (1)..(236): Homolog of NCBI NO: 15239706 NR Description: bHLH protein [Arabidopsis thaliana]
  misc_feature (36)..(236): Homolog of NCBI NO: 38636768 NR Description: helix-loop-helix-like protein
  misc_feature (36)..(236): Homolog of NCBI NO: 29367409 NR Description: helix-loop-helix-like protein
  misc_feature (1)..(236): Homolog of NCBI NO: 32352190 NR Description: hypothetical protein [Oryza sativa (japonica
MDDLAAADFAAASAGGFYWTPPMQPQMHTLAQAVSATPAPNPCAEINSSVSVDWDHAKGQPKNKRPRSETGAQPSSKACREKVRRDKLNERFLELGAVLDPGKTPKIDKCAILNDAIRAVTELRSEAEKLKDSNESLQEKIRELKAEKNELRDEKQKLKAEKESLEQQIKFMNARQSLVPHPSVIPAAAFAAAQGQAAGHKLMMPVMSYPGFPMWQFMPPSDVDTSDDPKSCPPVA

SEQ ID NO: 68289 - DNA, 1666 bp, Triticum aestivum
  misc_feature (1)..(1666): Ceres Seq. ID no. 13591174
aacgatcccttctccctcttccagatccattcctctcccagccccaggcctcgctcgcctcccccgttgggacggagagagctcggaagggcagggagccatgggttcctgggtccttcttgctgtggttctcgggtccttggtgggagctgcgcgcggctccgagccgtggtcgaacggcacgcaggtctactccaccaatgccaactccggcagcggcagcaacggcgccttcgtcgccctcactctcatccagtccgcggccgccaagggagccgtatgcttggatggaagtttaccgggttaccacctacaccggggatctggatcagggtcaaacaattggcttgtcaatctggagggtggaggatggtgcaatgatgttaaaagctgtgtgttccgcaagggcagtcggcgtgggtcatcgaaccacatggagaggcaactccagtttacaggcataatgagtaacaggcctgaagaaaatcctgatttctacaactggaacagagtgaaggttcggtattgtgatggtggatccttcaccggtgatggggctgacgcggcttcaggcctttatttccgaggtcagcgtatttggcaggctgctatcgatgacttgatggcccaaggaatgcgttctgctagtcaggcccttctttcgggatgctctgctgggggtgcttctgccatacttcactgtgatgagttccgtggaatgtttccatcaaataccagagtcaagtgcctcgctgatgctggaatgttccttgactctgttgacattgcgggtcgtcgagaaatgagagatttgttcaatggcattgtgagattgcagggttctggaagaagcttgcctcggtcttgtacctctcgcatggataaaacctcatgctttttcccgcagaacgtgttgccaaatattcaaactccgacttttatcttgaacactgcttacgacgtgtggcagcttcaagagagtttggctcccagaacggctgatccccggggtctatggcaaagttgcaagcagaattacgcctcttgcaatagcaatcagcttcagtttttaaatggcttcaggaatgaaatgcttaacgctgtgaagggtttctctgggtcagggcagaatggggtgtttatcaactcttgtttcgcccactgccagagcgagagacaggatacatggtactcaagcaagtctcctcgtcttggcaacaagagaatcgcagaagcggtcggtgactggttcttcgagaggggcaacgccaagtacaccgactgcgcgtacccttgtgacggcacgtgccatcaccttgtgttcaaagggaggcatctctaatacgatcatatcctttgataccagcagctgaagtgctgaaaacccagcgagtgggtacaaccgaaaaaaggaaggtatagatagaagaagatgggtgcaagttggtggcttgcccggcgtccatcgcctcagatatgatagggcagggcctcacatgcaaacgcgatgaggtcctctgcgttattttagtttcatatatcgtcgattctttccattgccaattgctactccctcgatgtatctgaatatttgaaccacactggtgtataaccttacatgttcatgtattgaatgtggtaatatgaaattatgaataatgtgctt

SEQ ID NO: 68290 - protein, 446 aa, Triticum aestivum
  peptide (1)..(446): Ceres Seq. ID no. 15221028
  misc_feature (59)..(424): Pfam Name: Pectinacetylesterase Pfam Description: Pectinacetylesterase
  misc_feature (72)..(288): Homolog of NCBI NO: 6714404 NR Description: putative pectinacetylesterase [Arabidopsis
  misc_feature (79)..(442): Homolog of NCBI NO: 15228677 NR Description: pectinacetylesterase family [Arabidopsis
  misc_feature (72)..(442): Homolog of NCBI NO: 7487997 NR Description: pectin acetylesterase homolog F21E10.11 -
  misc_feature (37)..(442): Homolog of NCBI NO: 15226462 NR Description: pectinacetylesterase, putative [Arabidopsis
  misc_feature (79)..(442): Homolog of NCBI NO: 28392968 NR Description: putative pectinacetylesterase [Arabidopsis
  misc_feature (72)..(442): Homolog of NCBI NO: 18397406 NR Description: pectinacetylesterase, putative [Arabidopsis
  misc_feature (59)..(442): Homolog of NCBI NO: 21703105 NR Description: At1g57590/T8L23_6 [Arabidopsis thaliana]
  misc_feature (59)..(442): Homolog of NCBI NO: 30696158 NR Description: pectinacetylesterase, putative [Arabidopsis
  misc_feature (59)..(442): Homolog of NCBI NO: 25347293 NR Description: probable pectinacetylesterase precursor T8L23.6
  misc_feature (34)..(443): Homolog of NCBI NO: 34913332 NR Description: putative pectin acetylesterase precursor
TIPSPSSRSIPLPAPGLARLPRWDGESSEGQGAMGSWVLLAVVLGSLVGAARGSEPWSNGTQVYSTNANSGSGSNGAFVALTLIQSAAAKGAVCLDGSLPGYHLHRGSGSGSNNWLVNLEGGGWCNDVKSCVFRKGSRRGSSNHMERQLQFTGIMSNRPEENPDFYNWNRVKVRYCDGGSFTGDGADAASGLYFRGQRIWQAAIDDLMAQGMRSASQALLSGCSAGGASAILHCDEFRGMFPSNTRVKCLADAGMFLDSVDIAGRREMRDLFNGIVRLQGSGRSLPRSCTSRMDKTSCFFPQNVLPNIQTPTFILNTAYDVWQLQESLAPRTADPRGLWQSCKQNYASCNSNQLQFLNGFRNEMLNAVKGFSGSGQNGVFINSCFAHCQSERQDTWYSSKSPRLGNKRIAEAVGDWFFERGNAKYTDCAYPCDGTCHHLVFKGRHL

SEQ ID NO: 68291 - protein, 413 aa, Triticum aestivum
  peptide (1)..(413): Ceres Seq. ID no. 15221029
  misc_feature (26)..(391): Pfam Name: Pectinacetylesterase Pfam Description: Pectinacetylesterase
  misc_feature (39)..(255): Homolog of NCBI NO: 6714404 NR Description: putative pectinacetylesterase [Arabidopsis
  misc_feature (46)..(409): Homolog of NCBI NO: 15228677 NR Description: pectinacetylesterase family [Arabidopsis
  misc_feature (39)..(409): Homolog of NCBI NO: 7487997 NR Description: pectin acetylesterase homolog F21E10.11 -
  misc_feature (4)..(409): Homolog of NCBI NO: 15226462 NR Description: pectinacetylesterase, putative [Arabidopsis
  misc_feature (46)..(409): Homolog of NCBI NO: 28392968 NR Description: putative pectinacetylesterase [Arabidopsis
  misc_feature (39)..(409): Homolog of NCBI NO: 18397406 NR Description: pectinacetylesterase, putative [Arabidopsis
  misc_feature (26)..(409): Homolog of NCBI NO: 21703105 NR Description: At1g57590/T8L23_6 [Arabidopsis thaliana]
  misc_feature (26)..(409): Homolog of NCBI NO: 30696158 NR Description: pectinacetylesterase, putative [Arabidopsis
  misc_feature (26)..(409): Homolog of NCBI NO: 25347293 NR Description: probable pectinacetylesterase precursor T8L23.6
  misc_feature (1)..(410): Homolog of NCBI NO: 34913332 NR Description: putative pectin acetylesterase precursor
MGSWVLLAVVLGSLVGAARGSEPWSNGTQVYSTNANSGSGSNGAFVALTLIQSAAAKGAVCLDGSLPGYHLHRGSGSGSNNWLVNLEGGGWCNDVKSCVFRKGSRRGSSNHMERQLQFTGIMSNRPEENPDFYNWNRVKVRYCDGGSFTGDGADAASGLYFRGQRIWQAAIDDLMAQGMRSASQALLSGCSAGGASAILHCDEFRGMFPSNTRVKCLADAGMFLDSVDIAGRREMRDLFNGIVRLQGSGRSLPRSCTSRMDKTSCFFPQNVLPNIQTPTFILNTAYDVWQLQESLAPRTADPRGLWQSCKQNYASCNSNQLQFLNGFRNEMLNAVKGFSGSGQNGVFINSCFAHCQSERQDTWYSSKSPRLGNKRIAEAVGDWFFERGNAKYTDCAYPCDGTCHHLVFKGRHL

SEQ ID NO: 68292 - protein, 302 aa, Triticum aestivum
  peptide (1)..(302): Ceres Seq. ID no. 15221030
  misc_feature (1)..(280): Pfam Name: Pectinacetylesterase Pfam Description: Pectinacetylesterase
  misc_feature (1)..(144): Homolog of NCBI NO: 6714404 NR Description: putative pectinacetylesterase [Arabidopsis
  misc_feature (1)..(298): Homolog of NCBI NO: 15228677 NR Description: pectinacetylesterase family [Arabidopsis
  misc_feature (1)..(298): Homolog of NCBI NO: 7487997 NR Description: pectin acetylesterase homolog F21E10.11 -
  misc_feature (1)..(298): Homolog of NCBI NO: 15226462 NR Description: pectinacetylesterase, putative [Arabidopsis
  misc_feature (1)..(298): Homolog of NCBI NO: 28392968 NR Description: putative pectinacetylesterase [Arabidopsis
  misc_feature (1)..(298): Homolog of NCBI NO: 18397406 NR Description: pectinacetylesterase, putative [Arabidopsis
  misc_feature (1)..(298): Homolog of NCBI NO: 21703105 NR Description: At1g57590/T8L23_6 [Arabidopsis thaliana]
  misc_feature (1)..(298): Homolog of NCBI NO: 30696158 NR Description: pectinacetylesterase, putative [Arabidopsis
  misc_feature (1)..(298): Homolog of NCBI NO: 25347293 NR Description: probable pectinacetylesterase precursor T8L23.6
  misc_feature (1)..(299): Homolog of NCBI NO: 34913332 NR Description: putative pectin acetylesterase precursor
MERQLQFTGIMSNRPEENPDFYNWNRVKVRYCDGGSFTGDGADAASGLYFRGQRIWQAAIDDLMAQGMRSASQALLSGCSAGGASAILHCDEFRGMFPSNTRVKCLADAGMFLDSVDIAGRREMRDLFNGIVRLQGSGRSLPRSCTSRMDKTSCFFPQNVLPNIQTPTFILNTAYDVWQLQESLAPRTADPRGLWQSCKQNYASCNSNQLQFLNGFRNEMLNAVKGFSGSGQNGVFINSCFAHCQSERQDTWYSSKSPRLGNKRIAEAVGDWFFERGNAKYTDCAYPCDGTCHHLVFKGRHL

SEQ ID NO: 68293 - DNA, 1379 bp, Triticum aestivum
  misc_feature (1)..(1379): Ceres Seq. ID no. 13598313
ccacaccatcgtcttatctcggggcctaagagccagaggaatcatttccttcttctccatccttccgtccagccttgttggtttcactgtgccgtcgatcggcatggcgaggaaatgctcgagctgcggccacaatggccacaactcgaggacctgcggcgggcaccgaggcgttgagagcggcggcggcggtgggctgaggctgtttggggtgcagctgcaggtgggcgccgcgcctctcaagaagagcttcagcatggagtgcctgtcgtcgaccgcgtcggcctactacgcggcggccgcggccgtgggtgtcgccgcgtccaactcgtcgtcgtccgtgtcgtcgtcgtcgtcgctcgtctcggtggaggagagcccggagaagatgggccacgggtacctctccgacgggctcatgggcagggctcaagagaggaagaaaggggttccatggaccgaggacgagcaccggaggttcctggccggcctggagaagctcgggaaaggcgactggcgaggcatctcccggcacttcgtcaccacacgcacgccgacgcaggtcgccagccacgcccagaagtacttcctccggcaggccggcctcgcgcagaagaagcggcggtccagcctcttcgacgtcgtggagaaaaatggcgacaggggagccaccgagcgtcgtcacaggctgaaacccgatgccaccagctccgtggacgcgatggggttaacgttccctgctctttccctgggcgccagccggccgaggccggacgcggcgctaccgccgtgcctgactctgatgccgagctgctcgccgccgtcgtcgatgatcggcgcaccgtcagcgagccgtgcaccgaagctccctccttccctgggcctggtggcaaatgcgaatcctcctcggcaggcgcctgacctggagctcaagatctcgtccacggccgcccggaagaccgaccagcaggccggtgctgccgccggttcgtcgccatcgccgaggacgccctttttcggaaccatcagggtcacctagagcgagcaaaagaccacccaccggagcgacggcttaaaagagatctttccgtagacgacgacgacgacgaagaagaacagcaacaagaagaaagagcttttgctagtggcgtgctacattaaacagtagtatgtcagtcagtgtgcgtgtgttgctggcatggcattaagaaatgccatcaccgatccatccataaccatcctgtattatcaccatcacaaggcccaactttactggcctaatttagccatgcaaataaacaaggaacgggcctcattggcatcaaaaaaaaaaaaaaaaaagcttatcgataccgtcgacctgtttaaacacaataaag

SEQ ID NO: 68294 - protein, 345 aa, Triticum aestivum
  peptide (1)..(345): Ceres Seq. ID no. 15222299
  misc_feature (149)..(196): Pfam Name: Myb-like DNA-binding domain Pfam Description: Myb-like DNA-binding domain
  misc_feature (35)..(246): Homolog of NCBI NO: 1076660 NR Description: D13F(MYBST1) protein - potato
  misc_feature (35)..(246): Homolog of NCBI NO: 7705206 NR Description: MybSt1 [Solanum tuberosum]
  misc_feature (51)..(250): Homolog of NCBI NO: 15228185 NR Description: myb family transcription factor [Arabidopsis
  misc_feature (35)..(106): Homolog of NCBI NO: 15241963 NR Description: expressed protein [Arabidopsis thaliana]
  misc_feature (133)..(227): Homolog of NCBI NO: 15241963 NR Description: expressed protein [Arabidopsis thaliana]
  misc_feature (35)..(237): Homolog of NCBI NO: 34906364 NR Description: unnamed protein product [Oryza sativa (japonica
  misc_feature (35)..(250): Homolog of NCBI NO: 2062176 NR Description: Myb-related transcription activator (MybSt1)
  misc_feature (59)..(221): Homolog of NCBI NO: 12406995 NR Description: MCB2 protein [Hordeum vulgare subsp. vulgare]
  misc_feature (36)..(221): Homolog of NCBI NO: 34912404 NR Description: putative Myb-related transcription factor
  misc_feature (35)..(234): Homolog of NCBI NO: 34906444 NR Description: P0671B11.14 [Oryza sativa (japonica
HTIVLSRGLRARGIISFFSILPSSLVGFTVPSIGMARKCSSCGHNGHNSRTCGGHRGVESGGGGGLRLFGVQLQVGAAPLKKSFSMECLSSTASAYYAAAAAVGVAASNSSSSVSSSSSLVSVEESPEKMGHGYLSDGLMGRAQERKKGVPWTEDEHRRFLAGLEKLGKGDWRGISRHFVTTRTPTQVASHAQKYFLRQAGLAQKKRRSSLFDVVEKNGDRGATERRHRLKPDATSSVDAMGLTFPALSLGASRPRPDAALPPCLTLMPSCSPPSSMIGAPSASRAPKLPPSLGLVANANPPRQAPDLELKISSTAARKTDQQAGAAAGSSPSPRTPFFGTIRVT

SEQ ID NO: 68295 - protein, 311 aa, Triticum aestivum
  peptide (1)..(311): Ceres Seq. ID no. 15222300
  misc_feature (115)..(162): Pfam Name: Myb-like DNA-binding domain Pfam Description: Myb-like DNA-binding domain
  misc_feature (1)..(212): Homolog of NCBI NO: 1076660 NR Description: D13F(MYBST1) protein - potato
  misc_feature (1)..(212): Homolog of NCBI NO: 7705206 NR Description: MybSt1 [Solanum tuberosum]
  misc_feature (17)..(216): Homolog of NCBI NO: 15228185 NR Description: myb family transcription factor [Arabidopsis
  misc_feature (1)..(72): Homolog of NCBI NO: 15241963 NR Description: expressed protein [Arabidopsis thaliana]
  misc_feature (99)..(193): Homolog of NCBI NO: 15241963 NR Description: expressed protein [Arabidopsis thaliana]
  misc_feature (1)..(203): Homolog of NCBI NO: 34906364 NR Description: unnamed protein product [Oryza sativa (japonica
  misc_feature (1)..(216): Homolog of NCBI NO: 2062176 NR Description: Myb-related transcription activator (MybSt1)
  misc_feature (25)..(187): Homolog of NCBI NO: 12406995 NR Description: MCB2 protein [Hordeum vulgare subsp. vulgare]
  misc_feature (2)..(187): Homolog of NCBI NO: 34912404 NR Description: putative Myb-related transcription factor
  misc_feature (1)..(200): Homolog of NCBI NO: 34906444 NR Description: P0671B11.14 [Oryza sativa (japonica
MARKCSSCGHNGHNSRTCGGHRGVESGGGGGLRLFGVQLQVGAAPLKKSFSMECLSSTASAYYAAAAAVGVAASNSSSSVSSSSSLVSVEESPEKMGHGYLSDGLMGRAQERKKGVPWTEDEHRRFLAGLEKLGKGDWRGISRHFVTTRTPTQVASHAQKYFLRQAGLAQKKRRSSLFDVVEKNGDRGATERRHRLKPDATSSVDAMGLTFPALSLGASRPRPDAALPPCLTLMPSCSPPSSMIGAPSASRAPKLPPSLGLVANANPPRQAPDLELKISSTAARKTDQQAGAAAGSSPSPRTPFFGTIRVT

SEQ ID NO: 68296 - protein, 260 aa, Triticum aestivum
  peptide (1)..(260): Ceres Seq. ID no. 15222301
  misc_feature (64)..(111): Pfam Name: Myb-like DNA-binding domain Pfam Description: Myb-like DNA-binding domain
  misc_feature (1)..(161): Homolog of NCBI NO: 1076660 NR Description: D13F(MYBST1) protein - potato
  misc_feature (1)..(161): Homolog of NCBI NO: 7705206 NR Description: MybSt1 [Solanum tuberosum]
  misc_feature (1)..(165): Homolog of NCBI NO: 15228185 NR Description: myb family transcription factor [Arabidopsis
  misc_feature (1)..(21): Homolog of NCBI NO: 15241963 NR Description: expressed protein [Arabidopsis thaliana]
  misc_feature (48)..(142): Homolog of NCBI NO: 15241963 NR Description: expressed protein [Arabidopsis thaliana]
  misc_feature (1)..(152): Homolog of NCBI NO: 34906364 NR Description: unnamed protein product [Oryza sativa (japonica
  misc_feature (1)..(165): Homolog of NCBI NO: 2062176 NR Description: Myb-related transcription activator (MybSt1)
  misc_feature (1)..(136): Homolog of NCBI NO: 12406995 NR Description: MCB2 protein [Hordeum vulgare subsp. vulgare]
  misc_feature (1)..(136): Homolog of NCBI NO: 34912404 NR Description: putative Myb-related transcription factor
  misc_feature (1)..(149): Homolog of NCBI NO: 34906444 NR Description: P0671B11.14 [Oryza sativa (japonica
MECLSSTASAYYAAAAAVGVAASNSSSSVSSSSSLVSVEESPEKMGHGYLSDGLMGRAQERKKGVPWTEDEHRRFLAGLEKLGKGDWRGISRHFVTTRTPTQVASHAQKYFLRQAGLAQKKRRSSLFDVVEKNGDRGATERRHRLKPDATSSVDAMGLTFPALSLGASRPRPDAALPPCLTLMPSCSPPSSMIGAPSASRAPKLPPSLGLVANANPPRQAPDLELKISSTAARKTDQQAGAAAGSSPSPRTPFFGTIRVT

SEQ ID NO: 68297 - DNA, 1269 bp, Triticum aestivum
  misc_feature (1)..(1269): Ceres Seq. ID no. 13596175
accgtctcagataacttaggattttcggtctcagattgtgaggagcggctcatcgacctctgccaactgccatcgcacttgctgttggagctcgtggactcgtggtgcgccctcatggaagggcccgtcctccccaacctgccaaacacgagggtcgccgtcgtcaccggagggaacaaagggatcggcttcgaggtgtgccgccagctggccagcggcggcgtcacggtcgtcttgacggcccgggacgagacgaggggcggggaggccgtcgagaggctcaatgcgctgggactctctggtgtcatcttccatcggctggagatcacggacgcttcgagcgccgcgacgctggctggttttctcaaggcccgctttggcaagcttgacattctggtgaataatgccgcagttggtggggttgagtacggccaagaattcgatacgaacgaggaaaagttcggtggcatggatttccaccagagagttgagtggatgttgaagaacgcacgggagcccatcgacagcgcgaagaacagcgtgcagacgaactactatggcacgaagcatgtaatcgaagccctgctgcctctgcttcaatcttcgtccgtgggaagaatagtgaacgtctcctccaattatggactgctaagacatatcggcagcgaggaggtgaggcaggagctcaacgacgtcgacaacctgacagaggggaggctagacgagctgctggagaagttcatgaaagacttcgaggccggcgcgctggagccgcacgggtggcccacaaagttctcggcgtacaaggtggccaaggccgccatgaacgcctactcgaggatcctggcgaggaggcaccctgagctgcgcgtcaactgcgcgcaccctggcttcgtcaagaccgacatgagcatggggtccggggtcctgacgccggaggagggcgcacgtaacttggtgaaggtggcgctgctgcctgacggcgggccgaccggcgcgtatttcgccatgggcgaggaggcgccgttcgtgtgaggtaccggcggtacgtgcgtgcgtgccgtacggttactgcttggatgcgttaaaaaaaaataagatgtgtcatctatcttttttcgacaaagggtgaggttcacagcggcagcgtccgccacctccaatgcatgacacgtgttcagtgagggctcgtataccgtccttcattgaacgcgcttttgcaacagaggtaatgtttctgaaacatatgtgatattgcagtagtttacg

SEQ ID NO: 68298 - protein, 344 aa, Triticum aestivum
  peptide (1)..(344): Ceres Seq. ID no. 13596176
  misc_feature (51)..(343): Homolog of NCBI NO: 15233062 NR Description: short-chain dehydrogenase/reductase family
  misc_feature (51)..(335): Homolog of NCBI NO: 34559416 NR Description: (-)-isopiperitenone reductase [Mentha x piperita]
  misc_feature (50)..(335): Homolog of NCBI NO: 25518668 NR Description: hypothetical protein T1N6.22 - Arabidopsis
  misc_feature (47)..(335): Homolog of NCBI NO: 18378884 NR Description: short-chain dehydrogenase/reductase family
  misc_feature (51)..(339): Homolog of NCBI NO: 33146492 NR Description: carbonyl reductase -like protein
  misc_feature (39)..(344): Homolog of NCBI NO: 38346767 NR Description: OSJNBa0081C01.18 [Oryza sativa (japonica
  misc_feature (49)..(344): Homolog of NCBI NO: 38346772 NR Description: OSJNBa0081C01.23 [Oryza sativa (japonica
  misc_feature (39)..(344): Homolog of NCBI NO: 38346768 NR Description: OSJNBa0081C01.19 [Oryza sativa (japonica
  misc_feature (39)..(344): Homolog of NCBI NO: 38346774 NR Description: OSJNBa0081C01.25 [Oryza sativa (japonica
  misc_feature (44)..(344): Homolog of NCBI NO: 38346769 NR Description: OSJNBa0081C01.20 [Oryza sativa (japonica
TVSDNLGFSVSDCEERLIDLCQLPSHLLLELVDSWCALMEGPVLPNLPNTRVAVVTGGNKGIGFEVCRQLASGGVTVVLTARDETRGGEAVERLNALGLSGVIFHRLEITDASSAATLAGFLKARFGKLDILVNNAAVGGVEYGQEFDTNEEKFGGMDFHQRVEWMLKNAREPIDSAKNSVQTNYYGTKHVIEALLPLLQSSSVGRIVNVSSNYGLLRHIGSEEVRQELNDVDNLTEGRLDELLEKFMKDFEAGALEPHGWPTKFSAYKVAKAAMNAYSRILARRHPELRVNCAHPGFVKTDMSMGSGVLTPEEGARNLVKVALLPDGGPTGAYFAMGEEAPFV

SEQ ID NO: 68299 - protein, 306 aa, Triticum aestivum
  peptide (1)..(306): Ceres Seq. ID no. 13596177
  misc_feature (13)..(305): Homolog of NCBI NO: 15233062 NR Description: short-chain dehydrogenase/reductase family
  misc_feature (13)..(297): Homolog of NCBI NO: 34559416 NR Description: (-)-isopiperitenone reductase [Mentha x piperita]
  misc_feature (12)..(297): Homolog of NCBI NO: 25518668 NR Description: hypothetical protein T1N6.22 - Arabidopsis
  misc_feature (9)..(297): Homolog of NCBI NO: 18378884 NR Description: short-chain dehydrogenase/reductase family
  misc_feature (13)..(301): Homolog of NCBI NO: 33146492 NR Description: carbonyl reductase -like protein
  misc_feature (1)..(306): Homolog of NCBI NO: 38346767 NR Description: OSJNBa0081C01.18 [Oryza sativa (japonica
  misc_feature (11)..(306): Homolog of NCBI NO: 38346772 NR Description: OSJNBa0081C01.23 [Oryza sativa (japonica
  misc_feature (1)..(306): Homolog of NCBI NO: 38346768 NR Description: OSJNBa0081C01.19 [Oryza sativa (japonica
  misc_feature (1)..(306): Homolog of NCBI NO: 38346774 NR Description: OSJNBa0081C01.25 [Oryza sativa (japonica
  misc_feature (6)..(306): Homolog of NCBI NO: 38346769 NR Description: OSJNBa0081C01.20 [Oryza sativa (japonica
MEGPVLPNLPNTRVAVVTGGNKGIGFEVCRQLASGGVTVVLTARDETRGGEAVERLNALGLSGVIFHRLEITDASSAATLAGFLKARFGKLDILVNNAAVGGVEYGQEFDTNEEKFGGMDFHQRVEWMLKNAREPIDSAKNSVQTNYYGTKHVIEALLPLLQSSSVGRIVNVSSNYGLLRHIGSEEVRQELNDVDNLTEGRLDELLEKFMKDFEAGALEPHGWPTKFSAYKVAKAAMNAYSRILARRHPELRVNCAHPGFVKTDMSMGSGVLTPEEGARNLVKVALLPDGGPTGAYFAMGEEAPFV

SEQ ID NO: 68300 - protein, 188 aa, Triticum aestivum
  peptide (1)..(188): Ceres Seq. ID no. 13596178
  misc_feature (1)..(187): Homolog of NCBI NO: 15233062 NR Description: short-chain dehydrogenase/reductase family
  misc_feature (1)..(179): Homolog of NCBI NO: 34559416 NR Description: (-)-isopiperitenone reductase [Mentha x piperita]
  misc_feature (1)..(179): Homolog of NCBI NO: 25518668 NR Description: hypothetical protein T1N6.22 - Arabidopsis
  misc_feature (1)..(179): Homolog of NCBI NO: 18378884 NR Description: short-chain dehydrogenase/reductase family
  misc_feature (1)..(183): Homolog of NCBI NO: 33146492 NR Description: carbonyl reductase -like protein
  misc_feature (1)..(188): Homolog of NCBI NO: 38346767 NR Description: OSJNBa0081C01.18 [Oryza sativa (japonica
  misc_feature (1)..(188): Homolog of NCBI NO: 38346772 NR Description: OSJNBa0081C01.23 [Oryza sativa (japonica
  misc_feature (1)..(188): Homolog of NCBI NO: 38346768 NR Description: OSJNBa0081C01.19 [Oryza sativa (japonica
  misc_feature (1)..(188): Homolog of NCBI NO: 38346774 NR Description: OSJNBa0081C01.25 [Oryza sativa (japonica
  misc_feature (1)..(188): Homolog of NCBI NO: 38346769 NR Description: OSJNBa0081C01.20 [Oryza sativa (japonica
MDFHQRVEWMLKNAREPIDSAKNSVQTNYYGTKHVIEALLPLLQSSSVGRIVNVSSNYGLLRHIGSEEVRQELNDVDNLTEGRLDELLEKFMKDFEAGALEPHGWPTKFSAYKVAKAAMNAYSRILARRHPELRVNCAHPGFVKTDMSMGSGVLTPEEGARNLVKVALLPDGGPTGAYFAMGEEAPFV

SEQ ID NO: 68301 - DNA, 1462 bp, Triticum aestivum
  misc_feature (1)..(1462): Ceres Seq. ID no. 15178668
ggttaccgcatcgtcgccaggacaagccgccagccagcccaacccaaaccaccggaccggagcagcagccgacgcctcacaaccgccgccgcgcaggcagacgagccagcgggagggagccatggatcggtaccagagggtggagaagccgcgggaggaggtgcccatcaaggagaacgagatccgcatcaccacccagggcaggatgcgcaactacatcacctacgccaccaccctcttccaggataagggttgcgatgaagttgtattcaaggcgatgggaagggccataaacaaaactgtgatgattgcagaattgatcaagaggagaattgtgggtctccatcaaaacactgccactgaatccactgatattactgacacatgggagccactggaggaaggcctacttccgcttgagacaacaaggcatgtgtctatgattactataactctttcaaagaaggagctggacacgtcatctgtcggataccaatctcctctgcctgctgacaaggtgaagccgtttgttgaatacgagaatgaagaagatgcgcactcacctcctgggcgaggaagaggccgtggccgaggccgtggaaggggaatgggaaggggtagagatgcacgtgggaatggatacatggagtatgctgatggtggatgggaaaatgagcatgctcctacctatgcaggcaatgggtatgctgaccatggtccagcttatgagggtaatgggtatgctcgtggtagaggccgtggtttcaggggccgtggcagaagaggtggctatggtggtcagcctgattatcagcatgatggagggtattatgatgaggcaccagcgccaccccgaggtgggggccgtggtttcagggggcgtggcaggagaggcggctatggtggtggccagcctgattatcagcaagacggaggttattacgaggaggctccttttcctgcaccagctggaggtcgtggtcgaggccgtggccgtgggagaggcggcccagctcggggcagagggcgcggtggcaatgccaatggcaacatggtgtatgccgccgcttcgggcgcataagcagtccgcagctcgctgccgtcgttagttggatgcctgctccaagcatgaatatgtatcatctgtgttgtttatctgtgatgacatatatactttgtataagcctgtcattcgttgggaatgaggccagattttgatctttgactagatttgtaggggtagcaccgttatgattgtgctttgttttctcaaagtagatgtcagactaattgtagctaccagttggtaaaggtttagagcagggcattctttcaatttttacataaacgaagtctttgttctctgttacattgtgccaatttcgtttggtgtcctgtctttgaaatgtaagttcaatttagtgggtacttacaatttgatttctgaaaaaaaaaaaaaaaa

SEQ ID NO: 68302 - protein, 359 aa, Triticum aestivum
  peptide (1)..(359): Ceres Seq. ID no. 15178669
  misc_feature (189)..(349): Pfam Name: High molecular weight glutenin subunit Pfam Description: High molecular weight glutenin subunit
  misc_feature (47)..(304): Homolog of NCBI NO: 23612874 NR Description: hypothetical protein, conserved [Plasmodium
  misc_feature (41)..(188): Homolog of NCBI NO: 15231369 NR Description: hypothetical protein [Arabidopsis thaliana]
  misc_feature (41)..(81): Homolog of NCBI NO: 25404999 NR Description: protein T4O12.22 [imported] - Arabidopsis
  misc_feature (80)..(342): Homolog of NCBI NO: 25404999 NR Description: protein T4O12.22 [imported] - Arabidopsis
  misc_feature (41)..(323): Homolog of NCBI NO: 24417384 NR Description: unknown [Arabidopsis thaliana]
  misc_feature (41)..(310): Homolog of NCBI NO: 34897552 NR Description: OSJNBa0042L16.13 [Oryza sativa (japonica
  misc_feature (41)..(356): Homolog of NCBI NO: 18394837 NR Description: glycine-rich protein [Arabidopsis thaliana]
  misc_feature (32)..(356): Homolog of NCBI NO: 25518088 NR Description: T20H2.2 protein - Arabidopsis thaliana
  misc_feature (41)..(342): Homolog of NCBI NO: 18410994 NR Description: expressed protein [Arabidopsis thaliana]
  misc_feature (5)..(287): Homolog of NCBI NO: 32526671 NR Description: chloroplast nucleoid DNA-binding protein -like
VTASSPGQAASQPNPNHRTGAAADASQPPPRRQTSQREGAMDRYQRVEKPREEVPIKENEIRITTQGRMRNYITYATTLFQDKGCDEVVFKAMGRAINKTVMIAELIKRRIVGLHQNTATESTDITDTWEPLEEGLLPLETTRHVSMITITLSKKELDTSSVGYQSPLPADKVKPFVEYENEEDAHSPPGRGRGRGRGRGRGMGRGRDARGNGYMEYADGGWENEHAPTYAGNGYADHGPAYEGNGYARGRGRGFRGRGRRGGYGGQPDYQHDGGYYDEAPAPPRGGGRGFRGRGRRGGYGGGQPDYQQDGGYYEEAPFPAPAGGRGRGRGRGRGGPARGRGRGGNANGNMVYAAASGA

SEQ ID NO: 68303 - protein, 319 aa, Triticum aestivum
  peptide (1)..(319): Ceres Seq. ID no. 15178670
  misc_feature (149)..(309): Pfam Name: High molecular weight glutenin subunit Pfam Description: High molecular weight glutenin subunit
  misc_feature (7)..(264): Homolog of NCBI NO: 23612874 NR Description: hypothetical protein, conserved [Plasmodium
  misc_feature (1)..(148): Homolog of NCBI NO: 15231369 NR Description: hypothetical protein [Arabidopsis thaliana]
  misc_feature (1)..(41): Homolog of NCBI NO: 25404999 NR Description: protein T4O12.22 [imported] - Arabidopsis
  misc_feature (40)..(302): Homolog of NCBI NO: 25404999 NR Description: protein T4O12.22 [imported] - Arabidopsis
  misc_feature (1)..(283): Homolog of NCBI NO: 24417384 NR Description: unknown [Arabidopsis thaliana]
  misc_feature (1)..(270): Homolog of NCBI NO: 34897552 NR Description: OSJNBa0042L16.13 [Oryza sativa (japonica
  misc_feature (1)..(316): Homolog of NCBI NO: 18394837 NR Description: glycine-rich protein [Arabidopsis thaliana]
  misc_feature (1)..(316): Homolog of NCBI NO: 25518088 NR Description: T20H2.2 protein - Arabidopsis thaliana
  misc_feature (1)..(302): Homolog of NCBI NO: 18410994 NR Description: expressed protein [Arabidopsis thaliana]
  misc_feature (1)..(247): Homolog of NCBI NO: 32526671 NR Description: chloroplast nucleoid DNA-binding protein -like
MDRYQRVEKPREEVPIKENEIRITTQGRMRNYITYATTLFQDKGCDEVVFKAMGRAINKTVMIAELIKRRIVGLHQNTATESTDITDTWEPLEEGLLPLETTRHVSMITITLSKKELDTSSVGYQSPLPADKVKPFVEYENEEDAHSPPGRGRGRGRGRGRGMGRGRDARGNGYMEYADGGWENEHAPTYAGNGYADHGPAYEGNGYARGRGRGFRGRGRRGGYGGQPDYQHDGGYYDEAPAPPRGGGRGFRGRGRRGGYGGGQPDYQQDGGYYEEAPFPAPAGGRGRGRGRGRGGPARGRGRGGNANGNMVYAAASGA

SEQ ID NO: 68304 - protein, 291 aa, Triticum aestivum
  peptide (1)..(291): Ceres Seq. ID no. 15178671
  misc_feature (121)..(281): Pfam Name: High molecular weight glutenin subunit Pfam Description: High molecular weight glutenin subunit
  misc_feature (1)..(236): Homolog of NCBI NO: 23612874 NR Description: hypothetical protein, conserved [Plasmodium
  misc_feature (1)..(120): Homolog of NCBI NO: 15231369 NR Description: hypothetical protein [Arabidopsis thaliana]
  misc_feature (1)..(13): Homolog of NCBI NO: 25404999 NR Description: protein T4O12.22 [imported] - Arabidopsis
  misc_feature (12)..(274): Homolog of NCBI NO: 25404999 NR Description: protein T4O12.22 [imported] - Arabidopsis
  misc_feature (1)..(255): Homolog of NCBI NO: 24417384 NR Description: unknown [Arabidopsis thaliana]
  misc_feature (1)..(242): Homolog of NCBI NO: 34897552 NR Description: OSJNBa0042L16.13 [Oryza sativa (japonica
  misc_feature (1)..(288): Homolog of NCBI NO: 18394837 NR Description: glycine-rich protein [Arabidopsis thaliana]
  misc_feature (1)..(288): Homolog of NCBI NO: 25518088 NR Description: T20H2.2 protein - Arabidopsis thaliana
  misc_feature (1)..(274): Homolog of NCBI NO: 18410994 NR Description: expressed protein [Arabidopsis thaliana]
  misc_feature (1)..(219): Homolog of NCBI NO: 32526671 NR Description: chloroplast nucleoid DNA-binding protein -like
MRNYITYATTLFQDKGCDEVVFKAMGRAINKTVMIAELIKRRIVGLHQNTATESTDITDTWEPLEEGLLPLETTRHVSMITITLSKKELDTSSVGYQSPLPADKVKPFVEYENEEDAHSPPGRGRGRGRGRGRGMGRGRDARGNGYMEYADGGWENEHAPTYAGNGYADHGPAYEGNGYARGRGRGFRGRGRRGGYGGQPDYQHDGGYYDEAPAPPRGGGRGFRGRGRRGGYGGGQPDYQQDGGYYEEAPFPAPAGGRGRGRGRGRGGPARGRGRGGNANGNMVYAAASGA

SEQ ID NO: 68305 - DNA, 1312 bp, Triticum aestivum
  misc_feature (1)..(1312): Ceres Seq. ID no. 13662323
atcacatcgtctcaccaagcagcagctagctaagctaagcctagccaaagcttctctagcttcggtagtccaggaaacatgaggctcgcggtggttctcctctgcgccctggtggccgtccaggtcgcgctcctcgccgccccggcggaggccggcgagctggtggtcgggtactacgacaagaaatgcaggggcgtggagaacgtcgtccagtggcacgtcaggagggcgctcaagaccaaccgccgcgccggtgccgccctcgtccgcctcctcttccacgactgcttcgtcaggggttgcgatgcctctgtgctccttgacgcgtcccccgagaaccctcacccggagaaggaggcgccggtgaacatcgggctggccgccttcgacctcctggaggagatcaaggcggccgtcgaggacaggtgccccggcgtggtgtcctgctctgacatcctcatttacgcagcccgtgacgcggcccacgccctcagcaatggcaacatccacttcgacgtccctgccgggcgcctcgacggcctcgtctcctcggggccgccgaggcccaggcggagctcccggactccaccttcaccgtgcagcagctcatcgacaayttcgcacgcaaggacttcgacgtggaggagctggtcatcytgtccggcgcgcactccatcggcgtcggccactgctcctccttcaccggccgcctcaccgcgccgccggagcagatcaacccggcctaccgcaaccttctcaaccacaagtgccaccagggcgccaacccggccgtcgtcaacaacgtccgcgatgaggactacgagacggtgtccaagttcatgcccgggttcaccagccgggtgcgcaagatcagcgacttcctcgacaacaccttctaccacaacaacctcgccaggatcgtcagcttcaactccgactggcagctcatgacccacaccgaggccaggggccacgtccacgagtacgccgacaacgccacgctctgggacggcgacttcgcggaatccctgctcaagctcagcaagctgtccatgcccgccgggagcaagggcggcatcaggaagaagtgcagcatcgccacccaccctctctactaaacaagtcgtatgcatgcatgaacaaggtcgatccaacgaagaagagaacctttgcccctggcggtgtgcggatttcttcaataatcatgtgatttttctggttcaatccattcttttgattcccattggttgtgtattttatttatggcaacatatatgtatcacggaaataaagttacggtctttcaaatgct

SEQ ID NO: 68306 - protein, 290 aa, Triticum aestivum
  peptide (1)..(290): Ceres Seq. ID no. 15220168
  misc_feature (44)..(157): Pfam Name: Peroxidase Pfam Description: Peroxidase
  misc_feature (1)..(158): Homolog of NCBI NO: 12056450 NR Description: peroxidase [Zea mays]
  misc_feature (1)..(157): Homolog of NCBI NO: 27261087 NR Description: putative peroxidase [Oryza sativa (japonica
  misc_feature (21)..(158): Homolog of NCBI NO: 34896268 NR Description: putative peroxidase [Oryza sativa]
  misc_feature (12)..(154): Homolog of NCBI NO: 12039354 NR Description: putative peroxidase [Oryza sativa]
  misc_feature (12)..(154): Homolog of NCBI NO: 12039346 NR Description: putative peroxidase [Oryza sativa]
  misc_feature (12)..(154): Homolog of NCBI NO: 12039335 NR Description: putative peroxidase [Oryza sativa]
  misc_feature (11)..(158): Homolog of NCBI NO: 34894398 NR Description: putative peroxidase [Oryza sativa (japonica
  misc_feature (3)..(158): Homolog of NCBI NO: 34894402 NR Description: putative peroxidase [Oryza sativa (japonica
  misc_feature (1)..(158): Homolog of NCBI NO: 34894394 NR Description: putative peroxidase [Oryza sativa (japonica
  misc_feature (1)..(157): Homolog of NCBI NO: 34894404 NR Description: putative peroxidase [Oryza sativa (japonica
  misc_feature (180)..(180): Xaa is any aa, unknown or other
  misc_feature (193)..(193): Xaa is any aa, unknown or other
MRLAVVLLCALVAVQVALLAAPAEAGELVVGYYDKKCRGVENVVQWHVRRALKTNRRAGAALVRLLFHDCFVRGCDASVLLDASPENPHPEKEAPVNIGLAAFDLLEEIKAAVEDRCPGVVSCSDILIYAARDAAHALSNGNIHFDVPAGRLDGLVSSGPPRPRRSSRTPPSPCSSSSTXSHARTSTWRSWSXCPARTPSASATAPPSPAASPRRRSRSTRPTATFSTTSATRAPTRPSSTTSAMRTTRRCPSSCPGSPAGCARSATSSTTPSTTTTSPGSSASTPTGSS

SEQ ID NO: 68307 - DNA, 1493 bp, Triticum aestivum
  misc_feature (1)..(1493): Ceres Seq. ID no. 13596056
ctctcaaagcagtcaaccagccgcagctcctccctcattccaaagggccacggtctacggtttactctcaccaacccaccacccatcagcatggccgagcgtctcgccgcagccgccaccctccgcgccgccgctccgtccggccgcttcccggtcggccgccgcgccgggccatccagctctgccttcttcccctcctcatcctcgtcctccccggctctccgcctcgtcagcctccgcgccgcgtcgtctcggccctcccagaaggccaagtcggcggggagggggcgatcggtgaggtgcatagcagcggcgtcggacgcggcacagctgaaggccgcgcgcgaggacatcagggagctgctcaacacaacccactgccaccccatcctggttcgtttgggttggcatgattctggcacatatgacaaaaatattaaggactggccagaacgaggtggggctaatggaagtttaagatttgacgttgaactgaagcatggagccaatgccggtttggtaaatgctctaaagcttgtgcaacctatcaaggacaaatacccgagtataacttatgcggatttattccagttggcaagtgctacagcaattgaggaagctggtggcccaaagattccaatgaaatatggacgggttgatgtcacaggacctgagcagtgtccacctgaagggaagcttcctgatgctggcccgagtgctcctgctgaccacttgaggctggtattctacagaatgggccttgatgacaaggaaatcgttgctttgtctggggcacatacacttggaaggtctaggcccgaacggagtggctgggggaaacctgaaacaaaatatactaaaaatggtcctggtgcacctggtggacaatcatggacagctgaatggctgaagtttgataacagttacttcaaggagataaaagagaaaagagatcaggatcttcttgtgttgcctacagatgctgcattatttgaggacccagcattcaaggtctatgcagagaaatatgcagcagacgaagaagcattctttaatgactatgcggaggctcatgctaaactgagcagcctgggtgcaaagtttgatcctgccgagggattctcattggatgattagcgcggcgcgttagccagagaacccttgaagcagccaaacacacttccaaaaggaccagaggacggcacaacctaatcaccatcgttcctctccagcttggtgtcaccatactacaggacgaggcattttcccaacttattatcatatatgtacaagatagagattttcctttccagcttggtcaaattgttagatttggcaattgaggtgcaaaaataatacaggcatgcaaacaaatctgagccattcattcatgtgaacctgctccgatgacaaattcgtttcattcaaaaatttatcacatgatgctttgcctgccaaaaaaaaaaraacgggaggggggaaagcttatcgat

SEQ ID NO: 68308 - protein, 378 aa, Triticum aestivum
  peptide (1)..(378): Ceres Seq. ID no. 15221752
  misc_feature (114)..(346): Pfam Name: Peroxidase Pfam Description: Peroxidase
  misc_feature (35)..(377): Homolog of NCBI NO: 1944507 NR Description: thylakoid-bound ascorbate peroxidase [Spinacia
  misc_feature (35)..(377): Homolog of NCBI NO: 1369920 NR Description: stromal ascorbate peroxidase [Spinacia oleracea]
  misc_feature (31)..(377): Homolog of NCBI NO: 2146725 NR Description: L-ascorbate peroxidase (EC 1.11.1.11) precursor -
  misc_feature (95)..(378): Homolog of NCBI NO: 25992555 NR Description: thylakoid-bound ascorbate peroxidase [Triticum
  misc_feature (32)..(378): Homolog of NCBI NO: 21741210 NR Description: OSJNBb0086G13.5 [Oryza sativa (japonica
  misc_feature (29)..(377): Homolog of NCBI NO: 7484621 NR Description: L-ascorbate peroxidase (EC 1.11.1.11) precursor -
  misc_feature (29)..(377): Homolog of NCBI NO: 3202026 NR Description: stromal L-ascorbate peroxidase precursor
  misc_feature (95)..(378): Homolog of NCBI NO: 25992557 NR Description: thylakoid-bound ascorbate peroxidase [Triticum
  misc_feature (31)..(378): Homolog of NCBI NO: 32879783 NR Description: thylakoid-bound ascorbate peroxidase
  misc_feature (32)..(377): Homolog of NCBI NO: 32879781 NR Description: stromal ascorbate peroxidase
LSKQSTSRSSSLIPKGHGLRFTLTNPPPISMAERLAAAATLRAAAPSGRFPVGRRAGPSSSAFFPSSSSSSPALRLVSLRAASSRPSQKAKSAGRGRSVRCIAAASDAAQLKAAREDIRELLNTTHCHPILVRLGWHDSGTYDKNIKDWPERGGANGSLRFDVELKHGANAGLVNALKLVQPIKDKYPSITYADLFQLASATAIEEAGGPKIPMKYGRVDVTGPEQCPPEGKLPDAGPSAPADHLRLVFYRMGLDDKEIVALSGAHTLGRSRPERSGWGKPETKYTKNGPGAPGGQSWTAEWLKFDNSYFKEIKEKRDQDLLVLPTDAALFEDPAFKVYAEKYAADEEAFFNDYAEAHAKLSSLGAKFDPAEGFSLDD

SEQ ID NO: 68309 - protein, 348 aa, Triticum aestivum
  peptide (1)..(348): Ceres Seq. ID no. 15221753
  misc_feature (84)..(316): Pfam Name: Peroxidase Pfam Description: Peroxidase
  misc_feature (5)..(347): Homolog of NCBI NO: 1944507 NR Description: thylakoid-bound ascorbate peroxidase [Spinacia
  misc_feature (5)..(347): Homolog of NCBI NO: 1369920 NR Description: stromal ascorbate peroxidase [Spinacia oleracea]
  misc_feature (1)..(347): Homolog of NCBI NO: 2146725 NR Description: L-ascorbate peroxidase (EC 1.11.1.11) precursor -
  misc_feature (65)..(348): Homolog of NCBI NO: 25992555 NR Description: thylakoid-bound ascorbate peroxidase [Triticum
  misc_feature (2)..(348): Homolog of NCBI NO: 21741210 NR Description: OSJNBb0086G13.5 [Oryza sativa (japonica
  misc_feature (1)..(347): Homolog of NCBI NO: 7484621 NR Description: L-ascorbate peroxidase (EC 1.11.1.11) precursor -
  misc_feature (1)..(347): Homolog of NCBI NO: 3202026 NR Description: stromal L-ascorbate peroxidase precursor
  misc_feature (65)..(348): Homolog of NCBI NO: 25992557 NR Description: thylakoid-bound ascorbate peroxidase [Triticum
  misc_feature (1)..(348): Homolog of NCBI NO: 32879783 NR Description: thylakoid-bound ascorbate peroxidase
  misc_feature (2)..(347): Homolog of NCBI NO: 32879781 NR Description: stromal ascorbate peroxidase
MAERLAAAATLRAAAPSGRFPVGRRAGPSSSAFFPSSSSSSPALRLVSLRAASSRPSQKAKSAGRGRSVRCIAAASDAAQLKAAREDIRELLNTTHCHPILVRLGWHDSGTYDKNIKDWPERGGANGSLRFDVELKHGANAGLVNALKLVQPIKDKYPSITYADLFQLASATAIEEAGGPKIPMKYGRVDVTGPEQCPPEGKLPDAGPSAPADHLRLVFYRMGLDDKEIVALSGAHTLGRSRPERSGWGKPETKYTKNGPGAPGGQSWTAEWLKFDNSYFKEIKEKRDQDLLVLPTDAALFEDPAFKVYAEKYAADEEAFFNDYAEAHAKLSSLGAKFDPAEGFSLDD

SEQ ID NO: 68310 - DNA, 1796 bp, Triticum aestivum
  misc_feature (1)..(1796): Ceres Seq. ID no. 13654142
aaactgcaaaattccccaacagacgaccatgaagcttcggctgcgttccatggacgcgcgcggcggcgtcgctgagacgcaccgcgtgcagctgccggacacggccgtgctcgccgatgtgaagtccttcctcgccgccaagctctccgccgcgcagcccgtccccgccgagtccgtccgcctctccctcaaccgctcgcaggagctctgttcaccggacccctcagccaccctcgccgccctcggcctcgcatccggtgacctcctctatttcacgctctccgcagaattattatcgcagccaccgcctcctcaaacacttccccggaaccctagcccggatacagcctccatcgggcaaattgcttccggttcccaatctcctggggaggccggtggatcctcgtcaccgccgcaaaatctacacatacagcctgtctcttcgtcgctgccgcaaaatctacacatagagcctatctcttcgccgaggccgcgagccctccacgtggagcctattttgcccgtggcatctgatccgcccgatgtggtgatggcggaggccgtccacgcacccaagagcttgtcgagccttgtgattgggattctcaagcgggagatggaggcggaggatgctggatgcgcaaatggtacagttatccatcgcctagctgtgtccctgcaggcagctcttgtcgatgctggcttccttgcggagaatccgatggggtctcgccccggattgctgaaggactgggcctcgggtgcagcggcaacactgaccgtaaagtacaccctaccggagcttgtcgccatgctacctgagggtgaagaggggaagacagtggttttgaactgctcattgatgccaaattttgtgatgatatatgggtgtgtgcctggggcatgctcagaagtgcgcagattgtgcttggagttaccaaagctggcgccgctgctatatctggatagcaatgaagtgggtgcaacagaggagaaggagattcttgagctttggagggtgctgaaggatgagctgtgtcttccgctgatgatatctttgtgccaactcaacgggttgcgcttgccgccgtgcttgatggcattgccaggtgatctgaaggctaaagtcttggagtttgttcctggtgttgatcttgcaagggttcagtgcgcatgcaaggaattgcaggatcttgcagcagatgataatctttggaagatgaggcttgaactggagatgagtccttctagcaagggttctggatggagcggagattggaagcaaaggtttgtggcagcttggaaggtggacaacagtaggaggcatcacaagagaccacccagcccaaggttttcgggctatggttgggggatcggtacacgtaacccacttaacttcccagtaattggtggtgattcggaccgtctgccctttataaatcacaatatccttgggcgtagttttggaaatcagcggaggaacatctcgcccaactgcaatttcgagggtcatcgccaagggtttccttgatttaagttttcactagtatctcaagtatgcaatgcataggctgccttgtacatgtttataagttgcatgccagtgctcttatcctcgtgaacttttttgtctgtatcttagatcctatgtcttgtcgttttccggttattccttgctatgacaccaaagtacttctgctctgatctagccaacgccatgatcaattatgtaataaatagtttggacttatggtactgagagcttaactttgctctctatacatgtttcggtatct

SEQ ID NO: 68311 - protein, 509 aa, Triticum aestivum
  peptide (1)..(509): Ceres Seq. ID no. 13654143
  misc_feature (365)..(410): Pfam Name: F-box domain Pfam Description: F-box domain
  misc_feature (221)..(434): Homolog of NCBI NO: 37530850 NR Description: hypothetical protein [Oryza sativa (japonica
  misc_feature (315)..(400): Homolog of NCBI NO: 15223132 NR Description: hypothetical protein [Arabidopsis thaliana]
  misc_feature (221)..(433): Homolog of NCBI NO: 37530790 NR Description: unknown protein [Oryza sativa (japonica
  misc_feature (179)..(451): Homolog of NCBI NO: 15220857 NR Description: F-box protein family [Arabidopsis thaliana]
  misc_feature (10)..(95): Homolog of NCBI NO: 18395296 NR Description: F-box protein family [Arabidopsis thaliana]
  misc_feature (222)..(435): Homolog of NCBI NO: 18395296 NR Description: F-box protein family [Arabidopsis thaliana]
  misc_feature (10)..(145): Homolog of NCBI NO: 27311243 NR Description: Hypothetical protein [Oryza sativa (japonica
  misc_feature (94)..(414): Homolog of NCBI NO: 27311243 NR Description: Hypothetical protein [Oryza sativa (japonica
NCKIPQQTTMKLRLRSMDARGGVAETHRVQLPDTAVLADVKSFLAAKLSAAQPVPAESVRLSLNRSQELCSPDPSATLAALGLASGDLLYFTLSAELLSQPPPPQTLPRNPSPDTASIGQIASGSQSPGEAGGSSSPPQNLHIQPVSSSLPQNLHIEPISSPRPRALHVEPILPVASDPPDVVMAEAVHAPKSLSSLVIGILKREMEAEDAGCANGTVIHRLAVSLQAALVDAGFLAENPMGSRPGLLKDWASGAAATLTVKYTLPELVAMLPEGEEGKTVVLNCSLMPNFVMIYGCVPGACSEVRRLCLELPKLAPLLYLDSNEVGATEEKEILELWRVLKDELCLPLMISLCQLNGLRLPPCLMALPGDLKAKVLEFVPGVDLARVQCACKELQDLAADDNLWKMRLELEMSPSSKGSGWSGDWKQRFVAAWKVDNSRRHHKRPPSPRFSGYGWGIGTRNPLNFPVIGGDSDRLPFINHNILGRSFGNQRRNISPNCNFEGHRQGFP

SEQ ID NO: 68312 - protein, 500 aa, Triticum aestivum
  peptide (1)..(500): Ceres Seq. ID no. 13654144
  misc_feature (356)..(401): Pfam Name: F-box domain Pfam Description: F-box domain
  misc_feature (212)..(425): Homolog of NCBI NO: 37530850 NR Description: hypothetical protein [Oryza sativa (japonica
  misc_feature (306)..(391): Homolog of NCBI NO: 15223132 NR Description: hypothetical protein [Arabidopsis thaliana]
  misc_feature (212)..(424): Homolog of NCBI NO: 37530790 NR Description: unknown protein [Oryza sativa (japonica
  misc_feature (170)..(442): Homolog of NCBI NO: 15220857 NR Description: F-box protein family [Arabidopsis thaliana]
  misc_feature (1)..(86): Homolog of NCBI NO: 18395296 NR Description: F-box protein family [Arabidopsis thaliana]
  misc_feature (213)..(426): Homolog of NCBI NO: 18395296 NR Description: F-box protein family [Arabidopsis thaliana]
  misc_feature (1)..(136): Homolog of NCBI NO: 27311243 NR Description: Hypothetical protein [Oryza sativa (japonica
  misc_feature (85)..(405): Homolog of NCBI NO: 27311243 NR Description: Hypothetical protein [Oryza sativa (japonica
MKLRLRSMDARGGVAETHRVQLPDTAVLADVKSFLAAKLSAAQPVPAESVRLSLNRSQELCSPDPSATLAALGLASGDLLYFTLSAELLSQPPPPQTLPRNPSPDTASIGQIASGSQSPGEAGGSSSPPQNLHIQPVSSSLPQNLHIEPISSPRPRALHVEPILPVASDPPDVVMAEAVHAPKSLSSLVIGILKREMEAEDAGCANGTVIHRLAVSLQAALVDAGFLAENPMGSRPGLLKDWASGAAATLTVKYTLPELVAMLPEGEEGKTVVLNCSLMPNFVMIYGCVPGACSEVRRLCLELPKLAPLLYLDSNEVGATEEKEILELWRVLKDELCLPLMISLCQLNGLRLPPCLMALPGDLKAKVLEFVPGVDLARVQCACKELQDLAADDNLWKMRLELEMSPSSKGSGWSGDWKQRFVAAWKVDNSRRHHKRPPSPRFSGYGWGIGTRNPLNFPVIGGDSDRLPFINHNILGRSFGNQRRNISPNCNFEGHRQGFP

SEQ ID NO: 68313 - protein, 493 aa, Triticum aestivum
  peptide (1)..(493): Ceres Seq. ID no. 13654145
  misc_feature (349)..(394): Pfam Name: F-box domain Pfam Description: F-box domain
  misc_feature (205)..(418): Homolog of NCBI NO: 37530850 NR Description: hypothetical protein [Oryza sativa (japonica
  misc_feature (299)..(384): Homolog of NCBI NO: 15223132 NR Description: hypothetical protein [Arabidopsis thaliana]
  misc_feature (205)..(417): Homolog of NCBI NO: 37530790 NR Description: unknown protein [Oryza sativa (japonica
  misc_feature (163)..(435): Homolog of NCBI NO: 15220857 NR Description: F-box protein family [Arabidopsis thaliana]
  misc_feature (1)..(79): Homolog of NCBI NO: 18395296 NR Description: F-box protein family [Arabidopsis thaliana]
  misc_feature (206)..(419): Homolog of NCBI NO: 18395296 NR Description: F-box protein family [Arabidopsis thaliana]
  misc_feature (1)..(129): Homolog of NCBI NO: 27311243 NR Description: Hypothetical protein [Oryza sativa (japonica
  misc_feature (78)..(398): Homolog of NCBI NO: 27311243 NR Description: Hypothetical protein [Oryza sativa (japonica
MDARGGVAETHRVQLPDTAVLADVKSFLAAKLSAAQPVPAESVRLSLNRSQELCSPDPSATLAALGLASGDLLYFTLSAELLSQPPPPQTLPRNPSPDTASIGQIASGSQSPGEAGGSSSPPQNLHIQPVSSSLPQNLHIEPISSPRPRALHVEPILPVASDPPDVVMAEAVHAPKSLSSLVIGILKREMEAEDAGCANGTVIHRLAVSLQAALVDAGFLAENPMGSRPGLLKDWASGAAATLTVKYTLPELVAMLPEGEEGKTVVLNCSLMPNFVMIYGCVPGACSEVRRLCLELPKLAPLLYLDSNEVGATEEKEILELWRVLKDELCLPLMISLCQLNGLRLPPCLMALPGDLKAKVLEFVPGVDLARVQCACKELQDLAADDNLWKMRLELEMSPSSKGSGWSGDWKQRFVAAWKVDNSRRHHKRPPSPRFSGYGWGIGTRNPLNFPVIGGDSDRLPFINHNILGRSFGNQRRNISPNCNFEGHRQGFP

SEQ ID NO: 68314 - DNA, 1556 bp, Triticum aestivum
  misc_feature (1)..(1556): Ceres Seq. ID no. 15226246
ctcgagcgagtttccacgattttgcttgcgctacaacaacaacatgtcggtgctcccggagcccaccctagccggggtggcgcgagagctggcaaccctcgccgcgccgctctggctcgccgccctcgtcggcctgctcatcggctgggcctggcgcccgcgctgggcagcagcggtcgtcgacgtcgccgtcgccggccagcaccaccacgagcccgtcgccaaccacttggccgtcgtgcctagagctaagccggcctcggtggagccggtgacggaggaggaggaattggctgtcagcaccccggacctcatgcacctccgcagggtcgtcgaggagaaggacggcggccccgcctggacgcacatcatggaccgcaccctcccgacattccgctaccaggcctggaagagagaaccccagaacggaacgccgcagtaccgcagcagcaccatcttcgaagacgcgtcgcccgatgtcgtcagggatttcttctgggacgatgacttccggatcagcaacacctgggacgacatgctccttgagcacgacacgctggaggagtgcacgaagacggggacgatggttgttcgctgggtcaggaagtttccgttcttctgcagcgacagggagtatgttatcggtcgcaggatatgggcatctggaaagacctactactgcgttaccaagagcgtgcctcgtccctctgttccaaggtgcagcaaacctcgccgtgtggacctgtattactctagctggtgcatccgtccagttgaatcaagaaacggtgatggggcaatgacggcatgcgaggtgctcctgtttcatcacgaagacatgggtatcccatggagcatcgcgaagctcggcgtgcagcagggtatgtggggctgcgtcaaacggatcgagcctggcctacgggcataccagaccgcaagggcctccggcgagcccatctcgaaatgcgctgcaatggcacatgccaacacaaagtttgtcgccgacgagctcaccgcttcagagaacaacaccgaggccggttcgaccagcaacaacgcccaagccgagaagccgaagcactggacgggcaacctacccaaggtcttcgtgataggcagcgtggtcgccctggcttgcaccttcgacaaggggctactgaccaaggccctcgtgttcggaacggcgagaaggtttgcaggaccaggaagaagataggaaccaaacatcgacgatccatgacgcgcatttgttccgatgcacaaccgagcgagcgatgctacccggtattatttccggtcctgagacgctcgtgcttgcagatgaggacgaggacggcgtttgctcatgctagagagcatctgtaagcaggcttgtgtacatactgctgtagctgcagtctgtgaagctgagagctgattaggatatggaaccatgatgataatgagactgaattgtattggatgctgagacatggccatcatcatcattatgatgatgatgtactacaatgaataaggctcatattttggaggtgctataaaaacatagtgctttt

SEQ ID NO: 68315 - protein, 404 aa, Triticum aestivum
  peptide (1)..(404): Ceres Seq. ID no. 15226247
  misc_feature (147)..(228): Pfam Name: START domain Pfam Description: START domain
  misc_feature (38)..(88): Homolog of NCBI NO: 21593272 NR Description: membrane related protein-like [Arabidopsis
  misc_feature (76)..(404): Homolog of NCBI NO: 21593272 NR Description: membrane related protein-like [Arabidopsis
  misc_feature (38)..(404): Homolog of NCBI NO: 10178166 NR Description: membrane related protein-like [Arabidopsis
  misc_feature (38)..(88): Homolog of NCBI NO: 18423599 NR Description: membrane related protein-like [Arabidopsis
  misc_feature (76)..(404): Homolog of NCBI NO: 18423599 NR Description: membrane related protein-like [Arabidopsis
  misc_feature (93)..(404): Homolog of NCBI NO: 18033654 NR Description: putative nodule membrane protein [Medicago sativa]
  misc_feature (29)..(404): Homolog of NCBI NO: 4741929 NR Description: membrane related protein CP5 [Arabidopsis
  misc_feature (29)..(404): Homolog of NCBI NO: 22135902 NR Description: membrane related protein CP5, putative
  misc_feature (29)..(404): Homolog of NCBI NO: 15217736 NR Description: membrane related protein CP5 -related
  misc_feature (15)..(404): Homolog of NCBI NO: 38344869 NR Description: OSJNBa0020P07.12 [Oryza sativa (japonica
SSEFPRFCLRYNNNMSVLPEPTLAGVARELATLAAPLWLAALVGLLIGWAWRPRWAAAVVDVAVAGQHHHEPVANHLAVVPRAKPASVEPVTEEEELAVSTPDLMHLRRVVEEKDGGPAWTHIMDRTLPTFRYQAWKREPQNGTPQYRSSTIFEDASPDVVRDFFWDDDFRISNTWDDMLLEHDTLEECTKTGTMVVRWVRKFPFFCSDREYVIGRRIWASGKTYYCVTKSVPRPSVPRCSKPRRVDLYYSSWCIRPVESRNGDGAMTACEVLLFHHEDMGIPWSIAKLGVQQGMWGCVKRIEPGLRAYQTARASGEPISKCAAMAHANTKFVADELTASENNTEAGSTSNNAQAEKPKHWTGNLPKVFVIGSVVALACTFDKGLLTKALVFGTARRFAGPGRR

SEQ ID NO: 68316 - protein, 390 aa, Triticum aestivum
  peptide (1)..(390): Ceres Seq. ID no. 15226248
  misc_feature (133)..(214): Pfam Name: START domain Pfam Description: START domain
  misc_feature (24)..(74): Homolog of NCBI NO: 21593272 NR Description: membrane related protein-like [Arabidopsis
  misc_feature (62)..(390): Homolog of NCBI NO: 21593272 NR Description: membrane related protein-like [Arabidopsis
  misc_feature (24)..(390): Homolog of NCBI NO: 10178166 NR Description: membrane related protein-like [Arabidopsis
  misc_feature (24)..(74): Homolog of NCBI NO: 18423599 NR Description: membrane related protein-like [Arabidopsis
  misc_feature (62)..(390): Homolog of NCBI NO: 18423599 NR Description: membrane related protein-like [Arabidopsis
  misc_feature (79)..(390): Homolog of NCBI NO: 18033654 NR Description: putative nodule membrane protein [Medicago sativa]
  misc_feature (15)..(390): Homolog of NCBI NO: 4741929 NR Description: membrane related protein CP5 [Arabidopsis
  misc_feature (15)..(390): Homolog of NCBI NO: 22135902 NR Description: membrane related protein CP5, putative
  misc_feature (15)..(390): Homolog of NCBI NO: 15217736 NR Description: membrane related protein CP5 -related
  misc_feature (1)..(390): Homolog of NCBI NO: 38344869 NR Description: OSJNBa0020P07.12 [Oryza sativa (japonica
MSVLPEPTLAGVARELATLAAPLWLAALVGLLIGWAWRPRWAAAVVDVAVAGQHHHEPVANHLAVVPRAKPASVEPVTEEEELAVSTPDLMHLRRVVEEKDGGPAWTHIMDRTLPTFRYQAWKREPQNGTPQYRSSTIFEDASPDVVRDFFWDDDFRISNTWDDMLLEHDTLEECTKTGTMVVRWVRKFPFFCSDREYVIGRRIWASGKTYYCVTKSVPRPSVPRCSKPRRVDLYYSSWCIRPVESRNGDGAMTACEVLLFHHEDMGIPWSIAKLGVQQGMWGCVKRIEPGLRAYQTARASGEPISKCAAMAHANTKFVADELTASENNTEAGSTSNNAQAEKPKHWTGNLPKVFVIGSVVALACTFDKGLLTKALVFGTARRFAGPGRR

SEQ ID NO: 68317 - protein, 300 aa, Triticum aestivum
  peptide (1)..(300): Ceres Seq. ID no. 15226249
  misc_feature (43)..(124): Pfam Name: START domain Pfam Description: START domain
  misc_feature (1)..(295): Homolog of NCBI NO: 18403635 NR Description: expressed protein [Arabidopsis thaliana]
  misc_feature (1)..(295): Homolog of NCBI NO: 18414239 NR Description: expressed protein [Arabidopsis thaliana]
  misc_feature (1)..(300): Homolog of NCBI NO: 21593272 NR Description: membrane related protein-like [Arabidopsis
  misc_feature (1)..(300): Homolog of NCBI NO: 10178166 NR Description: membrane related protein-like [Arabidopsis
  misc_feature (1)..(300): Homolog of NCBI NO: 18423599 NR Description: membrane related protein-like [Arabidopsis
  misc_feature (1)..(300): Homolog of NCBI NO: 18033654 NR Description: putative nodule membrane protein [Medicago sativa]
  misc_feature (1)..(300): Homolog of NCBI NO: 4741929 NR Description: membrane related protein CP5 [Arabidopsis
  misc_feature (1)..(300): Homolog of NCBI NO: 22135902 NR Description: membrane related protein CP5, putative
  misc_feature (1)..(300): Homolog of NCBI NO: 15217736 NR Description: membrane related protein CP5 -related
  misc_feature (1)..(300): Homolog of NCBI NO: 38344869 NR Description: OSJNBa0020P07.12 [Oryza sativa (japonica
MHLRRVVEEKDGGPAWTHIMDRTLPTFRYQAWKREPQNGTPQYRSSTIFEDASPDVVRDFFWDDDFRISNTWDDMLLEHDTLEECTKTGTMVVRWVRKFPFFCSDREYVIGRRIWASGKTYYCVTKSVPRPSVPRCSKPRRVDLYYSSWCIRPVESRNGDGAMTACEVLLFHHEDMGIPWSIAKLGVQQGMWGCVKRIEPGLRAYQTARASGEPISKCAAMAHANTKFVADELTASENNTEAGSTSNNAQAEKPKHWTGNLPKVFVIGSVVALACTFDKGLLTKALVFGTARRFAGPGRR

SEQ ID NO: 68318 - DNA, 2094 bp, Triticum aestivum
  misc_feature (1)..(2094): Ceres Seq. ID no. 13654353
cccactagcactggagtattttggtgccttgcgtgtaaaatttctggtgctcccgtcttcttgatcccctccctccatggtcaagacctcaccttggaatggggaccctcatcggaaaagtaatggtcgtccatttttacaacgaggggtggataatcttctcctccttctcctcctccctgtataaaagggcctcctcctctgcccaactcatccagagcaacacttgttgccaagacagacaccagtctgctctgccctgcctcttgaaccaaaacagagcatccaagaggaggcagagagaggtagaagaagaagtagaagatggcgctcctcctccttgtgctggtcggcgttgtggtcggcgtggtgctggcgagcagcctgctgctgcgctggaacgaggtcaggtacggcaacggcaggaggaaggatggcgatggctgcttgccgccggggacaatgggctggccgctgttcggcgagaccaccgagttcctcaagcagggccccagcttcatgaagcagaggaggctcaggtacgggaggctgttccggacgcacatcctggggtgccccacggtggtgtgcatggacccggagctcaaccgccgcatgctgctgcagggcgagtccggcggcctcgtccccggctacccgcagtccatgctcgacatcctcggccgcaacaacatcgccgccgtgcacggcccgctccaccgcctcatgcgcggcgccatgctcggcctcgtccgccccgccgcgctccgcaccagcctcctccccaagatcgacgccttcatgcgcgaccacctccatggatgggcaggcagtgtcgtcgacgtccaggccaagaccaaggagatggccttgctgtccgcactccagcagatcgccggcatcacggctggcccactctctgacgccctcaaaacagagctatgcagcctggtgctcggcaccatctcgttgccgatcaaccttccgggaaccagctactaccagggcttccaggcaaggacgaagcttgtgtccatgctagagcagatgatcgcggagcggcggtcctctggtgatgctcacgatgacatgctggatgctctcttgagaagcggcgacgatgggacccgggagaaactcactgatgagcagatcatcgacttgctcatcgccctcatctactctggatacgagacgatgtcgaccacttcgatgatggctgtcaagtacctgtcggaccacccgcgagctcttgatgaactcaggagagagcatcttgatatcaggaaggggaaatcgccggaggaagccatcagttatgaagatttgaagtccatggccttcactcgagctgtcatttctgagacactaagattagctacagtcgtcaatgggctcctgaggaaaacaactcaggatgtggaaatgaatgggtatgtcattccaaaagggtggagaatctatgtttacaccagggagataaactacgacccattcatgtatcctgacccgatgactttcaatccgtggaggtggctggagaagaacatggaatcgcacccgcacttcatgttgttcggaggaggcggccggatgtgccccggaaaggaggtgggcacggccgagatcgcgacttttctccactatttcgtgacccgatacagatggcaggaagaaggcaagaacacgatcttgaaattcccccgggtggaggctcccaacgggttacatatccgagttcaagattactgattttgcaacatacattttgcagagtttaggtagatagggcccagactgaggcgacgagagtgcgattctgcaccgacggaaagattagatcagccttgtaagaaaataggaaacataggtatagtgtaggtattataggtttagtaggcaattgacgtagaaggccacaagaggcaactatgttcttccttgtgatcaattacatatgcatgataagcatcacaaaatatatgtgatatgtctggtgacttgaatctgataagcagttatacatatatgtgtatatctggtgccttgaatcgatgataagcagcaccatatatacgagatatgaggtgactt

SEQ ID NO: 68319 - protein, 475 aa, Triticum aestivum
  peptide (1)..(475): Ceres Seq. ID no. 13654354
  misc_feature (17)..(475): Homolog of NCBI NO: 15239203 NR Description: cytochrome p450 90A1 [Arabidopsis thaliana]
  misc_feature (8)..(472): Homolog of NCBI NO: 34903584 NR Description: cytochrome P450-like protein
  misc_feature (4)..(230): Homolog of NCBI NO: 34896758 NR Description: 'OSJNBa0015G17.1' [Oryza sativa (japonica
  misc_feature (5)..(405): Homolog of NCBI NO: 30693331 NR Description: cytochrome p450, putative [Arabidopsis thaliana]
  misc_feature (5)..(475): Homolog of NCBI NO: 30693327 NR Description: cytochrome p450, putative [Arabidopsis thaliana]
  misc_feature (5)..(475): Homolog of NCBI NO: 21536828 NR Description: cytochrome P450 homolog, putative [Arabidopsis
  misc_feature (1)..(475): Homolog of NCBI NO: 18406372 NR Description: cytochrome p450, putative [Arabidopsis thaliana]
  misc_feature (1)..(475): Homolog of NCBI NO: 9294419 NR Description: cytochrome P450 [Arabidopsis thaliana]
  misc_feature (1)..(472): Homolog of NCBI NO: 5921933 NR Description: Cytochrome P450 85 (Dwarf protein)
  misc_feature (4)..(475): Homolog of NCBI NO: 27127269 NR Description: cytochrome P450 [Oryza sativa (japonica
MALLLLVLVGVVVGVVLASSLLLRWNEVRYGNGRRKDGDGCLPPGTMGWPLFGETTEFLKQGPSFMKQRRLRYGRLFRTHILGCPTVVCMDPELNRRMLLQGESGGLVPGYPQSMLDILGRNNIAAVHGPLHRLMRGAMLGLVRPAALRTSLLPKIDAFMRDHLHGWAGSVVDVQAKTKEMALLSALQQIAGITAGPLSDALKTELCSLVLGTISLPINLPGTSYYQGFQARTKLVSMLEQMIAERRSSGDAHDDMLDALLRSGDDGTREKLTDEQIIDLLIALIYSGYETMSTTSMMAVKYLSDHPRALDELRREHLDIRKGKSPEEAISYEDLKSMAFTRAVISETLRLATVVNGLLRKTTQDVEMNGYVIPKGWRIYVYTREINYDPFMYPDPMTFNPWRWLEKNMESHPHFMLFGGGGRMCPGKEVGTAEIATFLHYFVTRYRWQEEGKNTILKFPRVEAPNGLHIRVQDY

SEQ ID NO: 68320 - protein, 429 aa, Triticum aestivum
  peptide (1)..(429): Ceres Seq. ID no. 13654355
  misc_feature (1)..(429): Homolog of NCBI NO: 15239203 NR Description: cytochrome p450 90A1 [Arabidopsis thaliana]
  misc_feature (1)..(426): Homolog of NCBI NO: 34903584 NR Description: cytochrome P450-like protein
  misc_feature (1)..(184): Homolog of NCBI NO: 34896758 NR Description: 'OSJNBa0015G17.1' [Oryza sativa (japonica
  misc_feature (1)..(359): Homolog of NCBI NO: 30693331 NR Description: cytochrome p450, putative [Arabidopsis thaliana]
  misc_feature (1)..(429): Homolog of NCBI NO: 30693327 NR Description: cytochrome p450, putative [Arabidopsis thaliana]
  misc_feature (1)..(429): Homolog of NCBI NO: 21536828 NR Description: cytochrome P450 homolog, putative [Arabidopsis
  misc_feature (1)..(429): Homolog of NCBI NO: 18406372 NR Description: cytochrome p450, putative [Arabidopsis thaliana]
  misc_feature (1)..(429): Homolog of NCBI NO: 9294419 NR Description: cytochrome P450 [Arabidopsis thaliana]
  misc_feature (1)..(426): Homolog of NCBI NO: 5921933 NR Description: Cytochrome P450 85 (Dwarf protein)
  misc_feature (1)..(429): Homolog of NCBI NO: 27127269 NR Description: cytochrome P450 [Oryza sativa (japonica
MGWPLFGETTEFLKQGPSFMKQRRLRYGRLFRTHILGCPTVVCMDPELNRRMLLQGESGGLVPGYPQSMLDILGRNNIAAVHGPLHRLMRGAMLGLVRPAALRTSLLPKIDAFMRDHLHGWAGSVVDVQAKTKEMALLSALQQIAGITAGPLSDALKTELCSLVLGTISLPINLPGTSYYQGFQARTKLVSMLEQMIAERRSSGDAHDDMLDALLRSGDDGTREKLTDEQIIDLLIALIYSGYETMSTTSMMAVKYLSDHPRALDELRREHLDIRKGKSPEEAISYEDLKSMAFTRAVISETLRLATVVNGLLRKTTQDVEMNGYVIPKGWRIYVYTREINYDPFMYPDPMTFNPWRWLEKNMESHPHFMLFGGGGRMCPGKEVGTAEIATFLHYFVTRYRWQEEGKNTILKFPRVEAPNGLHIRVQDY

SEQ ID NO: 68321 - protein, 410 aa, Triticum aestivum
  peptide (1)..(410): Ceres Seq. ID no. 13654356
  misc_feature (1)..(410): Homolog of NCBI NO: 15239203 NR Description: cytochrome p450 90A1 [Arabidopsis thaliana]
  misc_feature (1)..(407): Homolog of NCBI NO: 34903584 NR Description: cytochrome P450-like protein
  misc_feature (1)..(165): Homolog of NCBI NO: 34896758 NR Description: 'OSJNBa0015G17.1' [Oryza sativa (japonica
  misc_feature (1)..(340): Homolog of NCBI NO: 30693331 NR Description: cytochrome p450, putative [Arabidopsis thaliana]
  misc_feature (1)..(410): Homolog of NCBI NO: 30693327 NR Description: cytochrome p450, putative [Arabidopsis thaliana]
  misc_feature (1)..(410): Homolog of NCBI NO: 21536828 NR Description: cytochrome P450 homolog, putative [Arabidopsis
  misc_feature (1)..(410): Homolog of NCBI NO: 18406372 NR Description: cytochrome p450, putative [Arabidopsis thaliana]
  misc_feature (1)..(410): Homolog of NCBI NO: 9294419 NR Description: cytochrome P450 [Arabidopsis thaliana]
  misc_feature (1)..(407): Homolog of NCBI NO: 5921933 NR Description: Cytochrome P450 85 (Dwarf protein)
  misc_feature (1)..(410): Homolog of NCBI NO: 27127269 NR Description: cytochrome P450 [Oryza sativa (japonica
MKQRRLRYGRLFRTHILGCPTVVCMDPELNRRMLLQGESGGLVPGYPQSMLDILGRNNIAAVHGPLHRLMRGAMLGLVRPAALRTSLLPKIDAFMRDHLHGWAGSVVDVQAKTKEMALLSALQQIAGITAGPLSDALKTELCSLVLGTISLPINLPGTSYYQGFQARTKLVSMLEQMIAERRSSGDAHDDMLDALLRSGDDGTREKLTDEQIIDLLIALIYSGYETMSTTSMMAVKYLSDHPRALDELRREHLDIRKGKSPEEAISYEDLKSMAFTRAVISETLRLATVVNGLLRKTTQDVEMNGYVIPKGWRIYVYTREINYDPFMYPDPMTFNPWRWLEKNMESHPHFMLFGGGGRMCPGKEVGTAEIATFLHYFVTRYRWQEEGKNTILKFPRVEAPNGLHIRVQDY

SEQ ID NO: 68322 - DNA, 1450 bp, Triticum aestivum
  misc_feature (1)..(1450): Ceres Seq. ID no. 14302059
ctttatccaccccatccaaatccccgattcctccaaccctcccagaccgcaatggccgccgccgccgccgccgccgccgagccctcctccgccgacagccgccgctacgtcgtgggctacgcgctcgcgcccaagaagcagaacagcttcatcaagccctcgctcatctcccgcgcggcggcgcgcggcgtggacctcgtccccgtcgacgacgcgcggcccctcgccgaccagggccccttcgacctcgtcatccacaagctctacggccacgactggcgcgcccagctccaggccttctccgcccgctacccctccgtccccgtcgtcgacccgccccacgccatcgaccgcctccacaaccgcatctccatgctccaggtcgtctccgagctcgacgtcccgctcaccgacgccgcctccgcctccgctgacggcgaaggccaccgccacaccttcggcatccccagccaggtcgtcgtctacgacgccgccgcgctcgccgactcgggcctcctcgccgcgctccgcttcccgctcatcgccaagcccctcgtcgccgacggcagcgccaagtcgcacaagatgtccctcgtctaccaccgagaggggctccgcaagctccgcccgccgctcgtcctgcaggagttcgtcaaccacggcggcgtcatattcaaggtttacgtcgtcggcggccacgtcacctgcgtcaagcgccgcagcctaccggacgtctccaaggagatcctcgaggacgccgccgccgagggcaccatctccttctcgcaggtatccaatctccccaatcagcgcacggccgaggagtactacgaggacatgcggctcgaggacgccgtcatgccgcccactgatttcgtcaacgagatcgcaggcgggctccgccgtgccctgggcctgcagctcttcaacttcgacatgatccgggatgttcgtgccgggaaccggtatctcgtcattgacatcaactacttccccggttacgcgaagatgcccggctacgagattgtccttactgatttcttctgggatatggttcacaaggacgacgtggccctcaaggaggaggagcagcagagcaatcatgctgttgtgaaatgagatggatttgctcggcatagcttgctcgcaaacctgcaattctttcatgtctgggggaaatgtgaggtggcaggatggttacaagactcgaggggaataacgagcaaccaattaggatggggagatggggattaacaggttctggatttacttgggtttcaaccagccgcaagcggaggacctgcaatgtaaatcctctctccttgctcctgtcataccggttgtttaggtatctttctgttcttcgtaatttgcttcacccagtttagttagaacaaaagtgggggaacagaagccaagttctgaagaagatatatttgttctggaaaac

SEQ ID NO: 68323 - protein, 372 aa, Triticum aestivum
  peptide (1)..(372): Ceres Seq. ID no. 14302060
  misc_feature (34)..(350): Pfam Name: Inositol 1, 3, 4-trisphosphate 5/6-kinase Pfam Description: Inositol 1, 3, 4-trisphosphate 5/6-kinase
  misc_feature (34)..(351): Homolog of NCBI NO: 30689810 NR Description: expressed protein [Arabidopsis thaliana]
  misc_feature (11)..(289): Homolog of NCBI NO: 37530372 NR Description: putative inositol 1,3,4-trisphosphate 5/6-kinase
  misc_feature (90)..(352): Homolog of NCBI NO: 30680654 NR Description: inositol 1,3,4-trisphosphate 5/6-kinase-related
  misc_feature (37)..(333): Homolog of NCBI NO: 7487925 NR Description: inositol 1,3,4-trisphosphate 5/6-kinase homolog
  misc_feature (15)..(351): Homolog of NCBI NO: 27311236 NR Description: Putative inositol 1,3,4-trisphosphate 5/6-kinase
  misc_feature (37)..(352): Homolog of NCBI NO: 18413088 NR Description: inositol 1,3,4-trisphosphate 5/6-kinase-related
  misc_feature (29)..(354): Homolog of NCBI NO: 15237403 NR Description: Inositol 1,3,4-Trisphosphate 5/6 kinase
  misc_feature (29)..(354): Homolog of NCBI NO: 7487924 NR Description: inositol 1,3,4-trisphosphate 5/6-kinase (EC
  misc_feature (21)..(372): Homolog of NCBI NO: 27549256 NR Description: inositol phosphate kinase [Zea mays]
  misc_feature (28)..(356): Homolog of NCBI NO: 37537118 NR Description: putative inositol 1,3,4-trisphosphate 5/6-kinase
LYPPHPNPRFLQPSQTAMAAAAAAAAEPSSADSRRYVVGYALAPKKQNSFIKPSLISRAAARGVDLVPVDDARPLADQGPFDLVIHKLYGHDWRAQLQAFSARYPSVPVVDPPHAIDRLHNRISMLQVVSELDVPLTDAASASADGEGHRHTFGIPSQVVVYDAAALADSGLLAALRFPLIAKPLVADGSAKSHKMSLVYHREGLRKLRPPLVLQEFVNHGGVIFKVYVVGGHVTCVKRRSLPDVSKEILEDAAAEGTISFSQVSNLPNQRTAEEYYEDMRLEDAVMPPTDFVNEIAGGLRRALGLQLFNFDMIRDVRAGNRYLVIDINYFPGYAKMPGYEIVLTDFFWDMVHKDDVALKEEEQQSNHAVVK

SEQ ID NO: 68324 - protein, 355 aa, Triticum aestivum
  peptide (1)..(355): Ceres Seq. ID no. 14302061
  misc_feature (17)..(333): Pfam Name: Inositol 1, 3, 4-trisphosphate 5/6-kinase Pfam Description: Inositol 1, 3, 4-trisphosphate 5/6-kinase
  misc_feature (17)..(334): Homolog of NCBI NO: 30689810 NR Description: expressed protein [Arabidopsis thaliana]
  misc_feature (1)..(272): Homolog of NCBI NO: 37530372 NR Description: putative inositol 1,3,4-trisphosphate 5/6-kinase
  misc_feature (73)..(335): Homolog of NCBI NO: 30680654 NR Description: inositol 1,3,4-trisphosphate 5/6-kinase-related
  misc_feature (20)..(316): Homolog of NCBI NO: 7487925 NR Description: inositol 1,3,4-trisphosphate 5/6-kinase homolog
  misc_feature (1)..(334): Homolog of NCBI NO: 27311236 NR Description: Putative inositol 1,3,4-trisphosphate 5/6-kinase
  misc_feature (20)..(335): Homolog of NCBI NO: 18413088 NR Description: inositol 1,3,4-trisphosphate 5/6-kinase-related
  misc_feature (12)..(337): Homolog of NCBI NO: 15237403 NR Description: Inositol 1,3,4-Trisphosphate 5/6 kinase
  misc_feature (12)..(337): Homolog of NCBI NO: 7487924 NR Description: inositol 1,3,4-trisphosphate 5/6-kinase (EC
  misc_feature (4)..(355): Homolog of NCBI NO: 27549256 NR Description: inositol phosphate kinase [Zea mays]
  misc_feature (11)..(339): Homolog of NCBI NO: 37537118 NR Description: putative inositol 1,3,4-trisphosphate 5/6-kinase
MAAAAAAAAEPSSADSRRYVVGYALAPKKQNSFIKPSLISRAAARGVDLVPVDDARPLADQGPFDLVIHKLYGHDWRAQLQAFSARYPSVPVVDPPHAIDRLHNRISMLQVVSELDVPLTDAASASADGEGHRHTFGIPSQVVVYDAAALADSGLLAALRFPLIAKPLVADGSAKSHKMSLVYHREGLRKLRPPLVLQEFVNHGGVIFKVYVVGGHVTCVKRRSLPDVSKEILEDAAAEGTISFSQVSNLPNQRTAEEYYEDMRLEDAVMPPTDFVNEIAGGLRRALGLQLFNFDMIRDVRAGNRYLVIDINYFPGYAKMPGYEIVLTDFFWDMVHKDDVALKEEEQQSNHAVVK

SEQ ID NO: 68325 - protein, 312 aa, Triticum aestivum
  peptide (1)..(312): Ceres Seq. ID no. 14302062
  misc_feature (26)..(312): Pfam Name: Equine herpesvirus glycoprotein gp2 Pfam Description: Equine herpesvirus glycoprotein gp2
  misc_feature (19)..(312): Homolog of NCBI NO: 4505285 NR Description: mucin 2 [Homo sapiens]
  misc_feature (19)..(312): Homolog of NCBI NO: 2135765 NR Description: mucin 2 precursor, intestinal - human (fragments)
  misc_feature (19)..(312): Homolog of NCBI NO: 186396 NR Description: mucin
  misc_feature (31)..(312): Homolog of NCBI NO: 13592175 NR Description: ppg3 [Leishmania major]
  misc_feature (10)..(312): Homolog of NCBI NO: 13592175 NR Description: ppg3 [Leishmania major]
  misc_feature (20)..(312): Homolog of NCBI NO: 13592175 NR Description: ppg3 [Leishmania major]
  misc_feature (19)..(312): Homolog of NCBI NO: 188864 NR Description: mucin
  misc_feature (10)..(312): Homolog of NCBI NO: 13592175 NR Description: ppg3 [Leishmania major]
  misc_feature (10)..(312): Homolog of NCBI NO: 13592175 NR Description: ppg3 [Leishmania major]
  misc_feature (8)..(312): Homolog of NCBI NO: 13592175 NR Description: ppg3 [Leishmania major]
FIHPIQIPDSSNPPRPQWPPPPPPPPSPPPPTAAATSWATRSRPRSRTASSSPRSSPARRRAAWTSSPSTTRGPSPTRAPSTSSSTSSTATTGAPSSRPSPPATPPSPSSTRPTPSTASTTASPCSRSSPSSTSRSPTPPPPPLTAKATATPSASPARSSSTTPPRSPTRASSPRSASRSSPSPSSPTAAPSRTRCPSSTTERGSASSARRSSCRSSSTTAASYSRFTSSAATSPASSAAAYRTSPRRSSRTPPPRAPSPSRRYPISPISARPRSTTRTCGSRTPSCRPLISSTRSQAGSAVPWACSSSTST

SEQ ID NO: 68326 - DNA, 670 bp, Triticum aestivum
  misc_feature (1)..(670): Ceres Seq. ID no. 13598286
gaaactacgaatgccttccggggtagcgaacccgccgcatgtctctccgcctcctcctcccacctcgcggcagcctacgcctcctttcccctctccatcgccaccagaccccaaggcctccgccctttcgaacgactgccaccggcgtcccacagagggcctctagtttcttcagtatccctatccgcgccttcaccagtatctccggcatggctgctgggacgcagcagcagaccgtggaggttagggagagcgtggagctgacggaggaggaggagcggatcttcgctaggctgctggacgtcgtccgccacttcggactcggcacccagctccgcgtcgccgggggatgggtccgggacaagctattggggaaaggctctgctgacattgacattgcacttgataatatgacgggccaaaatttctgtgagagagtaaatgagtactcaaaattcatgggtgaagagcagaaaggaatcggcgttatccagtgcaaccctgatcaatccaagcacctggaaactgcaagaatgcttatatatggcatatggattgattttgtcaacttgaggtccgaaaagtacgctgaaaacagtcgtattcctactgtggagattggaacagccaaagaagatgcactcccgcaggactaaaacatcatagctta

SEQ ID NO: 68327 - protein, 205 aa, Triticum aestivum
  peptide (1)..(205): Ceres Seq. ID no. 13598287
  misc_feature (73)..(205): Homolog of NCBI NO: 19173101 NR Description: tRNA ADENILYL TRANSFERASE [Encephalitozoon
  misc_feature (69)..(205): Homolog of NCBI NO: 9836828 NR Description: tRNA nucleotidyltransferase [Kluyveromyces lactis]
  misc_feature (99)..(205): Homolog of NCBI NO: 6321016 NR Description: tRNA nucleotidyltransferase (tRNA
  misc_feature (73)..(205): Homolog of NCBI NO: 27734230 NR Description: tRNA nucleotidyltransferase (tRNA
  misc_feature (75)..(205): Homolog of NCBI NO: 23483513 NR Description: tRNA nucleotidyltransferase, mitochondrial
  misc_feature (75)..(205): Homolog of NCBI NO: 23508403 NR Description: hypothetical protein [Plasmodium falciparum 3D7]
  misc_feature (58)..(205): Homolog of NCBI NO: 29246802 NR Description: GLP_0_2580_4190 [Giardia lamblia ATCC 50803]
  misc_feature (68)..(205): Homolog of NCBI NO: 2129851 NR Description: tRNA adenylyltransferase (EC 2.7.7.25) - white
  misc_feature (35)..(205): Homolog of NCBI NO: 15219925 NR Description: tRNA adenylyltransferase -related [Arabidopsis
  misc_feature (35)..(205): Homolog of NCBI NO: 7434868 NR Description: probable tRNA adenylyltransferase (EC 2.7.7.25)
MSLRLLLPPRGSLRLLSPLHRHQTPRPPPFRTTATGVPQRASSFFSIPIRAFTSISGMAAGTQQQTVEVRESVELTEEEERIFARLLDVVRHFGLGTQLRVAGGWVRDKLLGKGSADIDIALDNMTGQNFCERVNEYSKFMGEEQKGIGVIQCNPDQSKHLETARMLIYGIWIDFVNLRSEKYAENSRIPTVEIGTAKEDALPQD

SEQ ID NO: 68328 - protein, 148 aa, Triticum aestivum
  peptide (1)..(148): Ceres Seq. ID no. 13598288
  misc_feature (16)..(148): Homolog of NCBI NO: 19173101 NR Description: tRNA ADENILYL TRANSFERASE [Encephalitozoon
  misc_feature (12)..(148): Homolog of NCBI NO: 9836828 NR Description: tRNA nucleotidyltransferase [Kluyveromyces lactis]
  misc_feature (42)..(148): Homolog of NCBI NO: 6321016 NR Description: tRNA nucleotidyltransferase (tRNA
  misc_feature (16)..(148): Homolog of NCBI NO: 27734230 NR Description: tRNA nucleotidyltransferase (tRNA
  misc_feature (18)..(148): Homolog of NCBI NO: 23483513 NR Description: tRNA nucleotidyltransferase, mitochondrial
  misc_feature (18)..(148): Homolog of NCBI NO: 23508403 NR Description: hypothetical protein [Plasmodium falciparum 3D7]
  misc_feature (1)..(148): Homolog of NCBI NO: 29246802 NR Description: GLP_0_2580_4190 [Giardia lamblia ATCC 50803]
  misc_feature (11)..(148): Homolog of NCBI NO: 2129851 NR Description: tRNA adenylyltransferase (EC 2.7.7.25) - white
  misc_feature (1)..(148): Homolog of NCBI NO: 15219925 NR Description: tRNA adenylyltransferase -related [Arabidopsis
  misc_feature (1)..(148): Homolog of NCBI NO: 7434868 NR Description: probable tRNA adenylyltransferase (EC 2.7.7.25)
MAAGTQQQTVEVRESVELTEEEERIFARLLDVVRHFGLGTQLRVAGGWVRDKLLGKGSADIDIALDNMTGQNFCERVNEYSKFMGEEQKGIGVIQCNPDQSKHLETARMLIYGIWIDFVNLRSEKYAENSRIPTVEIGTAKEDALPQD

SEQ ID NO: 68329 - DNA, 1235 bp, Triticum aestivum
  misc_feature (1)..(1235): Ceres Seq. ID no. 13595983
gtcgtgctgcaattgagatcgactcgtcggtggccgacccctcggcggcgagcaccggggttagggtttaggggcctggatccatggctcggcccatgggatccagcggcttcgaggctgccctagccgtgtgccccgccgccgcccaggcctactccaagtactgcggtattgtatctggatgcacaaatgcgaacccaagggaagggttggcggatctttcacgaactatagataatatggaaggaatgagggatggaatatttggtgatattcacaagctcatgtcagttcttgagttcgatgatgtgagccaattcaattccttctatgattttgtcttcttcatttctcgtgaaaatggccaaaagaatattactgttcagaaggctcttgcagcatggaggatagttcttgttggaaggttccgattgcttgaccggtggtgtaactttgttgagaagtaccaacgtcacaacatttctgaggacgcctggcagcagctactagctttcagcaggtgtgtaaacgaggatctggaaggttatgatccaaaaggtgcttggcctgtcataattgatgattttgtggagcacatgcacagaatctaccgccctagtgactgctccagtgcaatggaatcacaatgcagcatttccaatacatttagaggtctaaatctattacctggatcaaagaggaaatgccctactcagtttaactccagtgaagagagcgtagagctctcagaagctcttagacactctgtccaacttaccccgtcgaagcgacttaaggaaagttctgcgcctactagatatggtgtttgggagcgagacgcaagtacccctttctttaacagcacaccagattgtcgcgaggacatgaatttacagaactcaagaggctgccttcagaactcacctcgtgttattgaggatggtttttcaaaagggttcgaaggttgcatttcaatgaaatgctcattttagtgcaatgaggaatgcatggcatcatcatttatgactgcccgttactccatatatttctgttttgcgtcaacaccattttgtatttgtacttaaagtcagtttcccagtggtgatattattttgtacacaaacagtgatgttatacatgtctgctatcgcagagaaaacggcttgtgattgttctttccaaaaaaaaaaaaaaaaaagsttatcgataccgtcgacctccaggaggcacccgcc

SEQ ID NO: 68330 - protein, 302 aa, Triticum aestivum
  peptide (1)..(302): Ceres Seq. ID no. 15221718
  misc_feature (53)..(170): Homolog of NCBI NO: 6166507 NR Description: RP42 [Mus musculus]
  misc_feature (72)..(170): Homolog of NCBI NO: 18700658 NR Description: leucine zipper protein [Homo sapiens]
  misc_feature (72)..(171): Homolog of NCBI NO: 7019967 NR Description: unnamed protein product [Homo sapiens]
  misc_feature (53)..(171): Homolog of NCBI NO: 34784818 NR Description: RP42 homolog [Homo sapiens]
  misc_feature (53)..(170): Homolog of NCBI NO: 32966900 NR Description: leucine zipper protein [Branchiostoma belcheri
  misc_feature (53)..(170): Homolog of NCBI NO: 34784120 NR Description: Unknown (protein for MGC:66414) [Danio rerio]
  misc_feature (53)..(194): Homolog of NCBI NO: 24664675 NR Description: CG7427-PA [Drosophila melanogaster]
  misc_feature (40)..(225): Homolog of NCBI NO: 15228555 NR Description: expressed protein [Arabidopsis thaliana]
  misc_feature (1)..(174): Homolog of NCBI NO: 34913252 NR Description: P0011H09.36 [Oryza sativa (japonica
  misc_feature (1)..(302): Homolog of NCBI NO: 33146550 NR Description: leucine zipper protein-like
MARPMGSSGFEAALAVCPAAAQAYSKYCGIVSGCTNANPREGLADLSRTIDNMEGMRDGIFGDIHKLMSVLEFDDVSQFNSFYDFVFFISRENGQKNITVQKALAAWRIVLVGRFRLLDRWCNFVEKYQRHNISEDAWQQLLAFSRCVNEDLEGYDPKGAWPVIIDDFVEHMHRIYRPSDCSSAMESQCSISNTFRGLNLLPGSKRKCPTQFNSSEESVELSEALRHSVQLTPSKRLKESSAPTRYGVWERDASTPFFNSTPDCREDMNLQNSRGCLQNSPRVIEDGFSKGFEGCISMKCSF

SEQ ID NO: 68331 - protein, 298 aa, Triticum aestivum
  peptide (1)..(298): Ceres Seq. ID no. 15221719
  misc_feature (49)..(166): Homolog of NCBI NO: 6166507 NR Description: RP42 [Mus musculus]
  misc_feature (68)..(166): Homolog of NCBI NO: 18700658 NR Description: leucine zipper protein [Homo sapiens]
  misc_feature (68)..(167): Homolog of NCBI NO: 7019967 NR Description: unnamed protein product [Homo sapiens]
  misc_feature (49)..(167): Homolog of NCBI NO: 34784818 NR Description: RP42 homolog [Homo sapiens]
  misc_feature (49)..(166): Homolog of NCBI NO: 32966900 NR Description: leucine zipper protein [Branchiostoma belcheri
  misc_feature (49)..(166): Homolog of NCBI NO: 34784120 NR Description: Unknown (protein for MGC:66414) [Danio rerio]
  misc_feature (49)..(190): Homolog of NCBI NO: 24664675 NR Description: CG7427-PA [Drosophila melanogaster]
  misc_feature (36)..(221): Homolog of NCBI NO: 15228555 NR Description: expressed protein [Arabidopsis thaliana]
  misc_feature (1)..(170): Homolog of NCBI NO: 34913252 NR Description: P0011H09.36 [Oryza sativa (japonica
  misc_feature (1)..(298): Homolog of NCBI NO: 33146550 NR Description: leucine zipper protein-like
MGSSGFEAALAVCPAAAQAYSKYCGIVSGCTNANPREGLADLSRTIDNMEGMRDGIFGDIHKLMSVLEFDDVSQFNSFYDFVFFISRENGQKNITVQKALAAWRIVLVGRFRLLDRWCNFVEKYQRHNISEDAWQQLLAFSRCVNEDLEGYDPKGAWPVIIDDFVEHMHRIYRPSDCSSAMESQCSISNTFRGLNLLPGSKRKCPTQFNSSEESVELSEALRHSVQLTPSKRLKESSAPTRYGVWERDASTPFFNSTPDCREDMNLQNSRGCLQNSPRVIEDGFSKGFEGCISMKCSF

SEQ ID NO: 68332 - protein, 250 aa, Triticum aestivum
  peptide (1)..(250): Ceres Seq. ID no. 15221720
  misc_feature (1)..(118): Homolog of NCBI NO: 6166507 NR Description: RP42 [Mus musculus]
  misc_feature (20)..(118): Homolog of NCBI NO: 18700658 NR Description: leucine zipper protein [Homo sapiens]
  misc_feature (20)..(119): Homolog of NCBI NO: 7019967 NR Description: unnamed protein product [Homo sapiens]
  misc_feature (1)..(119): Homolog of NCBI NO: 34784818 NR Description: RP42 homolog [Homo sapiens]
  misc_feature (1)..(118): Homolog of NCBI NO: 32966900 NR Description: leucine zipper protein [Branchiostoma belcheri
  misc_feature (1)..(118): Homolog of NCBI NO: 34784120 NR Description: Unknown (protein for MGC:66414) [Danio rerio]
  misc_feature (1)..(142): Homolog of NCBI NO: 24664675 NR Description: CG7427-PA [Drosophila melanogaster]
  misc_feature (1)..(173): Homolog of NCBI NO: 15228555 NR Description: expressed protein [Arabidopsis thaliana]
  misc_feature (1)..(122): Homolog of NCBI NO: 34913252 NR Description: P0011H09.36 [Oryza sativa (japonica
  misc_feature (1)..(250): Homolog of NCBI NO: 33146550 NR Description: leucine zipper protein-like
MEGMRDGIFGDIHKLMSVLEFDDVSQFNSFYDFVFFISRENGQKNITVQKALAAWRIVLVGRFRLLDRWCNFVEKYQRHNISEDAWQQLLAFSRCVNEDLEGYDPKGAWPVIIDDFVEHMHRIYRPSDCSSAMESQCSISNTFRGLNLLPGSKRKCPTQFNSSEESVELSEALRHSVQLTPSKRLKESSAPTRYGVWERDASTPFFNSTPDCREDMNLQNSRGCLQNSPRVIEDGFSKGFEGCISMKCSF

SEQ ID NO: 68333 - DNA, 1295 bp, Triticum aestivum
  misc_feature (1)..(1295): Ceres Seq. ID no. 13596358
caaaaaccctagcgcatgcaccttgccggtccggccccgagacgcattccggaaacctccggaacgccgcaatggtttggtttcagtgcgaagactgcggcgagaacctcaagaagcccaagcttgccggccacttccgctcatgctccgcctacaagctttcctgcatcgactgcggcgcagtcttcggccaggacaccgtccagacgcacacccagtgcatctccgaggccgagaagtatggtcccaaggaactgaacaagccgtccagcaatgcacagggtaagccagacaagccaaagccaaatgccgatgttgatatcaatgttgggttgtcgacacgccctccttggttctgcagcctatgcaatacaactaccaccagcaagcaaactctcttggggcatgctgatggcaggaaacatagggcaaaagcaaaagcctttcatgcttctcagaagcaagaaaatggagctgaacaaactccaagcgacaaggaaactggtggagcaccaacaacagcatctacagaactaaatgacgggaagggtgctgacagtgaaagagatgctgacgaggatgttgtgaagagaaagagaacagatagcacaacctcggaggagccagataatgcaaaaagacaaaatttatcgaacttgaagactggagaggcgacacaatctgaaaatggagaagcggaactcaaaacaaagagcaaaagtgctgcagaagaactggtcaatgatgccaatcatcaagatattaagaagcagaaaatcaagtggaagaaaattattacgaagatactagagatgaattcggatggagctatgaagttaaagaagctacaaaagctagttatcagggaagttttagaatgtggtctgttgaaagataaggaacagctgcatgctctgttgatggacaagatagcttcgagctccaggttttctgtggacgggaagaacattagattggtggccaagaatgaagaatcatagtccctgacattttcttgtgctctatttaagatgttactaaaatttgagggaaaatgataccggcaatattatttttttagctgtcaattttggatttgttgtgcctctatcatttccagagaactgttccaagatacagaaactttgtgcttgatttttttttttttggaacagtgggaccaaaccgattttgtagctccagatgctgtgaacttttccggtatactgtatttggcaaggcaactcgtttgcaaattgacaactatatacgcaatcaagaaatgcgagctgccg

SEQ ID NO: 68334 - protein, 332 aa, Triticum aestivum
  peptide (1)..(332): Ceres Seq. ID no. 15221846
  misc_feature (212)..(326): Homolog of NCBI NO: 39581890 NR Description: Hypothetical protein CBG20151 [Caenorhabditis
  misc_feature (149)..(329): Homolog of NCBI NO: 21902026 NR Description: B1097D05.27 [Oryza sativa (japonica
  misc_feature (80)..(166): Homolog of NCBI NO: 7486241 NR Description: probable RNA-binding protein At2g19380 -
  misc_feature (24)..(165): Homolog of NCBI NO: 18399023 NR Description: RNA recognition motif (RRM)-containing protein
  misc_feature (18)..(262): Homolog of NCBI NO: 7486241 NR Description: probable RNA-binding protein At2g19380 -
  misc_feature (24)..(165): Homolog of NCBI NO: 7486241 NR Description: probable RNA-binding protein At2g19380 -
  misc_feature (149)..(329): Homolog of NCBI NO: 7486241 NR Description: probable RNA-binding protein At2g19380 -
  misc_feature (24)..(262): Homolog of NCBI NO: 21536909 NR Description: unknown [Arabidopsis thaliana]
  misc_feature (24)..(262): Homolog of NCBI NO: 18399026 NR Description: expressed protein [Arabidopsis thaliana]
  misc_feature (11)..(270): Homolog of NCBI NO: 21902026 NR Description: B1097D05.27 [Oryza sativa (japonica
KTLAHAPCRSGPETHSGNLRNAAMVWFQCEDCGENLKKPKLAGHFRSCSAYKLSCIDCGAVFGQDTVQTHTQCISEAEKYGPKELNKPSSNAQGKPDKPKPNADVDINVGLSTRPPWFCSLCNTTTTSKQTLLGHADGRKHRAKAKAFHASQKQENGAEQTPSDKETGGAPTTASTELNDGKGADSERDADEDVVKRKRTDSTTSEEPDNAKRQNLSNLKTGEATQSENGEAELKTKSKSAAEELVNDANHQDIKKQKIKWKKIITKILEMNSDGAMKLKKLQKLVIREVLECGLLKDKEQLHALLMDKIASSSRFSVDGKNIRLVAKNEES

SEQ ID NO: 68335 - protein, 309 aa, Triticum aestivum
  peptide (1)..(309): Ceres Seq. ID no. 15221847
  misc_feature (189)..(303): Homolog of NCBI NO: 39581890 NR Description: Hypothetical protein CBG20151 [Caenorhabditis
  misc_feature (126)..(306): Homolog of NCBI NO: 21902026 NR Description: B1097D05.27 [Oryza sativa (japonica
  misc_feature (57)..(143): Homolog of NCBI NO: 7486241 NR Description: probable RNA-binding protein At2g19380 -
  misc_feature (1)..(142): Homolog of NCBI NO: 18399023 NR Description: RNA recognition motif (RRM)-containing protein
  misc_feature (1)..(239): Homolog of NCBI NO: 7486241 NR Description: probable RNA-binding protein At2g19380 -
  misc_feature (1)..(142): Homolog of NCBI NO: 7486241 NR Description: probable RNA-binding protein At2g19380 -
  misc_feature (126)..(306): Homolog of NCBI NO: 7486241 NR Description: probable RNA-binding protein At2g19380 -
  misc_feature (1)..(239): Homolog of NCBI NO: 21536909 NR Description: unknown [Arabidopsis thaliana]
  misc_feature (1)..(239): Homolog of NCBI NO: 18399026 NR Description: expressed protein [Arabidopsis thaliana]
  misc_feature (1)..(247): Homolog of NCBI NO: 21902026 NR Description: B1097D05.27 [Oryza sativa (japonica
MVWFQCEDCGENLKKPKLAGHFRSCSAYKLSCIDCGAVFGQDTVQTHTQCISEAEKYGPKELNKPSSNAQGKPDKPKPNADVDINVGLSTRPPWFCSLCNTTTTSKQTLLGHADGRKHRAKAKAFHASQKQENGAEQTPSDKETGGAPTTASTELNDGKGADSERDADEDVVKRKRTDSTTSEEPDNAKRQNLSNLKTGEATQSENGEAELKTKSKSAAEELVNDANHQDIKKQKIKWKKIITKILEMNSDGAMKLKKLQKLVIREVLECGLLKDKEQLHALLMDKIASSSRFSVDGKNIRLVAKNEES

SEQ ID NO: 68336 - DNA, 1445 bp, Triticum aestivum
  misc_feature (1)..(1445): Ceres Seq. ID no. 13596087
ggtttgaagcaaaccggccggccaccaaccaaccaacgctcccgaatctatcccatcatatcatatcaaaccttccgccgccggcgagctactcgcagcgccggacagcccggcccacttgttctggttctctccctcctctgcccctccgccgcgagctccaacggagaggggaggaagaagcaaagcctcggacatggcacgcgtcctccctctggacatcgagcccggggaggcgcccagagctggtgagacggttgctagcacgccaagctcttcagctgtggtgtcatgcaatagaattgagcattctgagcaaaacataaaggacgacgaatacacgatgctgatgacgccaactcaacatgcaacagctgacaacaacacagaaattttacctcagcaacccaagtcaagtcacttcagttggtggatgacagctctgcttgtctgcttccttcttataatggcaacttatatctttgtgaaatttggagccccctttgcctttgagaaggttctttttccaatcatgaaatgggaagcaagtgcctttggtcgtccagtattggctcttgtcctcgtcgcgtctttggctatcttcccactcattttagtcccctctggaccttctatgtggttagcaggaatgatcttcggttatggctggggtttcgtgattattattgttgggactactcttggcatggttggagcatattggatcggctcattgttccgcgagcgactacatgcatggttaaagagatggcctcagcagatagctctaataaagcttgctggcgaagggagttggttccaccagtttcgagtggttgcgctattcagagtctcaccgtttccatactcgatttttaactatgccgtggccgtgacagaaatcaaattcagcccttatgtatgtggttcagttgccggaatgacacctgaggcattcatctatatctacagcgggcggttgatacgtacgctggccgatgtgaagtatggcaagcataagttgactactgtggagataatctacagcataatctcgttcatcgctgccgctgccctcacggtcgccttcacagtttacgccaagaagtcgctgaacaacataaaaggcccagatgatatctcagaggaccaccaacctgctgctggctctgctggggtgactgcactaaaaaatggccatcaggacgtgcatatcctgtagctttgtttacatgtcgtatgatgtctgtattcattcaattcatcagagaaaataggtagctaggctctgacagcaggtggatgcacctgtcttctaactagatvaatatgtatggttttactgcttgattagtttcatgtggttgatcacccaacatgtattttggccttgttgttggctactggaaatttggccttctcttgaggtgcacatattttttgtc

SEQ ID NO: 68337 - protein, 341 aa, Triticum aestivum
  peptide (1)..(341): Ceres Seq. ID no. 15221765
  misc_feature (40)..(185): Homolog of NCBI NO: 8778630 NR Description: F5O11.19 [Arabidopsis thaliana]
  misc_feature (257)..(313): Homolog of NCBI NO: 8778630 NR Description: F5O11.19 [Arabidopsis thaliana]
  misc_feature (99)..(259): Homolog of NCBI NO: 8778630 NR Description: F5O11.19 [Arabidopsis thaliana]
  misc_feature (169)..(314): Homolog of NCBI NO: 7486891 NR Description: hypothetical protein T12H17.240 - Arabidopsis
  misc_feature (185)..(320): Homolog of NCBI NO: 25410981 NR Description: hypothetical protein At2g02370 [imported] -
  misc_feature (34)..(310): Homolog of NCBI NO: 15234386 NR Description: expressed protein [Arabidopsis thaliana]
  misc_feature (40)..(313): Homolog of NCBI NO: 15221330 NR Description: expressed protein [Arabidopsis thaliana]
  misc_feature (69)..(314): Homolog of NCBI NO: 30685958 NR Description: expressed protein [Arabidopsis thaliana]
  misc_feature (4)..(337): Homolog of NCBI NO: 34913316 NR Description: P0519E12.36 [Oryza sativa (japonica
  misc_feature (36)..(320): Homolog of NCBI NO: 18395356 NR Description: expressed protein [Arabidopsis thaliana]
MARVLPLDIEPGEAPRAGETVASTPSSSAVVSCNRIEHSEQNIKDDEYTMLMTPTQHATADNNTEILPQQPKSSHFSWWMTALLVCFLLIMATYIFVKFGAPFAFEKVLFPIMKWEASAFGRPVLALVLVASLAIFPLILVPSGPSMWLAGMIFGYGWGFVIIIVGTTLGMVGAYWIGSLFRERLHAWLKRWPQQIALIKLAGEGSWFHQFRVVALFRVSPFPYSIFNYAVAVTEIKFSPYVCGSVAGMTPEAFIYIYSGRLIRTLADVKYGKHKLTTVEIIYSIISFIAAAALTVAFTVYAKKSLNNIKGPDDISEDHQPAAGSAGVTALKNGHQDVHIL

SEQ ID NO: 68338 - protein, 292 aa, Triticum aestivum
  peptide (1)..(292): Ceres Seq. ID no. 15221766
  misc_feature (1)..(136): Homolog of NCBI NO: 8778630 NR Description: F5O11.19 [Arabidopsis thaliana]
  misc_feature (208)..(264): Homolog of NCBI NO: 8778630 NR Description: F5O11.19 [Arabidopsis thaliana]
  misc_feature (50)..(210): Homolog of NCBI NO: 8778630 NR Description: F5O11.19 [Arabidopsis thaliana]
  misc_feature (120)..(265): Homolog of NCBI NO: 7486891 NR Description: hypothetical protein T12H17.240 - Arabidopsis
  misc_feature (136)..(271): Homolog of NCBI NO: 25410981 NR Description: hypothetical protein At2g02370 [imported] -
  misc_feature (1)..(261): Homolog of NCBI NO: 15234386 NR Description: expressed protein [Arabidopsis thaliana]
  misc_feature (1)..(264): Homolog of NCBI NO: 15221330 NR Description: expressed protein [Arabidopsis thaliana]
  misc_feature (20)..(265): Homolog of NCBI NO: 30685958 NR Description: expressed protein [Arabidopsis thaliana]
  misc_feature (1)..(288): Homolog of NCBI NO: 34913316 NR Description: P0519E12.36 [Oryza sativa (japonica
  misc_feature (1)..(271): Homolog of NCBI NO: 18395356 NR Description: expressed protein [Arabidopsis thaliana]
MLMTPTQHATADNNTEILPQQPKSSHFSWWMTALLVCFLLIMATYIFVKFGAPFAFEKVLFPIMKWEASAFGRPVLALVLVASLAIFPLILVPSGPSMWLAGMIFGYGWGFVIIIVGTTLGMVGAYWIGSLFRERLHAWLKRWPQQIALIKLAGEGSWFHQFRVVALFRVSPFPYSIFNYAVAVTEIKFSPYVCGSVAGMTPEAFIYIYSGRLIRTLADVKYGKHKLTTVEIIYSIISFIAAAALTVAFTVYAKKSLNNIKGPDDISEDHQPAAGSAGVTALKNGHQDVHIL

SEQ ID NO: 68339 - protein, 290 aa, Triticum aestivum
  peptide (1)..(290): Ceres Seq. ID no. 15221767
  misc_feature (1)..(134): Homolog of NCBI NO: 8778630 NR Description: F5O11.19 [Arabidopsis thaliana]
  misc_feature (206)..(262): Homolog of NCBI NO: 8778630 NR Description: F5O11.19 [Arabidopsis thaliana]
  misc_feature (48)..(208): Homolog of NCBI NO: 8778630 NR Description: F5O11.19 [Arabidopsis thaliana]
  misc_feature (118)..(263): Homolog of NCBI NO: 7486891 NR Description: hypothetical protein T12H17.240 - Arabidopsis
  misc_feature (134)..(269): Homolog of NCBI NO: 25410981 NR Description: hypothetical protein At2g02370 [imported] -
  misc_feature (1)..(259): Homolog of NCBI NO: 15234386 NR Description: expressed protein [Arabidopsis thaliana]
  misc_feature (1)..(262): Homolog of NCBI NO: 15221330 NR Description: expressed protein [Arabidopsis thaliana]
  misc_feature (18)..(263): Homolog of NCBI NO: 30685958 NR Description: expressed protein [Arabidopsis thaliana]
  misc_feature (1)..(286): Homolog of NCBI NO: 34913316 NR Description: P0519E12.36 [Oryza sativa (japonica
  misc_feature (1)..(269): Homolog of NCBI NO: 18395356 NR Description: expressed protein [Arabidopsis thaliana]
MTPTQHATADNNTEILPQQPKSSHFSWWMTALLVCFLLIMATYIFVKFGAPFAFEKVLFPIMKWEASAFGRPVLALVLVASLAIFPLILVPSGPSMWLAGMIFGYGWGFVIIIVGTTLGMVGAYWIGSLFRERLHAWLKRWPQQIALIKLAGEGSWFHQFRVVALFRVSPFPYSIFNYAVAVTEIKFSPYVCGSVAGMTPEAFIYIYSGRLIRTLADVKYGKHKLTTVEIIYSIISFIAAAALTVAFTVYAKKSLNNIKGPDDISEDHQPAAGSAGVTALKNGHQDVHIL

SEQ ID NO: 68340 - DNA, 1491 bp, Triticum aestivum
  misc_feature (1)..(1491): Ceres Seq. ID no. 13595984
gctcgtctctgccgatacttcacacaagaaagatgagatcgccggcaactcttccactactatcttccgatcgtttggtcgccatggcgccgtgacctcgccgtgcttcagcgatggccccgcgctggacctctgatgaccagacaagacggaccgaccgcaccgtgactccgacagccactccgtggtggtaatcagtggagtgccgccaccgtcgatcaaaatctttgacctcccgcatccaccgccagttctgtctccctgcaagcaaatctcagccgccattgctcagcttctgagcagcggagcggatccgagatggagcccatccctctgctcacgccgtacaagatgggccagttcgagctgtcgcaccgggtcgtgctggcgcccatgacgcggcagcgcgcctacggcggcgtgccgcagccgcacgccgccctctactactcccagcgcgccacccccggcggcctcctcatctccgaggccacgcgcgtcgcgccggcaaggcaggacgaggagccggcctcgttcagggacatgccgggggtctgggcgccggagcaggtcgaggcgtggaggcccgtggtcgacgccgtgcacgccgagggcgccgtcttcttctgccagctctggcacgccgcggccgcccccggcgacgccgtcagggaaaggcagcaggtgagcccgcagatgagctatgatggccgccgcgaggagctcacgtcgccgaggagggtggcagctgaggacgcgcccggcgtcgtcgacgcgttcagacgcgccgccaggaacgccatcgatgccggcttcgacggcgtcgagctccaaggcaccaacggctacttcgtcgtcgacggcggtggcccggagagtcgctgccggttcgcgctggaggtggtggacgccgtggcgcgggagatcggcggccaccgcctgggcctgcgactggaccagttcaccgcagagccggacgagcacgcgctggcgctccatgtcgtcagccggctcaacgacctcggcgtgctctactgccacatgatcgagcccaaggtggacggccggcggcgcgtgtcccggcggctgctgccttacagggaggcgttcggcggcacgttcatcgccagcggcgggtacgggcgggaggagggcgacgcggccgtcggcgaggggtacgccgacctggtggcgtacgggcggctcttcctggcgaacccggacctgccgaggaggttcgagctcggcgcgccgctcaacgactgcgtcagcgccaccttctacggcgccggcgccggcgccgcccaccccgccgtcggatacactgattacccgttcctagaatgatcgatgattgtgctcggatgttcttttcggcgtaaacaatcgaccatgatttgcctcctcagtgttgtatatatgatagtactaattttatggggattaagttcatcaaaaaaaaaaaaaaaaaagcttatcgataccgtcgac

SEQ ID NO: 68341 - protein, 342 aa, Triticum aestivum
  peptide (1)..(342): Ceres Seq. ID no. 13595985
  misc_feature (5)..(179): Pfam Name: NADH:flavin oxidoreductase / NADH oxidase family Pfam Description: NADH:flavin oxidoreductase / NADH oxidase family
  misc_feature (182)..(342): Homolog of NCBI NO: 40645353 NR Description: hypothetical protein [Pisum sativum]
  misc_feature (2)..(215): Homolog of NCBI NO: 40645353 NR Description: hypothetical protein [Pisum sativum]
  misc_feature (182)..(342): Homolog of NCBI NO: 40645351 NR Description: hypothetical protein [Pisum sativum]
  misc_feature (2)..(215): Homolog of NCBI NO: 40645351 NR Description: hypothetical protein [Pisum sativum]
  misc_feature (182)..(342): Homolog of NCBI NO: 40645347 NR Description: hypothetical protein [Pisum sativum]
  misc_feature (2)..(215): Homolog of NCBI NO: 40645347 NR Description: hypothetical protein [Pisum sativum]
  misc_feature (182)..(342): Homolog of NCBI NO: 40645345 NR Description: hypothetical protein [Pisum sativum]
  misc_feature (2)..(215): Homolog of NCBI NO: 40645345 NR Description: hypothetical protein [Pisum sativum]
  misc_feature (182)..(342): Homolog of NCBI NO: 23495288 NR Description: 12-oxophytodienoic acid reductase [Oryza sativa]
  misc_feature (4)..(215): Homolog of NCBI NO: 23495288 NR Description: 12-oxophytodienoic acid reductase [Oryza sativa]
MEPIPLLTPYKMGQFELSHRVVLAPMTRQRAYGGVPQPHAALYYSQRATPGGLLISEATRVAPARQDEEPASFRDMPGVWAPEQVEAWRPVVDAVHAEGAVFFCQLWHAAAAPGDAVRERQQVSPQMSYDGRREELTSPRRVAAEDAPGVVDAFRRAARNAIDAGFDGVELQGTNGYFVVDGGGPESRCRFALEVVDAVAREIGGHRLGLRLDQFTAEPDEHALALHVVSRLNDLGVLYCHMIEPKVDGRRRVSRRLLPYREAFGGTFIASGGYGREEGDAAVGEGYADLVAYGRLFLANPDLPRRFELGAPLNDCVSATFYGAGAGAAHPAVGYTDYPFLE

SEQ ID NO: 68342 - protein, 331 aa, Triticum aestivum
  peptide (1)..(331): Ceres Seq. ID no. 13595986
  misc_feature (1)..(168): Pfam Name: NADH:flavin oxidoreductase / NADH oxidase family Pfam Description: NADH:flavin oxidoreductase / NADH oxidase family
  misc_feature (171)..(331): Homolog of NCBI NO: 40645353 NR Description: hypothetical protein [Pisum sativum]
  misc_feature (1)..(204): Homolog of NCBI NO: 40645353 NR Description: hypothetical protein [Pisum sativum]
  misc_feature (171)..(331): Homolog of NCBI NO: 40645351 NR Description: hypothetical protein [Pisum sativum]
  misc_feature (1)..(204): Homolog of NCBI NO: 40645351 NR Description: hypothetical protein [Pisum sativum]
  misc_feature (171)..(331): Homolog of NCBI NO: 40645347 NR Description: hypothetical protein [Pisum sativum]
  misc_feature (1)..(204): Homolog of NCBI NO: 40645347 NR Description: hypothetical protein [Pisum sativum]
  misc_feature (171)..(331): Homolog of NCBI NO: 40645345 NR Description: hypothetical protein [Pisum sativum]
  misc_feature (1)..(204): Homolog of NCBI NO: 40645345 NR Description: hypothetical protein [Pisum sativum]
  misc_feature (171)..(331): Homolog of NCBI NO: 23495288 NR Description: 12-oxophytodienoic acid reductase [Oryza sativa]
  misc_feature (1)..(204): Homolog of NCBI NO: 23495288 NR Description: 12-oxophytodienoic acid reductase [Oryza sativa]
MGQFELSHRVVLAPMTRQRAYGGVPQPHAALYYSQRATPGGLLISEATRVAPARQDEEPASFRDMPGVWAPEQVEAWRPVVDAVHAEGAVFFCQLWHAAAAPGDAVRERQQVSPQMSYDGRREELTSPRRVAAEDAPGVVDAFRRAARNAIDAGFDGVELQGTNGYFVVDGGGPESRCRFALEVVDAVAREIGGHRLGLRLDQFTAEPDEHALALHVVSRLNDLGVLYCHMIEPKVDGRRRVSRRLLPYREAFGGTFIASGGYGREEGDAAVGEGYADLVAYGRLFLANPDLPRRFELGAPLNDCVSATFYGAGAGAAHPAVGYTDYPFLE

SEQ ID NO: 68343 - protein, 317 aa, Triticum aestivum
  peptide (1)..(317): Ceres Seq. ID no. 13595987
  misc_feature (1)..(154): Pfam Name: NADH:flavin oxidoreductase / NADH oxidase family Pfam Description: NADH:flavin oxidoreductase / NADH oxidase family
  misc_feature (157)..(317): Homolog of NCBI NO: 40645353 NR Description: hypothetical protein [Pisum sativum]
  misc_feature (1)..(190): Homolog of NCBI NO: 40645353 NR Description: hypothetical protein [Pisum sativum]
  misc_feature (157)..(317): Homolog of NCBI NO: 40645351 NR Description: hypothetical protein [Pisum sativum]
  misc_feature (1)..(190): Homolog of NCBI NO: 40645351 NR Description: hypothetical protein [Pisum sativum]
  misc_feature (157)..(317): Homolog of NCBI NO: 40645347 NR Description: hypothetical protein [Pisum sativum]
  misc_feature (1)..(190): Homolog of NCBI NO: 40645347 NR Description: hypothetical protein [Pisum sativum]
  misc_feature (157)..(317): Homolog of NCBI NO: 40645345 NR Description: hypothetical protein [Pisum sativum]
  misc_feature (1)..(190): Homolog of NCBI NO: 40645345 NR Description: hypothetical protein [Pisum sativum]
  misc_feature (157)..(317): Homolog of NCBI NO: 23495288 NR Description: 12-oxophytodienoic acid reductase [Oryza sativa]
  misc_feature (1)..(190): Homolog of NCBI NO: 23495288 NR Description: 12-oxophytodienoic acid reductase [Oryza sativa]
MTRQRAYGGVPQPHAALYYSQRATPGGLLISEATRVAPARQDEEPASFRDMPGVWAPEQVEAWRPVVDAVHAEGAVFFCQLWHAAAAPGDAVRERQQVSPQMSYDGRREELTSPRRVAAEDAPGVVDAFRRAARNAIDAGFDGVELQGTNGYFVVDGGGPESRCRFALEVVDAVAREIGGHRLGLRLDQFTAEPDEHALALHVVSRLNDLGVLYCHMIEPKVDGRRRVSRRLLPYREAFGGTFIASGGYGREEGDAAVGEGYADLVAYGRLFLANPDLPRRFELGAPLNDCVSATFYGAGAGAAHPAVGYTDYPFLE

SEQ ID NO: 68344 - DNA, 1148 bp, Triticum aestivum
  misc_feature (1)..(1148): Ceres Seq. ID no. 12614573
acaaagctggaccagaccagaccagaggcaggcagcattcgcagcagcagaagaagacgacgcagccgccaccgccaccgccaccaccgccgacgcgcgcagagctcgacactcgagagaggctgacgagggcgacgacgccggtggccatgtcggcggagacggagcggagctccacggagtcgtccgcggcgtccgggctcgacttcgaggacaccgcgctcacgctcaccctgcgcctccccggcgaccccgaccgcaagcgcggcgcctcctcctcctcctcctgctccctcgccgaccgctcctccctcctcgccgaggctccgccggcccccaaggagcgggtggttggctggccgccggtgaggtcgttccgcaagaacgcgctcgagaacgtcgccgccgggtccaccagggcggccgccgcgccggccaagttcgtcaaggtggccgtcgatggcgcgccctacctgcgcaaggtgaacctgcgggactacgccggctacgaccagctcctccgcgcgctccagggcaagttctgctcccacttcaccatcaggaagttcgccaacgacgagatgaagctggtggacgcggtgaacgggacggagtacgtgcccacctacgaggacaaggacggcgactggatgctcgtcggcgacgtcccctggaagatgtttgaggaagcctgccaacgcgtccgcctgatgaagaactccgaggccgtgaacgtagcacccagagctgcccggtgaggcacgccgcgtggcccttacgaacggtgctgccggaaaggaggaggaggctttgctctgccgaggagataggaatgtgtacagctatcggttaccactttgggtttacttgatgctcttgggtcgtgaaaagttgctggtttcattactcgtctgtagcagcaccactatagtctctactactacatatagaagatggtgatggtcaaagtactgggagcttgaaatatacgcctttacatatagtttgtttgtttgtctcttgatgaataagaccaagcttgcagaaactcggcgttctctgctgtttgcgcgcacccgtcgcgaggtcgcctgtgatgccgcaggcaacgcctttggctttgccttggtagagtttatttttgtgtc

SEQ ID NO: 68345 - protein, 251 aa, Triticum aestivum
  peptide (1)..(251): Ceres Seq. ID no. 12614574
  misc_feature (67)..(225): Pfam Name: AUX/IAA family Pfam Description: AUX/IAA family
  misc_feature (135)..(249): Homolog of NCBI NO: 15229343 NR Description: auxin-induced protein
  misc_feature (69)..(249): Homolog of NCBI NO: 21592887 NR Description: putative auxin-induced protein, IAA17/AXR3-1
  misc_feature (69)..(249): Homolog of NCBI NO: 15219694 NR Description: putative auxin-induced protein, IAA17/AXR3-1
  misc_feature (50)..(250): Homolog of NCBI NO: 22531416 NR Description: IAA16 protein [Gossypium hirsutum]
  misc_feature (29)..(249): Homolog of NCBI NO: 32396295 NR Description: auxin-induced protein 2 [Pinus taeda]
  misc_feature (52)..(249): Homolog of NCBI NO: 4887020 NR Description: Nt-iaa28 deduced protein [Nicotiana tabacum]
  misc_feature (32)..(130): Homolog of NCBI NO: 20269059 NR Description: aux/IAA protein [Populus tremula x Populus
  misc_feature (115)..(249): Homolog of NCBI NO: 20269059 NR Description: aux/IAA protein [Populus tremula x Populus
  misc_feature (86)..(249): Homolog of NCBI NO: 4887022 NR Description: Nt-iaa4.1 deduced protein [Nicotiana tabacum]
  misc_feature (50)..(225): Homolog of NCBI NO: 34906138 NR Description: P0509B06.6 [Oryza sativa (japonica
KAGPDQTRGRQHSQQQKKTTQPPPPPPPPPTRAELDTRERLTRATTPVAMSAETERSSTESSAASGLDFEDTALTLTLRLPGDPDRKRGASSSSSCSLADRSSLLAEAPPAPKERVVGWPPVRSFRKNALENVAAGSTRAAAAPAKFVKVAVDGAPYLRKVNLRDYAGYDQLLRALQGKFCSHFTIRKFANDEMKLVDAVNGTEYVPTYEDKDGDWMLVGDVPWKMFEEACQRVRLMKNSEAVNVAPRAAR

SEQ ID NO: 68346 - protein, 227 aa, Triticum aestivum
  peptide (1)..(227): Ceres Seq. ID no. 12614575
QSWTRPDQRQAAFAAAEEDDAAATATATTADARRARHSREADEGDDAGGHVGGDGAELHGVVRGVRARLRGHRAHAHPAPPRRPRPQARRLLLLLLLPRRPLLPPRRGSAGPQGAGGWLAAGEVVPQERARERRRRVHQGGRRAGQVRQGGRRWRALPAQGEPAGLRRLRPAPPRAPGQVLLPLHHQEVRQRRDEAGGRGERDGVRAHLRGQGRRLDARRRRPLEDV

SEQ ID NO: 68347 - protein, 202 aa, Triticum aestivum
  peptide (1)..(202): Ceres Seq. ID no. 12614576
  misc_feature (18)..(176): Pfam Name: AUX/IAA family Pfam Description: AUX/IAA family
  misc_feature (86)..(200): Homolog of NCBI NO: 15229343 NR Description: auxin-induced protein
  misc_feature (20)..(200): Homolog of NCBI NO: 21592887 NR Description: putative auxin-induced protein, IAA17/AXR3-1
  misc_feature (20)..(200): Homolog of NCBI NO: 15219694 NR Description: putative auxin-induced protein, IAA17/AXR3-1
  misc_feature (1)..(201): Homolog of NCBI NO: 22531416 NR Description: IAA16 protein [Gossypium hirsutum]
  misc_feature (1)..(200): Homolog of NCBI NO: 32396295 NR Description: auxin-induced protein 2 [Pinus taeda]
  misc_feature (3)..(200): Homolog of NCBI NO: 4887020 NR Description: Nt-iaa28 deduced protein [Nicotiana tabacum]
  misc_feature (1)..(81): Homolog of NCBI NO: 20269059 NR Description: aux/IAA protein [Populus tremula x Populus
  misc_feature (66)..(200): Homolog of NCBI NO: 20269059 NR Description: aux/IAA protein [Populus tremula x Populus
  misc_feature (37)..(200): Homolog of NCBI NO: 4887022 NR Description: Nt-iaa4.1 deduced protein [Nicotiana tabacum]
  misc_feature (1)..(176): Homolog of NCBI NO: 34906138 NR Description: P0509B06.6 [Oryza sativa (japonica
MSAETERSSTESSAASGLDFEDTALTLTLRLPGDPDRKRGASSSSSCSLADRSSLLAEAPPAPKERVVGWPPVRSFRKNALENVAAGSTRAAAAPAKFVKVAVDGAPYLRKVNLRDYAGYDQLLRALQGKFCSHFTIRKFANDEMKLVDAVNGTEYVPTYEDKDGDWMLVGDVPWKMFEEACQRVRLMKNSEAVNVAPRAAR

SEQ ID NO: 68348 - DNA, 1517 bp, Triticum aestivum
  misc_feature (1)..(1517): Ceres Seq. ID no. 13654241
atggcatgcgctatatcttcctccccaaagtttgtcggaattacaaaacagcccccgtactcttcctccccacctctcgcctaccgttcgcgtcctccgcccgaggcctccacgggagcgccggagcgcacgcctgatctccccgcctcctcctcccggcaccgcggccccggctcctagcccgcctcacgatcgggggacgaggcacgagtaggagggcgagggtgcgaggagatgcagagggaccgaggcgtctcggcggccgctgggggcgccggtgagaggaagcggataggcgaggcgatggacaggtcctccccgtcgacgtcctgggggttctccggcggacgcgagagggaccggatcgccgccggcaagcagccggaggtgccccgctccggcggcggatccaccgccatgtccaagggcaagttgtccgatggagaatcggatactgacagtgaagaatcagatctcagtggttctgatggagaagatacatcgtggatttcatggttctgtagcttgcgaggcaatgagtttttctgtgaagttgatgacgattacatacaagacgatttcaatctctgtgggctaagcggtcaagttccatattatgaatatgctcttgatctgatattggatgtcgagtcttcacatggtgatatgttcacagaagagcagaatgaacttattgaatcagctgctgagatgctttatggattgattcatgttcgatatattcttacaagtaaaggattggctgcaatgttggataaatacaagaattatgactttggcagatgtccaagagtgcactgcagcggccagccatgccttccagttggccagtcggacattcctcgttctagtaatgtgaaaatttactgcccaaagtgtgaagatctctactatccgagatccaaatatcaaagcaacattgacggagcttactttgggacaacgtttcctcacttgtttctgatgacgtacccacatttgaagccccagaaaccgtcacagcagtacgtccccaaggtttttggcttcaaacttcataagccataacaagtttgaagactgaaggtgcaaaaggttcatagcagagttgtctgatatgtcacgctgcacatcacttccaagctgctcatttgtgcgcgtggcgcagtttagcacttggttcagttggttacccgtggcttggccgaaaccgacctgacctctggctgatttcccttgtcctccgttttcgctctcgcctgacgttctgatttgatccttgtggcttgtttagtgtagtagatttcttctatcctgttctttatactcattattatatttgagtttggcagttgctaaaagaaggcagttcgtaacagtgttatgtctctgctgtgtatttttcattttgttttacattaggttcctttgccaaaatgtgatggtaatggtaatctgaaacattcgatccggctattcttattcttcacctgcaactgagtttgtatggaaagttt

SEQ ID NO: 68349 - protein, 277 aa, Triticum aestivum
  peptide (1)..(277): Ceres Seq. ID no. 13654242
  misc_feature (87)..(265): Pfam Name: Casein kinase II regulatory subunit Pfam Description: Casein kinase II regulatory subunit
  misc_feature (8)..(275): Homolog of NCBI NO: 15224934 NR Description: casein kinase II beta chain, putative
  misc_feature (16)..(277): Homolog of NCBI NO: 11527002 NR Description: protein kinase CK2 regulatory subunit CK2B2 [Zea
  misc_feature (1)..(277): Homolog of NCBI NO: 15236597 NR Description: casein kinase II beta chain, putative
  misc_feature (28)..(277): Homolog of NCBI NO: 29367573 NR Description: possible protein kinase CK2 regulatory subunit
  misc_feature (1)..(277): Homolog of NCBI NO: 15238013 NR Description: casein kinase II beta chain, putative
  misc_feature (1)..(276): Homolog of NCBI NO: 21261784 NR Description: protein kinase Ck2 regulatory subunit 2
  misc_feature (10)..(277): Homolog of NCBI NO: 11527004 NR Description: protein kinase CK2 regulatory subunit CK2B3 [Zea
  misc_feature (6)..(277): Homolog of NCBI NO: 34901776 NR Description: OJ1058_B11.17 [Oryza sativa (japonica
  misc_feature (3)..(276): Homolog of NCBI NO: 37536920 NR Description: putative casein kinase II beta subunit
  misc_feature (1)..(277): Homolog of NCBI NO: 11527000 NR Description: protein kinase CK2 regulatory subunit CK2B1 [Zea
MQRDRGVSAAAGGAGERKRIGEAMDRSSPSTSWGFSGGRERDRIAAGKQPEVPRSGGGSTAMSKGKLSDGESDTDSEESDLSGSDGEDTSWISWFCSLRGNEFFCEVDDDYIQDDFNLCGLSGQVPYYEYALDLILDVESSHGDMFTEEQNELIESAAEMLYGLIHVRYILTSKGLAAMLDKYKNYDFGRCPRVHCSGQPCLPVGQSDIPRSSNVKIYCPKCEDLYYPRSKYQSNIDGAYFGTTFPHLFLMTYPHLKPQKPSQQYVPKVFGFKLHKP

SEQ ID NO: 68350 - protein, 254 aa, Triticum aestivum
  peptide (1)..(254): Ceres Seq. ID no. 13654243
  misc_feature (64)..(242): Pfam Name: Casein kinase II regulatory subunit Pfam Description: Casein kinase II regulatory subunit
  misc_feature (1)..(252): Homolog of NCBI NO: 15224934 NR Description: casein kinase II beta chain, putative
  misc_feature (1)..(254): Homolog of NCBI NO: 11527002 NR Description: protein kinase CK2 regulatory subunit CK2B2 [Zea
  misc_feature (1)..(254): Homolog of NCBI NO: 15236597 NR Description: casein kinase II beta chain, putative
  misc_feature (5)..(254): Homolog of NCBI NO: 29367573 NR Description: possible protein kinase CK2 regulatory subunit
  misc_feature (1)..(254): Homolog of NCBI NO: 15238013 NR Description: casein kinase II beta chain, putative
  misc_feature (1)..(253): Homolog of NCBI NO: 21261784 NR Description: protein kinase Ck2 regulatory subunit 2
  misc_feature (1)..(254): Homolog of NCBI NO: 11527004 NR Description: protein kinase CK2 regulatory subunit CK2B3 [Zea
  misc_feature (1)..(254): Homolog of NCBI NO: 34901776 NR Description: OJ1058_B11.17 [Oryza sativa (japonica
  misc_feature (1)..(253): Homolog of NCBI NO: 37536920 NR Description: putative casein kinase II beta subunit
  misc_feature (1)..(254): Homolog of NCBI NO: 11527000 NR Description: protein kinase CK2 regulatory subunit CK2B1 [Zea
MDRSSPSTSWGFSGGRERDRIAAGKQPEVPRSGGGSTAMSKGKLSDGESDTDSEESDLSGSDGEDTSWISWFCSLRGNEFFCEVDDDYIQDDFNLCGLSGQVPYYEYALDLILDVESSHGDMFTEEQNELIESAAEMLYGLIHVRYILTSKGLAAMLDKYKNYDFGRCPRVHCSGQPCLPVGQSDIPRSSNVKIYCPKCEDLYYPRSKYQSNIDGAYFGTTFPHLFLMTYPHLKPQKPSQQYVPKVFGFKLHKP

SEQ ID NO: 68351 - protein, 216 aa, Triticum aestivum
  peptide (1)..(216): Ceres Seq. ID no. 13654244
  misc_feature (26)..(204): Pfam Name: Casein kinase II regulatory subunit Pfam Description: Casein kinase II regulatory subunit
  misc_feature (1)..(214): Homolog of NCBI NO: 15224934 NR Description: casein kinase II beta chain, putative
  misc_feature (1)..(216): Homolog of NCBI NO: 11527002 NR Description: protein kinase CK2 regulatory subunit CK2B2 [Zea
  misc_feature (1)..(216): Homolog of NCBI NO: 15236597 NR Description: casein kinase II beta chain, putative
  misc_feature (1)..(216): Homolog of NCBI NO: 29367573 NR Description: possible protein kinase CK2 regulatory subunit
  misc_feature (1)..(216): Homolog of NCBI NO: 15238013 NR Description: casein kinase II beta chain, putative
  misc_feature (1)..(215): Homolog of NCBI NO: 21261784 NR Description: protein kinase Ck2 regulatory subunit 2
  misc_feature (1)..(216): Homolog of NCBI NO: 11527004 NR Description: protein kinase CK2 regulatory subunit CK2B3 [Zea
  misc_feature (1)..(216): Homolog of NCBI NO: 34901776 NR Description: OJ1058_B11.17 [Oryza sativa (japonica
  misc_feature (1)..(215): Homolog of NCBI NO: 37536920 NR Description: putative casein kinase II beta subunit
  misc_feature (1)..(216): Homolog of NCBI NO: 11527000 NR Description: protein kinase CK2 regulatory subunit CK2B1 [Zea
MSKGKLSDGESDTDSEESDLSGSDGEDTSWISWFCSLRGNEFFCEVDDDYIQDDFNLCGLSGQVPYYEYALDLILDVESSHGDMFTEEQNELIESAAEMLYGLIHVRYILTSKGLAAMLDKYKNYDFGRCPRVHCSGQPCLPVGQSDIPRSSNVKIYCPKCEDLYYPRSKYQSNIDGAYFGTTFPHLFLMTYPHLKPQKPSQQYVPKVFGFKLHKP

SEQ ID NO: 68352 - DNA, 1198 bp, Triticum aestivum
  misc_feature (1)..(1198): Ceres Seq. ID no. 13654155
ctagaacatcctaatcgaaaattatttgattactttgatttttctctatggaattctgaaatctgaggcgagtttgtgttagattgtgcctgggggcttgattagattgtttcgagatggcggcgtgccggggattcttcgagtgcctgctcaggctgctcaactttttcctcaccgtcgccggccttgccatggtcggctacgggatctacctgctcgtggagtggatgaggatctccggcggtggcgaaggggcaccgccgtctccggccccgccggctgagttgcttacgtttggccgcccgatgctcacggtcgtggcccttggagaaggaggcagtttcttcgacaagctacccaaagcatggttcatctatttgttcattggtgttggtgctgttatcttcatcgtttctctatttggctgcattggagcagggacaaggaatacgtgttgcttgtgttgttattctttcttggtcatattattaatccttgctgaggctggaggtgctgcattcatattctttgaccatagctggaaagatgtaattccagtggataagacacaaaactttgatgccatgtataactttctgaatgaaaactggaagattgcaagatgggttgctcttggtgttgttgtttttgaggtattgcttttcttgttagctcttgctatcagggcaatgaacaaacctgccgagtatgacagtgatgatgaaatcattggaactgttcgaagcactagcatccgtcagcctcttatccattcccagaatgctccggctactggtgttcccgtcccaacacttgatcaacgtgcgagcagaaatgatgcatggagccaaaggatgcgagagaagtatggtctggacacaagccaatttacttacaacccatcagatgcaaccagatatcagcaaaatggggcacctccagctgaagaaaggagccgttgcatcgtaatgtgaaaatccttcacgacgtcatccaaattgatggttcttgaacaggccatctcagcttgcacagtttggctataccgtgttgttcagagtggtgtatgaatagaggtccttttaccttaatgctcatcttatctgctgtcttctgaacaactccatgcacctgtaatttttgtgtgaacgagtattggccgttgatatctcattatatttcatgttttcctcggatt

SEQ ID NO: 68353 - protein, 285 aa, Triticum aestivum
  peptide (1)..(285): Ceres Seq. ID no. 15219620
  misc_feature (9)..(179): Pfam Name: Tetraspanin family Pfam Description: Tetraspanin family
  misc_feature (3)..(285): Homolog of NCBI NO: 18398417 NR Description: senescence-associated protein family [Arabidopsis
MAACRGFFECLLRLLNFFLTVAGLAMVGYGIYLLVEWMRISGGGEGAPPSPAPPAELLTFGRPMLTVVALGEGGSFFDKLPKAWFIYLFIGVGAVIFIVSLFGCIGAGTRNTCCLCCYSFLVILLILAEAGGAAFIFFDHSWKDVIPVDKTQNFDAMYNFLNENWKIARWVALGVVVFEVLLFLLALAIRAMNKPAEYDSDDEIIGTVRSTSIRQPLIHSQNAPATGVPVPTLDQRASRNDAWSQRMREKYGLDTSQFTYNPSDATRYQQNGAPPAEERSRCIVM

SEQ ID NO: 68354 - protein, 260 aa, Triticum aestivum
  peptide (1)..(260): Ceres Seq. ID no. 15219621
  misc_feature (1)..(154): Pfam Name: Tetraspanin family Pfam Description: Tetraspanin family
  misc_feature (1)..(260): Homolog of NCBI NO: 18398417 NR Description: senescence-associated protein family [Arabidopsis
MVGYGIYLLVEWMRISGGGEGAPPSPAPPAELLTFGRPMLTVVALGEGGSFFDKLPKAWFIYLFIGVGAVIFIVSLFGCIGAGTRNTCCLCCYSFLVILLILAEAGGAAFIFFDHSWKDVIPVDKTQNFDAMYNFLNENWKIARWVALGVVVFEVLLFLLALAIRAMNKPAEYDSDDEIIGTVRSTSIRQPLIHSQNAPATGVPVPTLDQRASRNDAWSQRMREKYGLDTSQFTYNPSDATRYQQNGAPPAEERSRCIVM

SEQ ID NO: 68355 - protein, 248 aa, Triticum aestivum
  peptide (1)..(248): Ceres Seq. ID no. 15219622
  misc_feature (1)..(142): Pfam Name: Tetraspanin family Pfam Description: Tetraspanin family
  misc_feature (1)..(248): Homolog of NCBI NO: 18398417 NR Description: senescence-associated protein family [Arabidopsis
MRISGGGEGAPPSPAPPAELLTFGRPMLTVVALGEGGSFFDKLPKAWFIYLFIGVGAVIFIVSLFGCIGAGTRNTCCLCCYSFLVILLILAEAGGAAFIFFDHSWKDVIPVDKTQNFDAMYNFLNENWKIARWVALGVVVFEVLLFLLALAIRAMNKPAEYDSDDEIIGTVRSTSIRQPLIHSQNAPATGVPVPTLDQRASRNDAWSQRMREKYGLDTSQFTYNPSDATRYQQNGAPPAEERSRCIVM

SEQ ID NO: 68356 - DNA, 1222 bp, Triticum aestivum
  misc_feature (1)..(1222): Ceres Seq. ID no. 14302096
atacttttcagagttgtggcatcgaacacattgtggaaggccttacaccgcagacgccccgcgccgcgtcaagaacacagaggacaaagcacggtctgggagagccagagcaacagcagcggcgaggctccagccatggcggtgagcaacaacatcacggcgtgcgtgacactgatggcgctcatctgcgcggtccccgtcatcgcctcgggggtgtggttcgcgtcggcgcagggggaggagtgcgcgcggctggcgcgctggcccgtggccatcctgggtggcctcatcctgctggcggcgctggcgggcttcgtcggcgcctactggaaccgccgccgcctcctcgccttctacctcttcgccatggcggcgctcatcgccctcctcatcgcgctcctcgtcttcgccttcgcggtcacccgcggctccggcgcctacccggtgctcggccgcgagtacgacgagtaccgcctcgacggcttctccatgtggctgcgcgggtacgtcgaccccgcccggtgggaggggatcaggtcctgcctcgccgtctctgacacctgcaagaagctcgcccgacaggccggctacgtcactgccgaccagttctaccagtcccgcctcacgccgctccagtcgggctgctgcaagcccctgtcggtgtgcgggttcgggtacgtgagcccgacggtgtggacaaacccggcgcggcccgcgtcggacccggactgcggcctgtggagcaacgacccggcgcagctgtgctacgagtgcgagtcgtgccgcgcgggcctcctggcggcgctgcggagccagtggcacaaggccaacatcgcgctcgtcgtcgccaccgtctcgctcgtcttcctctacctcatcggctgcagtgcctacaagaacgcgcacgccgaggccatctaccaccgctacaagtggtgattcccatttcccatcccatcccatcactgagaaccaaccgccatcgccagtttgcccatgtaatagactagtatgtttgcttcatactgtactgtattattattagtagcttggtaactggtagtaagctagtaggggaagatgggaacttcagattcatggtttgcccatgcatgtatcgtgaagaattttagcgagatgcatgcgctcttggtgttgatgtgaatgttgtttgtaatatgcagtagagatgttcttcagatttatggttaagaattttagt

SEQ ID NO: 68357 - protein, 312 aa, Triticum aestivum
  peptide (1)..(312): Ceres Seq. ID no. 14302097
  misc_feature (48)..(287): Pfam Name: Tetraspanin family Pfam Description: Tetraspanin family
  misc_feature (49)..(309): Homolog of NCBI NO: 21537169 NR Description: senescence-associated protein-like protein
  misc_feature (49)..(300): Homolog of NCBI NO: 15234374 NR Description: senescence-associated protein, putative
  misc_feature (46)..(300): Homolog of NCBI NO: 15238641 NR Description: senescence-associated protein family [Arabidopsis
  misc_feature (49)..(309): Homolog of NCBI NO: 20197174 NR Description: hypothetical protein [Arabidopsis thaliana]
  misc_feature (45)..(300): Homolog of NCBI NO: 29367553 NR Description: senescence-associated protein-like protein
  misc_feature (48)..(311): Homolog of NCBI NO: 3551954 NR Description: senescence-associated protein 5 [Hemerocallis
  misc_feature (46)..(300): Homolog of NCBI NO: 15231187 NR Description: senescence-associated protein family [Arabidopsis
  misc_feature (46)..(311): Homolog of NCBI NO: 15237490 NR Description: senescence-associated protein, putative
  misc_feature (46)..(311): Homolog of NCBI NO: 17979386 NR Description: putative senescence-associated protein 5
  misc_feature (46)..(311): Homolog of NCBI NO: 15224802 NR Description: senescence-associated protein- related
ILFRVVASNTLWKALHRRRPAPRQEHRGQSTVWESQSNSSGEAPAMAVSNNITACVTLMALICAVPVIASGVWFASAQGEECARLARWPVAILGGLILLAALAGFVGAYWNRRRLLAFYLFAMAALIALLIALLVFAFAVTRGSGAYPVLGREYDEYRLDGFSMWLRGYVDPARWEGIRSCLAVSDTCKKLARQAGYVTADQFYQSRLTPLQSGCCKPLSVCGFGYVSPTVWTNPARPASDPDCGLWSNDPAQLCYECESCRAGLLAALRSQWHKANIALVVATVSLVFLYLIGCSAYKNAHAEAIYHRYKW

SEQ ID NO: 68358 - protein, 267 aa, Triticum aestivum
  peptide (1)..(267): Ceres Seq. ID no. 14302098
  misc_feature (3)..(242): Pfam Name: Tetraspanin family Pfam Description: Tetraspanin family
  misc_feature (4)..(264): Homolog of NCBI NO: 21537169 NR Description: senescence-associated protein-like protein
  misc_feature (4)..(255): Homolog of NCBI NO: 15234374 NR Description: senescence-associated protein, putative
  misc_feature (1)..(255): Homolog of NCBI NO: 15238641 NR Description: senescence-associated protein family [Arabidopsis
  misc_feature (4)..(264): Homolog of NCBI NO: 20197174 NR Description: hypothetical protein [Arabidopsis thaliana]
  misc_feature (1)..(255): Homolog of NCBI NO: 29367553 NR Description: senescence-associated protein-like protein
  misc_feature (3)..(266): Homolog of NCBI NO: 3551954 NR Description: senescence-associated protein 5 [Hemerocallis
  misc_feature (1)..(255): Homolog of NCBI NO: 15231187 NR Description: senescence-associated protein family [Arabidopsis
  misc_feature (1)..(266): Homolog of NCBI NO: 15237490 NR Description: senescence-associated protein, putative
  misc_feature (1)..(266): Homolog of NCBI NO: 17979386 NR Description: putative senescence-associated protein 5
  misc_feature (1)..(266): Homolog of NCBI NO: 15224802 NR Description: senescence-associated protein- related
MAVSNNITACVTLMALICAVPVIASGVWFASAQGEECARLARWPVAILGGLILLAALAGFVGAYWNRRRLLAFYLFAMAALIALLIALLVFAFAVTRGSGAYPVLGREYDEYRLDGFSMWLRGYVDPARWEGIRSCLAVSDTCKKLARQAGYVTADQFYQSRLTPLQSGCCKPLSVCGFGYVSPTVWTNPARPASDPDCGLWSNDPAQLCYECESCRAGLLAALRSQWHKANIALVVATVSLVFLYLIGCSAYKNAHAEAIYHRYKW

SEQ ID NO: 68359 - protein, 254 aa, Triticum aestivum
  peptide (1)..(254): Ceres Seq. ID no. 14302099
  misc_feature (1)..(229): Pfam Name: Tetraspanin family Pfam Description: Tetraspanin family
  misc_feature (1)..(251): Homolog of NCBI NO: 21537169 NR Description: senescence-associated protein-like protein
  misc_feature (1)..(242): Homolog of NCBI NO: 15234374 NR Description: senescence-associated protein, putative
  misc_feature (1)..(242): Homolog of NCBI NO: 15238641 NR Description: senescence-associated protein family [Arabidopsis
  misc_feature (1)..(251): Homolog of NCBI NO: 20197174 NR Description: hypothetical protein [Arabidopsis thaliana]
  misc_feature (1)..(242): Homolog of NCBI NO: 29367553 NR Description: senescence-associated protein-like protein
  misc_feature (1)..(253): Homolog of NCBI NO: 3551954 NR Description: senescence-associated protein 5 [Hemerocallis
  misc_feature (1)..(242): Homolog of NCBI NO: 15231187 NR Description: senescence-associated protein family [Arabidopsis
  misc_feature (1)..(253): Homolog of NCBI NO: 15237490 NR Description: senescence-associated protein, putative
  misc_feature (1)..(253): Homolog of NCBI NO: 17979386 NR Description: putative senescence-associated protein 5
  misc_feature (1)..(253): Homolog of NCBI NO: 15224802 NR Description: senescence-associated protein- related
MALICAVPVIASGVWFASAQGEECARLARWPVAILGGLILLAALAGFVGAYWNRRRLLAFYLFAMAALIALLIALLVFAFAVTRGSGAYPVLGREYDEYRLDGFSMWLRGYVDPARWEGIRSCLAVSDTCKKLARQAGYVTADQFYQSRLTPLQSGCCKPLSVCGFGYVSPTVWTNPARPASDPDCGLWSNDPAQLCYECESCRAGLLAALRSQWHKANIALVVATVSLVFLYLIGCSAYKNAHAEAIYHRYKW

SEQ ID NO: 68360 - DNA, 966 bp, Triticum aestivum
  misc_feature (1)..(966): Ceres Seq. ID no. 14302271
cacgaaaatcattttcgcaactctcggagcgcaccaccaccaacttcttctgcgcaaaaggagagaaatagagaaaccaccaccaaaccccaagagcgagctcggtgcgcgcgcgcgcgagagagagagagagagagagagagagagagagagagaaacagaggaggcggcgccgagcgagcgcgatcccctcctcctcccccgtcgcgtgatcatggccatggccgcctccagatcgctctgggcctcccgcgccgcctcctacctcaagatctccgccttccccagggccttctccaccgtgctgaaggatctgaagtatgctgaaacccatgaatgggtaaaggttgatggtgattccgcaaccgttgggattacagaccatgcccaggaccatttgggtgatgttgtatatgtggagctgccagaagttggcgcttctgtatctcagggaacaaactttggtgctgttgaaagtgtgaaggcaaccagtgacatcaactcgccggtgtctggagaggtcattgcagtgaatgacgaactactagagaaaccagcattggtcaatggagatccatatgagggcggctggatcatcaaggtcaaggtcagcgatgcaggtgagctcaactcactgatggacgacaagaagtactcaaaattctgcgaggaagaggacagcaagcattaagcatggtggattctgaaagagaatctgcgcttcgacactcataggtgtttgtcatgtgctgttgggcactttgtaccacctgctttctcagcccagaaaggatcaaaacatggaataaatggcatttgcctaccctacaagggcttgcgagatccgaaatctgtatatcactcgagttcctttttcttgttgccatggtttcatctctgatttaagctctgttctgattagttggtattcaaattctaaatgcatacgtactgatgatgctacac

SEQ ID NO: 68361 - protein, 229 aa, Triticum aestivum
  peptide (1)..(229): Ceres Seq. ID no. 14302272
  misc_feature (105)..(225): Pfam Name: Glycine cleavage H-protein Pfam Description: Glycine cleavage H-protein
  misc_feature (80)..(225): Homolog of NCBI NO: 1362140 NR Description: H-protein precursor - Flaveria trinervia
  misc_feature (80)..(229): Homolog of NCBI NO: 3688309 NR Description: H-Protein precursor [Flaveria pringlei]
  misc_feature (80)..(229): Homolog of NCBI NO: 2119600 NR Description: glycine cleavage system protein H precursor
  misc_feature (80)..(227): Homolog of NCBI NO: 37536058 NR Description: putative glycine decarboxylase subunit
  misc_feature (80)..(229): Homolog of NCBI NO: 2887286 NR Description: H protein [Flaveria anomala]
  misc_feature (80)..(229): Homolog of NCBI NO: 2499417 NR Description: Glycine cleavage system H protein, mitochondrial
  misc_feature (80)..(229): Homolog of NCBI NO: 2147453 NR Description: glycine cleavage system protein H precursor
  misc_feature (80)..(229): Homolog of NCBI NO: 1346118 NR Description: Glycine cleavage system H protein, mitochondrial
  misc_feature (76)..(229): Homolog of NCBI NO: 29124971 NR Description: glycine decarboxylase complex H-protein [Populus
  misc_feature (76)..(229): Homolog of NCBI NO: 15226906 NR Description: glycine decarboxylase complex H-protein
TKIIFATLGAHHHQLLLRKRREIEKPPPNPKSELGARARERERERERERERETEEAAPSERDPLLLPRRVIMAMAASRSLWASRAASYLKISAFPRAFSTVLKDLKYAETHEWVKVDGDSATVGITDHAQDHLGDVVYVELPEVGASVSQGTNFGAVESVKATSDINSPVSGEVIAVNDELLEKPALVNGDPYEGGWIIKVKVSDAGELNSLMDDKKYSKFCEEEDSKH

SEQ ID NO: 68362 - protein, 158 aa, Triticum aestivum
  peptide (1)..(158): Ceres Seq. ID no. 14302273
  misc_feature (34)..(154): Pfam Name: Glycine cleavage H-protein Pfam Description: Glycine cleavage H-protein
  misc_feature (9)..(154): Homolog of NCBI NO: 1362140 NR Description: H-protein precursor - Flaveria trinervia
  misc_feature (9)..(158): Homolog of NCBI NO: 3688309 NR Description: H-Protein precursor [Flaveria pringlei]
  misc_feature (9)..(158): Homolog of NCBI NO: 2119600 NR Description: glycine cleavage system protein H precursor
  misc_feature (9)..(156): Homolog of NCBI NO: 37536058 NR Description: putative glycine decarboxylase subunit
  misc_feature (9)..(158): Homolog of NCBI NO: 2499417 NR Description: Glycine cleavage system H protein, mitochondrial
  misc_feature (9)..(158): Homolog of NCBI NO: 2887286 NR Description: H protein [Flaveria anomala]
  misc_feature (9)..(158): Homolog of NCBI NO: 2147453 NR Description: glycine cleavage system protein H precursor
  misc_feature (9)..(158): Homolog of NCBI NO: 1346118 NR Description: Glycine cleavage system H protein, mitochondrial
  misc_feature (5)..(158): Homolog of NCBI NO: 29124971 NR Description: glycine decarboxylase complex H-protein [Populus
  misc_feature (5)..(158): Homolog of NCBI NO: 15226906 NR Description: glycine decarboxylase complex H-protein
MAMAASRSLWASRAASYLKISAFPRAFSTVLKDLKYAETHEWVKVDGDSATVGITDHAQDHLGDVVYVELPEVGASVSQGTNFGAVESVKATSDINSPVSGEVIAVNDELLEKPALVNGDPYEGGWIIKVKVSDAGELNSLMDDKKYSKFCEEEDSKH

SEQ ID NO: 68363 - protein, 156 aa, Triticum aestivum
  peptide (1)..(156): Ceres Seq. ID no. 14302274
  misc_feature (32)..(152): Pfam Name: Glycine cleavage H-protein Pfam Description: Glycine cleavage H-protein
  misc_feature (7)..(152): Homolog of NCBI NO: 1362140 NR Description: H-protein precursor - Flaveria trinervia
  misc_feature (7)..(156): Homolog of NCBI NO: 3688309 NR Description: H-Protein precursor [Flaveria pringlei]
  misc_feature (7)..(156): Homolog of NCBI NO: 2119600 NR Description: glycine cleavage system protein H precursor
  misc_feature (7)..(154): Homolog of NCBI NO: 37536058 NR Description: putative glycine decarboxylase subunit
  misc_feature (7)..(156): Homolog of NCBI NO: 2499417 NR Description: Glycine cleavage system H protein, mitochondrial
  misc_feature (7)..(156): Homolog of NCBI NO: 2887286 NR Description: H protein [Flaveria anomala]
  misc_feature (7)..(156): Homolog of NCBI NO: 2147453 NR Description: glycine cleavage system protein H precursor
  misc_feature (7)..(156): Homolog of NCBI NO: 1346118 NR Description: Glycine cleavage system H protein, mitochondrial
  misc_feature (3)..(156): Homolog of NCBI NO: 29124971 NR Description: glycine decarboxylase complex H-protein [Populus
  misc_feature (3)..(156): Homolog of NCBI NO: 15226906 NR Description: glycine decarboxylase complex H-protein
MAASRSLWASRAASYLKISAFPRAFSTVLKDLKYAETHEWVKVDGDSATVGITDHAQDHLGDVVYVELPEVGASVSQGTNFGAVESVKATSDINSPVSGEVIAVNDELLEKPALVNGDPYEGGWIIKVKVSDAGELNSLMDDKKYSKFCEEEDSKH

SEQ ID NO: 68364 - DNA, 462 bp, Triticum aestivum
  misc_feature (1)..(462): Ceres Seq. ID no. 13654250
cccaaaccccatccatcccttcctcctcccgagcagcctcctcgccgacgaaagtgccggagagctttccagaaggtcagggggagggatgggcgagttcgacgactactgggcgcgggcgtacaggggcgaccccgcggtgccgcactccgacccgcagcggctcatctccacctggaccggcgccttcnccctcggcgccgccgcctgcgtccaccaccacgtctccggcctcgcctccaacatcaagtcccttccccacagctggcangacatgacaatgatgctcgatcagaagcgctggaagaaaattcttgacaagaagcagcaacaagcttaagttccataaccttcaccgnttgggccacagttggaagagctttctatcttgctngttgggcatggcanaggaagttcttgcatcagtntggtattaggatagagtttttctacctcttgttt

SEQ ID NO: 68365 - protein, 112 aa, Triticum aestivum
  peptide (1)..(112): Ceres Seq. ID no. 13654251
  misc_feature (64)..(64): Xaa is any aa, unknown or other
  misc_feature (90)..(90): Xaa is any aa, unknown or other
PNPIHPFLLPSSLLADESAGELSRRSGGGMGEFDDYWARAYRGDPAVPHSDPQRLISTWTGAFXLGAAACVHHHVSGLASNIKSLPHSWXDMTMMLDQKRWKKILDKKQQQA

SEQ ID NO: 68366 - protein, 105 aa, Triticum aestivum
  peptide (1)..(105): Ceres Seq. ID no. 13654252
  misc_feature (64)..(64): Xaa is any aa, unknown or other
  misc_feature (91)..(91): Xaa is any aa, unknown or other
PKPHPSLPPPEQPPRRRKCRRAFQKVRGRDGRVRRLLGAGVQGRPRGAALRPAAAHLHLDRRLXPRRRRLRPPPRLRPRLQHQVPSPQLAXHDNDARSEALEENS

SEQ ID NO: 68367 - protein, 91 aa, Triticum aestivum
  peptide (1)..(91): Ceres Seq. ID no. 13654253
  misc_feature (2)..(88): Pfam Name: Glycoprotein GG/GX Pfam Description: Glycoprotein GG/GX
  misc_feature (3)..(84): Homolog of NCBI NO: 38566476 NR Description: polymorphic epithelial mucin [Capra hircus]
  misc_feature (63)..(63): Xaa is any aa, unknown or other
  misc_feature (90)..(90): Xaa is any aa, unknown or other
QTPSIPSSSRAASSPTKVPESFPEGQGEGWASSTTTGRGRTGATPRCRTPTRSGSSPPGPAPXPSAPPPASTTTSPASPPTSSPFPTAGXT

SEQ ID NO: 68368 - protein, 83 aa, Triticum aestivum
  peptide (1)..(83): Ceres Seq. ID no. 13654254
  misc_feature (35)..(35): Xaa is any aa, unknown or other
  misc_feature (61)..(61): Xaa is any aa, unknown or other
MGEFDDYWARAYRGDPAVPHSDPQRLISTWTGAFXLGAAACVHHHVSGLASNIKSLPHSWXDMTMMLDQKRWKKILDKKQQQA

SEQ ID NO: 68369 - DNA, 1147 bp, Triticum aestivum
  misc_feature (1)..(1147): Ceres Seq. ID no. 13596265
ctcacccaatacccacgagaacctctagctaccgtagcttagctgagcttcctagctgtagccatggccaagtatttccagagtgctcctgttagcaatgaagcattgaagcacaaggagattctgttggacggcctgtacatgcaccaggaccttgacggatcaccaaatcagaaccagaaaactatagtgaatcctaacctccctctgcagtttggctgcacagtggctaatgactggaccatatatgatggccttggccccgataagaagcttgttgcgcgtgcacaagggccacatatgggggcaggagtagccaaaggaagctggttcatatgtttcaacatggtgttcgtcgatgacaggtttgcgggttccagccttaaggtgctcggacattttgaagagccggtagaaggtgagtgggcaatccttggcgggacaggagagtttgcctatgcacaaggtgtggtcaccttcaagaaactccaggacggaagcactagggtcagacagcttcagatacgtgccatctgcctcagctttccatcgtcactttcaatgcctacgaagatggggccatggggtggaaatggaggctccattcaagacatcaccacaggaaccccgatgcgcctgcaaagtgtgacactcagcagcgagagcagctggattgtctctcttgcatttacttatattgacaaacttggaaagaggcgcaacgaaggcccctggggtcctgacaaagggaacagtcaaaccatcgagttcggacctaaagaatatgtgacggaaatatcagggacaattgacaatgtcatatcgtcacttgttatcacgacaaacatcaaaaagtatggaccgtttgggcatgagaagggcaaccgtttcagcgccgccgtgccagaaaacacatgtgttgtgggattctttgccaggaccgggaatgctcttgatgccattggcgtttaccacggacccatagtggtttgaactggatttaatgctgctttgctttagtttatggcaatctcatgcgagttcattttaagggaaagtgtgtttgttccacatttgttttccagcaataacatggcaagggtcatgcttacgtctgtgatccatgtctctctagtgcaagagtctt

SEQ ID NO: 68370 - protein, 309 aa, Triticum aestivum
  peptide (1)..(309): Ceres Seq. ID no. 13596266
  misc_feature (182)..(306): Pfam Name: Jacalin-like lectin domain Pfam Description: Jacalin-like lectin domain
  misc_feature (158)..(306): Homolog of NCBI NO: 7489661 NR Description: benzothiadiazole-induced protein (clone WCI-1) -
  misc_feature (4)..(156): Homolog of NCBI NO: 37532940 NR Description: putative disease resistance protein
  misc_feature (86)..(235): Homolog of NCBI NO: 29893221 NR Description: unknown [Triticum aestivum]
  misc_feature (1)..(303): Homolog of NCBI NO: 16151819 NR Description: VER2 [Triticum aestivum]
  misc_feature (19)..(303): Homolog of NCBI NO: 9313027 NR Description: beta-glucosidase aggregating factor precursor
  misc_feature (5)..(297): Homolog of NCBI NO: 7489384 NR Description: jacalin homolog - barley
  misc_feature (5)..(307): Homolog of NCBI NO: 7489383 NR Description: jacalin homolog - barley
  misc_feature (5)..(307): Homolog of NCBI NO: 7489385 NR Description: jakalin homolog - barley
  misc_feature (4)..(249): Homolog of NCBI NO: 7489661 NR Description: benzothiadiazole-induced protein (clone WCI-1) -
  misc_feature (4)..(303): Homolog of NCBI NO: 21311647 NR Description: hessian fly response gene 1 protein [Triticum
MAKYFQSAPVSNEALKHKEILLDGLYMHQDLDGSPNQNQKTIVNPNLPLQFGCTVANDWTIYDGLGPDKKLVARAQGPHMGAGVAKGSWFICFNMVFVDDRFAGSSLKVLGHFEEPVEGEWAILGGTGEFAYAQGVVTFKKLQDGSTRVRQLQIRAICLSFPSSLSMPTKMGPWGGNGGSIQDITTGTPMRLQSVTLSSESSWIVSLAFTYIDKLGKRRNEGPWGPDKGNSQTIEFGPKEYVTEISGTIDNVISSLVITTNIKKYGPFGHEKGNRFSAAVPENTCVVGFFARTGNALDAIGVYHGPIVV

SEQ ID NO: 68371 - protein, 283 aa, Triticum aestivum
  peptide (1)..(283): Ceres Seq. ID no. 13596267
  misc_feature (156)..(280): Pfam Name: Jacalin-like lectin domain Pfam Description: Jacalin-like lectin domain
  misc_feature (132)..(280): Homolog of NCBI NO: 7489661 NR Description: benzothiadiazole-induced protein (clone WCI-1) -
  misc_feature (1)..(130): Homolog of NCBI NO: 37532940 NR Description: putative disease resistance protein
  misc_feature (60)..(209): Homolog of NCBI NO: 29893221 NR Description: unknown [Triticum aestivum]
  misc_feature (1)..(277): Homolog of NCBI NO: 16151819 NR Description: VER2 [Triticum aestivum]
  misc_feature (1)..(277): Homolog of NCBI NO: 9313027 NR Description: beta-glucosidase aggregating factor precursor
  misc_feature (1)..(271): Homolog of NCBI NO: 7489384 NR Description: jacalin homolog - barley
  misc_feature (1)..(281): Homolog of NCBI NO: 7489383 NR Description: jacalin homolog - barley
  misc_feature (1)..(281): Homolog of NCBI NO: 7489385 NR Description: jakalin homolog - barley
  misc_feature (1)..(223): Homolog of NCBI NO: 7489661 NR Description: benzothiadiazole-induced protein (clone WCI-1) -
  misc_feature (1)..(277): Homolog of NCBI NO: 21311647 NR Description: hessian fly response gene 1 protein [Triticum
MHQDLDGSPNQNQKTIVNPNLPLQFGCTVANDWTIYDGLGPDKKLVARAQGPHMGAGVAKGSWFICFNMVFVDDRFAGSSLKVLGHFEEPVEGEWAILGGTGEFAYAQGVVTFKKLQDGSTRVRQLQIRAICLSFPSSLSMPTKMGPWGGNGGSIQDITTGTPMRLQSVTLSSESSWIVSLAFTYIDKLGKRRNEGPWGPDKGNSQTIEFGPKEYVTEISGTIDNVISSLVITTNIKKYGPFGHEKGNRFSAAVPENTCVVGFFARTGNALDAIGVYHGPIVV

SEQ ID NO: 68372 - protein, 230 aa, Triticum aestivum
  peptide (1)..(230): Ceres Seq. ID no. 13596268
  misc_feature (103)..(227): Pfam Name: Jacalin-like lectin domain Pfam Description: Jacalin-like lectin domain
  misc_feature (79)..(227): Homolog of NCBI NO: 7489661 NR Description: benzothiadiazole-induced protein (clone WCI-1) -
  misc_feature (1)..(77): Homolog of NCBI NO: 37532940 NR Description: putative disease resistance protein
  misc_feature (7)..(156): Homolog of NCBI NO: 29893221 NR Description: unknown [Triticum aestivum]
  misc_feature (1)..(224): Homolog of NCBI NO: 16151819 NR Description: VER2 [Triticum aestivum]
  misc_feature (1)..(224): Homolog of NCBI NO: 9313027 NR Description: beta-glucosidase aggregating factor precursor
  misc_feature (1)..(218): Homolog of NCBI NO: 7489384 NR Description: jacalin homolog - barley
  misc_feature (1)..(228): Homolog of NCBI NO: 7489383 NR Description: jacalin homolog - barley
  misc_feature (1)..(228): Homolog of NCBI NO: 7489385 NR Description: jakalin homolog - barley
  misc_feature (1)..(170): Homolog of NCBI NO: 7489661 NR Description: benzothiadiazole-induced protein (clone WCI-1) -
  misc_feature (1)..(224): Homolog of NCBI NO: 21311647 NR Description: hessian fly response gene 1 protein [Triticum
MGAGVAKGSWFICFNMVFVDDRFAGSSLKVLGHFEEPVEGEWAILGGTGEFAYAQGVVTFKKLQDGSTRVRQLQIRAICLSFPSSLSMPTKMGPWGGNGGSIQDITTGTPMRLQSVTLSSESSWIVSLAFTYIDKLGKRRNEGPWGPDKGNSQTIEFGPKEYVTEISGTIDNVISSLVITTNIKKYGPFGHEKGNRFSAAVPENTCVVGFFARTGNALDAIGVYHGPIVV

SEQ ID NO: 68373 - DNA, 1617 bp, Triticum aestivum
  misc_feature (1)..(1617): Ceres Seq. ID no. 13596089
aaagaaaccaaggacagagctgaaacatggagaccacggtccccgcggccacagccaccaccagctcgagctccggccacggagccggcggcggtgctgcgagagtcctgctcctcccgtacccgggggcgcagggccacaccaacccgatgctccagctcggccgccgcctggcgtaccacggcctccgccccacactcgtcgccacccgctacgtgctctccaccaccccgccccccggcgcgcccttcggcgtggccgccatctccgacggctgcgacgccggcggcatggcctcgtgcccggacatggcggagtacgtctcgcggctggcggccgtgggctccgagacgctgcgggagctcctcctgtcggaggcgcgcgcggggcggcccgtgcgcgtgctggtgtacgacgctcacctggcgtgggcgcggcgggtggcgcaggcgtccggcgtcgcggccgcggccttcttctcccagccgtgcgcggtggacgtcgtctacggggagctgtgggcggggcggctggcgctgccggcgacggacgggcgcgcgctgctcgcgagaggagcgctaggcgtggagctggggccggaggacatgccgccgttcgcggcggtgccggagtcgcagccaacgttcctcaaggtgtcagttgggcagttcgaggggctggaggacgccgacgacgtgctcgtcaactcattccgcgacctcgagccaaaggaggtagagtacatggagttaacatggagagcgaagatggttggcccaaccttgccatcattctacctcgacgatgatcgcctaccatccaataaatcatacggtttcgactttttcaacggtgatgcactgtgcatggattggctagagaagcaaagcaattcatccgttgtgctggtgtcctatgggactgtctctgattatgatgcaacccaactagaggagcttggcaatggactgtgcaattccggaaaaccttttctttgggttgtaaggtccaacgaggaacacaagttatccaaagaactcaaggaaaaatgtgaggagattggattaattgtctcatggtgcccccagcttgaggttcttgcacatagggctattggttgctttgttacccattgtggatggaactcgacattagaggcacttgctaatggtgtacctctagtgggtattccgcattgggctgaccaacccaccattgcaaagtatgtggagagtgcatggagcatgggtgtgcgtgtacggaaggacaataatggatatctaaagctagaggaggtcgagaggtgcattagagaggtgatggatatagagaaaaaggatgagtacaaaagaaatgctgtgaagtggatgcaaaaggccaaggaggcaatgcaggaaggaggaagttcagacaagaatatcgctgaatttgctaccaagtattcatcaatataaagtttgaacaatgttttacttcaatataagcaagtaggcagtgattttggccctacagaagtttagagtggccgacattttccatatgtaattgtagtgatatcttcttcacatttagaagtatgctggactttttatatatatacgacatgcgattttttct

SEQ ID NO: 68374 - protein, 475 aa, Triticum aestivum
  peptide (1)..(475): Ceres Seq. ID no. 15221771
  misc_feature (25)..(475): Pfam Name: UDP-glucoronosyl and UDP-glucosyl transferase Pfam Description: UDP-glucoronosyl and UDP-glucosyl transferase
  misc_feature (27)..(475): Homolog of NCBI NO: 28628183 NR Description: UDP-glucosyl transferase [Fragaria x ananassa]
  misc_feature (25)..(436): Homolog of NCBI NO: 15221232 NR Description: indole-3-acetate beta-glucosyltransferase
  misc_feature (22)..(468): Homolog of NCBI NO: 33114570 NR Description: glucosyltransferase 2 [Crocus sativus]
  misc_feature (25)..(472): Homolog of NCBI NO: 15221233 NR Description: glycosyltransferase family [Arabidopsis thaliana]
  misc_feature (25)..(475): Homolog of NCBI NO: 7385017 NR Description: UDP-glucose:salicylic acid glucosyltransferase
  misc_feature (1)..(364): Homolog of NCBI NO: 38344998 NR Description: OSJNBa0052O21.1 [Oryza sativa (japonica
  misc_feature (4)..(371): Homolog of NCBI NO: 38345000 NR Description: OSJNBa0052O21.3 [Oryza sativa (japonica
  misc_feature (21)..(474): Homolog of NCBI NO: 38345011 NR Description: OSJNBa0052O21.14 [Oryza sativa (japonica
  misc_feature (8)..(474): Homolog of NCBI NO: 38345013 NR Description: OSJNBa0052O21.16 [Oryza sativa (japonica
  misc_feature (14)..(474): Homolog of NCBI NO: 38345012 NR Description: OSJNBa0052O21.15 [Oryza sativa (japonica
METTVPAATATTSSSSGHGAGGGAARVLLLPYPGAQGHTNPMLQLGRRLAYHGLRPTLVATRYVLSTTPPPGAPFGVAAISDGCDAGGMASCPDMAEYVSRLAAVGSETLRELLLSEARAGRPVRVLVYDAHLAWARRVAQASGVAAAAFFSQPCAVDVVYGELWAGRLALPATDGRALLARGALGVELGPEDMPPFAAVPESQPTFLKVSVGQFEGLEDADDVLVNSFRDLEPKEVEYMELTWRAKMVGPTLPSFYLDDDRLPSNKSYGFDFFNGDALCMDWLEKQSNSSVVLVSYGTVSDYDATQLEELGNGLCNSGKPFLWVVRSNEEHKLSKELKEKCEEIGLIVSWCPQLEVLAHRAIGCFVTHCGWNSTLEALANGVPLVGIPHWADQPTIAKYVESAWSMGVRVRKDNNGYLKLEEVERCIREVMDIEKKDEYKRNAVKWMQKAKEAMQEGGSSDKNIAEFATKYSSI

SEQ ID NO: 68375 - protein, 434 aa, Triticum aestivum
  peptide (1)..(434): Ceres Seq. ID no. 15221772
  misc_feature (1)..(434): Pfam Name: UDP-glucoronosyl and UDP-glucosyl transferase Pfam Description: UDP-glucoronosyl and UDP-glucosyl transferase
  misc_feature (1)..(434): Homolog of NCBI NO: 28628183 NR Description: UDP-glucosyl transferase [Fragaria x ananassa]
  misc_feature (1)..(395): Homolog of NCBI NO: 15221232 NR Description: indole-3-acetate beta-glucosyltransferase
  misc_feature (1)..(427): Homolog of NCBI NO: 33114570 NR Description: glucosyltransferase 2 [Crocus sativus]
  misc_feature (1)..(431): Homolog of NCBI NO: 15221233 NR Description: glycosyltransferase family [Arabidopsis thaliana]
  misc_feature (1)..(434): Homolog of NCBI NO: 7385017 NR Description: UDP-glucose:salicylic acid glucosyltransferase
  misc_feature (1)..(323): Homolog of NCBI NO: 38344998 NR Description: OSJNBa0052O21.1 [Oryza sativa (japonica
  misc_feature (1)..(330): Homolog of NCBI NO: 38345000 NR Description: OSJNBa0052O21.3 [Oryza sativa (japonica
  misc_feature (1)..(433): Homolog of NCBI NO: 38345011 NR Description: OSJNBa0052O21.14 [Oryza sativa (japonica
  misc_feature (1)..(433): Homolog of NCBI NO: 38345013 NR Description: OSJNBa0052O21.16 [Oryza sativa (japonica
  misc_feature (1)..(433): Homolog of NCBI NO: 38345012 NR Description: OSJNBa0052O21.15 [Oryza sativa (japonica
MLQLGRRLAYHGLRPTLVATRYVLSTTPPPGAPFGVAAISDGCDAGGMASCPDMAEYVSRLAAVGSETLRELLLSEARAGRPVRVLVYDAHLAWARRVAQASGVAAAAFFSQPCAVDVVYGELWAGRLALPATDGRALLARGALGVELGPEDMPPFAAVPESQPTFLKVSVGQFEGLEDADDVLVNSFRDLEPKEVEYMELTWRAKMVGPTLPSFYLDDDRLPSNKSYGFDFFNGDALCMDWLEKQSNSSVVLVSYGTVSDYDATQLEELGNGLCNSGKPFLWVVRSNEEHKLSKELKEKCEEIGLIVSWCPQLEVLAHRAIGCFVTHCGWNSTLEALANGVPLVGIPHWADQPTIAKYVESAWSMGVRVRKDNNGYLKLEEVERCIREVMDIEKKDEYKRNAVKWMQKAKEAMQEGGSSDKNIAEFATKYSSI

SEQ ID NO: 68376 - protein, 387 aa, Triticum aestivum
  peptide (1)..(387): Ceres Seq. ID no. 15221773
  misc_feature (1)..(387): Pfam Name: UDP-glucoronosyl and UDP-glucosyl transferase Pfam Description: UDP-glucoronosyl and UDP-glucosyl transferase
  misc_feature (1)..(387): Homolog of NCBI NO: 28628183 NR Description: UDP-glucosyl transferase [Fragaria x ananassa]
  misc_feature (1)..(348): Homolog of NCBI NO: 15221232 NR Description: indole-3-acetate beta-glucosyltransferase
  misc_feature (1)..(380): Homolog of NCBI NO: 33114570 NR Description: glucosyltransferase 2 [Crocus sativus]
  misc_feature (1)..(384): Homolog of NCBI NO: 15221233 NR Description: glycosyltransferase family [Arabidopsis thaliana]
  misc_feature (1)..(387): Homolog of NCBI NO: 7385017 NR Description: UDP-glucose:salicylic acid glucosyltransferase
  misc_feature (1)..(276): Homolog of NCBI NO: 38344998 NR Description: OSJNBa0052O21.1 [Oryza sativa (japonica
  misc_feature (1)..(283): Homolog of NCBI NO: 38345000 NR Description: OSJNBa0052O21.3 [Oryza sativa (japonica
  misc_feature (1)..(386): Homolog of NCBI NO: 38345011 NR Description: OSJNBa0052O21.14 [Oryza sativa (japonica
  misc_feature (1)..(386): Homolog of NCBI NO: 38345013 NR Description: OSJNBa0052O21.16 [Oryza sativa (japonica
  misc_feature (1)..(386): Homolog of NCBI NO: 38345012 NR Description: OSJNBa0052O21.15 [Oryza sativa (japonica
MASCPDMAEYVSRLAAVGSETLRELLLSEARAGRPVRVLVYDAHLAWARRVAQASGVAAAAFFSQPCAVDVVYGELWAGRLALPATDGRALLARGALGVELGPEDMPPFAAVPESQPTFLKVSVGQFEGLEDADDVLVNSFRDLEPKEVEYMELTWRAKMVGPTLPSFYLDDDRLPSNKSYGFDFFNGDALCMDWLEKQSNSSVVLVSYGTVSDYDATQLEELGNGLCNSGKPFLWVVRSNEEHKLSKELKEKCEEIGLIVSWCPQLEVLAHRAIGCFVTHCGWNSTLEALANGVPLVGIPHWADQPTIAKYVESAWSMGVRVRKDNNGYLKLEEVERCIREVMDIEKKDEYKRNAVKWMQKAKEAMQEGGSSDKNIAEFATKYSSI

SEQ ID NO: 68377 - DNA, 1671 bp, Triticum aestivum
  misc_feature (1)..(1671): Ceres Seq. ID no. 13596090
agcgagtgagctcccacctccctccctcccctcctctctgctcccaccaccaaaccctccgatccaaaccctctctcacctcgcatgcggccgcgccccccgaggcggcggcgcagctgaccccttcccaccgccgctcccggagcccgccggcatgggcggggtcacgtccaccatcgccgcgcgcttcgccttcttcccgcccacgccgccctcctacacgctcgtcgccgacgcggccaccggccgcctcctcatccccgagatctcccggccccccgcgcgccgccggaggcgggacggcggcggggactcctcctcaggtgccgccgcagcagccgaggaggaggacgccacggaggtggtgcgcctccgcacgcgccgcgggaacgagatcgtcgccgtctacgtgcgccacgcgcgggcctccgccacgctgctctactcccacggcaacgccgccgacctcggccagatgtacggcctcttcgtcgagctcagccgccgcctccgcgtcaacattttcgggtatgattatgctggttatgggaggtctacagggaagcccactgagtataatacatatgcagacattgaagcagcatataactgcctcaaggaaaaatatggtgtgccagatgaggatataattttgtatggacaatctgttggaagtggtccaaccattgatcttgcttcacggttgccaaatttgcgagctgtggttcttcacagtcctattttatctggactgagagtgctatatccagtcaaaaaaactttttggtttgacatttacaagaatgtcgacaaaatcagcctggtgaattgtccagttcttgtcattcatggcacgtcagatgatgttgttgattggtcccatggaaagcagctatgggagctttgcaaggtgaaacattcgcctttgtggctaagtggcggtgggcactgcaaccttgagctgtatcctgactacatcaggcacttgaagaagtttgtgtcgagccttggcaaaaaatcaacgaaacctgacttgaaagagttaccagcaacagaagacacatctcgcaaagacgcagaatctgtgtcctcggacaaaccccaagaagctgcaaagtgccgacagatctcgcggaagagcttagatagtagagttgggaaatccaaaacggtggatgttcctgaaaagccacgaatgagctcagatgacgttgacaagtttaggaggagaagatgcttggtttggtgatctatgatatgacgtctgcacagttcatggagtagtttccgaacaccatggaatggggatcaagcaactgtgtcatactgtatagcgaggaacaacgccgacagttcccgcagtagagggataatagctgtgttaaatgtgggagaagaagaatgaggacgctggtgaataagctgttatttatcaaagagggtacgtctcaacgtggtaactttctcggttaattaacctgtattgcaacccccagtggtggtaggatttccatcatgtaaaagtgtaccgtgttattgtctgtaatcacgagggacaaggatagaacatttgcggccactttgcggcgcagtctaaagtcttggagcaatcacaagaagcaacatattctagtctggatatgcaaatatagtgttcatgaaaaaaaaaaa

SEQ ID NO: 68378 - protein, 415 aa, Triticum aestivum
  peptide (1)..(415): Ceres Seq. ID no. 13596091
  misc_feature (176)..(243): Pfam Name: alpha/beta hydrolase fold Pfam Description: alpha/beta hydrolase fold
  misc_feature (120)..(409): Homolog of NCBI NO: 15241394 NR Description: expressed protein [Arabidopsis thaliana]
  misc_feature (52)..(86): Homolog of NCBI NO: 15232168 NR Description: expressed protein [Arabidopsis thaliana]
  misc_feature (120)..(409): Homolog of NCBI NO: 15232168 NR Description: expressed protein [Arabidopsis thaliana]
  misc_feature (52)..(86): Homolog of NCBI NO: 15233975 NR Description: expressed protein [Arabidopsis thaliana]
  misc_feature (120)..(409): Homolog of NCBI NO: 15233975 NR Description: expressed protein [Arabidopsis thaliana]
  misc_feature (52)..(91): Homolog of NCBI NO: 22330474 NR Description: expressed protein [Arabidopsis thaliana]
  misc_feature (104)..(342): Homolog of NCBI NO: 22330474 NR Description: expressed protein [Arabidopsis thaliana]
  misc_feature (52)..(91): Homolog of NCBI NO: 10177798 NR Description: emb|CAB87778.1~gene_id:MXA21.9~strong similarity
  misc_feature (117)..(415): Homolog of NCBI NO: 10177798 NR Description: emb|CAB87778.1~gene_id:MXA21.9~strong similarity
  misc_feature (52)..(415): Homolog of NCBI NO: 34911338 NR Description: P0519D04.38 [Oryza sativa (japonica
ASELPPPSLPSSLLPPPNPPIQTLSHLACGRAPRGGGAADPFPPPLPEPAGMGGVTSTIAARFAFFPPTPPSYTLVADAATGRLLIPEISRPPARRRRRDGGGDSSSGAAAAAEEEDATEVVRLRTRRGNEIVAVYVRHARASATLLYSHGNAADLGQMYGLFVELSRRLRVNIFGYDYAGYGRSTGKPTEYNTYADIEAAYNCLKEKYGVPDEDIILYGQSVGSGPTIDLASRLPNLRAVVLHSPILSGLRVLYPVKKTFWFDIYKNVDKISLVNCPVLVIHGTSDDVVDWSHGKQLWELCKVKHSPLWLSGGGHCNLELYPDYIRHLKKFVSSLGKKSTKPDLKELPATEDTSRKDAESVSSDKPQEAAKCRQISRKSLDSRVGKSKTVDVPEKPRMSSDDVDKFRRRRCLVW

SEQ ID NO: 68379 - protein, 364 aa, Triticum aestivum
  peptide (1)..(364): Ceres Seq. ID no. 13596092
  misc_feature (125)..(192): Pfam Name: alpha/beta hydrolase fold Pfam Description: alpha/beta hydrolase fold
  misc_feature (69)..(358): Homolog of NCBI NO: 15241394 NR Description: expressed protein [Arabidopsis thaliana]
  misc_feature (1)..(35): Homolog of NCBI NO: 15232168 NR Description: expressed protein [Arabidopsis thaliana]
  misc_feature (69)..(358): Homolog of NCBI NO: 15232168 NR Description: expressed protein [Arabidopsis thaliana]
  misc_feature (1)..(35): Homolog of NCBI NO: 15233975 NR Description: expressed protein [Arabidopsis thaliana]
  misc_feature (69)..(358): Homolog of NCBI NO: 15233975 NR Description: expressed protein [Arabidopsis thaliana]
  misc_feature (1)..(40): Homolog of NCBI NO: 22330474 NR Description: expressed protein [Arabidopsis thaliana]
  misc_feature (53)..(291): Homolog of NCBI NO: 22330474 NR Description: expressed protein [Arabidopsis thaliana]
  misc_feature (1)..(40): Homolog of NCBI NO: 10177798 NR Description: emb|CAB87778.1~gene_id:MXA21.9~strong similarity
  misc_feature (66)..(364): Homolog of NCBI NO: 10177798 NR Description: emb|CAB87778.1~gene_id:MXA21.9~strong similarity
  misc_feature (1)..(364): Homolog of NCBI NO: 34911338 NR Description: P0519D04.38 [Oryza sativa (japonica
MGGVTSTIAARFAFFPPTPPSYTLVADAATGRLLIPEISRPPARRRRRDGGGDSSSGAAAAAEEEDATEVVRLRTRRGNEIVAVYVRHARASATLLYSHGNAADLGQMYGLFVELSRRLRVNIFGYDYAGYGRSTGKPTEYNTYADIEAAYNCLKEKYGVPDEDIILYGQSVGSGPTIDLASRLPNLRAVVLHSPILSGLRVLYPVKKTFWFDIYKNVDKISLVNCPVLVIHGTSDDVVDWSHGKQLWELCKVKHSPLWLSGGGHCNLELYPDYIRHLKKFVSSLGKKSTKPDLKELPATEDTSRKDAESVSSDKPQEAAKCRQISRKSLDSRVGKSKTVDVPEKPRMSSDDVDKFRRRRCLVW

SEQ ID NO: 68380 - protein, 257 aa, Triticum aestivum
  peptide (1)..(257): Ceres Seq. ID no. 13596093
  misc_feature (18)..(85): Pfam Name: alpha/beta hydrolase fold Pfam Description: alpha/beta hydrolase fold
  misc_feature (1)..(256): Homolog of NCBI NO: 9802758 NR Description: Hypothetical protein [Arabidopsis thaliana]
  misc_feature (1)..(184): Homolog of NCBI NO: 25404647 NR Description: hypothetical protein T4O24.3 [imported] -
  misc_feature (1)..(244): Homolog of NCBI NO: 15240861 NR Description: expressed protein [Arabidopsis thaliana]
  misc_feature (1)..(244): Homolog of NCBI NO: 15230760 NR Description: hypothetical protein [Arabidopsis thaliana]
  misc_feature (1)..(251): Homolog of NCBI NO: 15241394 NR Description: expressed protein [Arabidopsis thaliana]
  misc_feature (1)..(251): Homolog of NCBI NO: 15232168 NR Description: expressed protein [Arabidopsis thaliana]
  misc_feature (1)..(251): Homolog of NCBI NO: 15233975 NR Description: expressed protein [Arabidopsis thaliana]
  misc_feature (1)..(184): Homolog of NCBI NO: 22330474 NR Description: expressed protein [Arabidopsis thaliana]
  misc_feature (1)..(257): Homolog of NCBI NO: 10177798 NR Description: emb|CAB87778.1~gene_id:MXA21.9~strong similarity
  misc_feature (1)..(257): Homolog of NCBI NO: 34911338 NR Description: P0519D04.38 [Oryza sativa (japonica
MYGLFVELSRRLRVNIFGYDYAGYGRSTGKPTEYNTYADIEAAYNCLKEKYGVPDEDIILYGQSVGSGPTIDLASRLPNLRAVVLHSPILSGLRVLYPVKKTFWFDIYKNVDKISLVNCPVLVIHGTSDDVVDWSHGKQLWELCKVKHSPLWLSGGGHCNLELYPDYIRHLKKFVSSLGKKSTKPDLKELPATEDTSRKDAESVSSDKPQEAAKCRQISRKSLDSRVGKSKTVDVPEKPRMSSDDVDKFRRRRCLVW

SEQ ID NO: 68381 - DNA, 1861 bp, Triticum aestivum
  misc_feature (1)..(1861): Ceres Seq. ID no. 13654166
aaactcgcttcccaatcccagctccttttatctatctatctattctgaggtgaggggtggggaggaggggattggctgcctgcaagcaatggcggtcaatgaggaggaggaggggacttcgccgctgctgatcaaggcggagcgccggcaccacccgggctgcccgggctgcgaccacgaccggaggaaggagctccgcaccgggctaccttacaaggaattctcctacgtctggatgatctgtcttaccaccgctttaccaatatcgtcactgttccccttcttgtatttcatgataagagacttgcatgttgcaaaaagaacagaagatattgggttctatgctgggtttgtaggtgcttcttttatgtttggtagatgtttgacttcaactctttggggaatagcagcagatcgtattgggaggaagcctgttgttgtgtttggcattctctctgtggtgatatttaatactttgtttgggcttagcgtcacctattggatggcaatagctacaaggtttctccttggcgctttaaatggcttacttggaccaatgaaggcttatgctattgaagtttgccgacctgaacatgaacctctagcactatcacttgtcagcacggcatggggaataggtctcatcattggtcctgctcttggaggctaccttgcactgcctgcagagaaatacccaaatatattttcacctgactcattatttggaaggttcccgtacttcttaccatgcttgtgcacatcagtctttgctgccattgttctgataagctgcatatggatgccggagacgttacacaagcataaagtcagtgatgatggaaatcaaagtgttgaagctttggaggcccatctgattgatccaaaagaggaggttggacaaagtaatagttcgaataccaagaagagcttattcaagaattggccattgatgtcatctataattgtttattgcgtcttctccttccacgatatggcttatacagaggtgttctctctatgggctgaaagtgacaggaagtatggtggactgagtttatcatctgaagatgtaggtcaaacacttgcaattacaggtgccagtcttcttgtgtatcaactatttatgtacccatccatcattaaagttcttggacctatcaaatcttctcagatcgcagctgttctgtgcatacctattctctttgcctacccctatatgacgtacctgtcaggacctggattatcgatcgtactgaatattgcatcagtcataaaaaataatcttggtgttactatcatcacaggcactttcatccttcaaaacaatgccgtgcctcagaaccaaagaggagcagcaaatggattagccatgactggaatgtcctttttcaaggcagttgcccctgcaggtgccggcattgtgttctcgtgggcgcagaaacgccagcatgctttcttctttccaggtgatcagatggtgttctttctgctaaacatcatcgagctccttggacttgtcctcacattcagacccttcctggccgtgccagagcagtatgaaagaaattagtctttattattatagaattttgtggattgttaatgagacgatgacgactcatgcggccccgcagctgcgaggagctcaagggcgcccttgcaccaggataagaggtgattacctgtacttgtgtgtaacatctatgttgtagcagcatctcagagtggaaggtggtgcatatatacatgtttgtctggtatatagatggtggtggccagttaagttggttgtttgccattagttaggtagcaacatttgtaaaactactgtacaatgcaagagactgtactagctgggaag

SEQ ID NO: 68382 - protein, 522 aa, Triticum aestivum
  peptide (1)..(522): Ceres Seq. ID no. 15219623
  misc_feature (123)..(518): Homolog of NCBI NO: 21555230 NR Description: transporter-like protein [Arabidopsis thaliana]
  misc_feature (123)..(518): Homolog of NCBI NO: 30684567 NR Description: transporter-related protein [Arabidopsis thaliana]
  misc_feature (35)..(514): Homolog of NCBI NO: 15229781 NR Description: transporter - related [Arabidopsis thaliana]
  misc_feature (123)..(521): Homolog of NCBI NO: 23452819 NR Description: major facilitator superfamily antiporter [Zea
  misc_feature (63)..(490): Homolog of NCBI NO: 10177340 NR Description: transporter-like protein [Arabidopsis thaliana]
  misc_feature (63)..(513): Homolog of NCBI NO: 20260160 NR Description: transporter-like protein [Arabidopsis thaliana]
  misc_feature (40)..(517): Homolog of NCBI NO: 23452821 NR Description: major facilitator superfamily antiporter
  misc_feature (36)..(513): Homolog of NCBI NO: 22326785 NR Description: transporter - related [Arabidopsis thaliana]
  misc_feature (47)..(518): Homolog of NCBI NO: 30684565 NR Description: transporter-related protein [Arabidopsis
  misc_feature (46)..(520): Homolog of NCBI NO: 23452823 NR Description: major facilitator superfamily antiporter
NSLPNPSSFYLSIYSEVRGGEEGIGCLQAMAVNEEEEGTSPLLIKAERRHHPGCPGCDHDRRKELRTGLPYKEFSYVWMICLTTALPISSLFPFLYFMIRDLHVAKRTEDIGFYAGFVGASFMFGRCLTSTLWGIAADRIGRKPVVVFGILSVVIFNTLFGLSVTYWMAIATRFLLGALNGLLGPMKAYAIEVCRPEHEPLALSLVSTAWGIGLIIGPALGGYLALPAEKYPNIFSPDSLFGRFPYFLPCLCTSVFAAIVLISCIWMPETLHKHKVSDDGNQSVEALEAHLIDPKEEVGQSNSSNTKKSLFKNWPLMSSIIVYCVFSFHDMAYTEVFSLWAESDRKYGGLSLSSEDVGQTLAITGASLLVYQLFMYPSIIKVLGPIKSSQIAAVLCIPILFAYPYMTYLSGPGLSIVLNIASVIKNNLGVTIITGTFILQNNAVPQNQRGAANGLAMTGMSFFKAVAPAGAGIVFSWAQKRQHAFFFPGDQMVFFLLNIIELLGLVLTFRPFLAVPEQYERN

SEQ ID NO: 68383 - protein, 493 aa, Triticum aestivum
  peptide (1)..(493): Ceres Seq. ID no. 15219624
  misc_feature (94)..(489): Homolog of NCBI NO: 21555230 NR Description: transporter-like protein [Arabidopsis thaliana]
  misc_feature (94)..(489): Homolog of NCBI NO: 30684567 NR Description: transporter-related protein [Arabidopsis thaliana]
  misc_feature (6)..(485): Homolog of NCBI NO: 15229781 NR Description: transporter - related [Arabidopsis thaliana]
  misc_feature (94)..(492): Homolog of NCBI NO: 23452819 NR Description: major facilitator superfamily antiporter [Zea
  misc_feature (34)..(461): Homolog of NCBI NO: 10177340 NR Description: transporter-like protein [Arabidopsis thaliana]
  misc_feature (34)..(484): Homolog of NCBI NO: 20260160 NR Description: transporter-like protein [Arabidopsis thaliana]
  misc_feature (11)..(488): Homolog of NCBI NO: 23452821 NR Description: major facilitator superfamily antiporter
  misc_feature (7)..(484): Homolog of NCBI NO: 22326785 NR Description: transporter - related [Arabidopsis thaliana]
  misc_feature (18)..(489): Homolog of NCBI NO: 30684565 NR Description: transporter-related protein [Arabidopsis
  misc_feature (17)..(491): Homolog of NCBI NO: 23452823 NR Description: major facilitator superfamily antiporter
MAVNEEEEGTSPLLIKAERRHHPGCPGCDHDRRKELRTGLPYKEFSYVWMICLTTALPISSLFPFLYFMIRDLHVAKRTEDIGFYAGFVGASFMFGRCLTSTLWGIAADRIGRKPVVVFGILSVVIFNTLFGLSVTYWMAIATRFLLGALNGLLGPMKAYAIEVCRPEHEPLALSLVSTAWGIGLIIGPALGGYLALPAEKYPNIFSPDSLFGRFPYFLPCLCTSVFAAIVLISCIWMPETLHKHKVSDDGNQSVEALEAHLIDPKEEVGQSNSSNTKKSLFKNWPLMSSIIVYCVFSFHDMAYTEVFSLWAESDRKYGGLSLSSEDVGQTLAITGASLLVYQLFMYPSIIKVLGPIKSSQIAAVLCIPILFAYPYMTYLSGPGLSIVLNIASVIKNNLGVTIITGTFILQNNAVPQNQRGAANGLAMTGMSFFKAVAPAGAGIVFSWAQKRQHAFFFPGDQMVFFLLNIIELLGLVLTFRPFLAVPEQYERN

SEQ ID NO: 68384 - protein, 444 aa, Triticum aestivum
  peptide (1)..(444): Ceres Seq. ID no. 15219625
  misc_feature (45)..(440): Homolog of NCBI NO: 21555230 NR Description: transporter-like protein [Arabidopsis thaliana]
  misc_feature (45)..(440): Homolog of NCBI NO: 30684567 NR Description: transporter-related protein [Arabidopsis thaliana]
  misc_feature (1)..(436): Homolog of NCBI NO: 15229781 NR Description: transporter - related [Arabidopsis thaliana]
  misc_feature (45)..(443): Homolog of NCBI NO: 23452819 NR Description: major facilitator superfamily antiporter [Zea
  misc_feature (1)..(412): Homolog of NCBI NO: 10177340 NR Description: transporter-like protein [Arabidopsis thaliana]
  misc_feature (1)..(435): Homolog of NCBI NO: 20260160 NR Description: transporter-like protein [Arabidopsis thaliana]
  misc_feature (1)..(439): Homolog of NCBI NO: 23452821 NR Description: major facilitator superfamily antiporter
  misc_feature (1)..(435): Homolog of NCBI NO: 22326785 NR Description: transporter - related [Arabidopsis thaliana]
  misc_feature (1)..(440): Homolog of NCBI NO: 30684565 NR Description: transporter-related protein [Arabidopsis
  misc_feature (1)..(442): Homolog of NCBI NO: 23452823 NR Description: major facilitator superfamily antiporter
MICLTTALPISSLFPFLYFMIRDLHVAKRTEDIGFYAGFVGASFMFGRCLTSTLWGIAADRIGRKPVVVFGILSVVIFNTLFGLSVTYWMAIATRFLLGALNGLLGPMKAYAIEVCRPEHEPLALSLVSTAWGIGLIIGPALGGYLALPAEKYPNIFSPDSLFGRFPYFLPCLCTSVFAAIVLISCIWMPETLHKHKVSDDGNQSVEALEAHLIDPKEEVGQSNSSNTKKSLFKNWPLMSSIIVYCVFSFHDMAYTEVFSLWAESDRKYGGLSLSSEDVGQTLAITGASLLVYQLFMYPSIIKVLGPIKSSQIAAVLCIPILFAYPYMTYLSGPGLSIVLNIASVIKNNLGVTIITGTFILQNNAVPQNQRGAANGLAMTGMSFFKAVAPAGAGIVFSWAQKRQHAFFFPGDQMVFFLLNIIELLGLVLTFRPFLAVPEQYERN

SEQ ID NO: 68385 - DNA, 858 bp, Triticum aestivum
  misc_feature (1)..(858): Ceres Seq. ID no. 13590249
attaaaaggtggccgccgccgccgcccacccccaccacacacagagagaacacacgcaaggagcacgaggaggaggcaagggaagccgccgccgccgccccgtccctcctcgccggcccgccgcgacaggtttcaagatgtcaacctgcacgtttgcgacctcctgcgtgctcttgggcaatgctcgaacaaccgatgccccccagaaagcggtcaagagccgcctgagcttccttggccgaggcgccgtgcaggtgccgagcctgaggtcctcctctttcaagaagctggacgtctccgcggcggccacgtacaaggtgaagctggtgaccccggagggggacgagcacgagtttgaggcgccggacgacacctacatcctggactcggcggagacggcgggggtggagctgccctactcgtgccgggcgggggcatgctcgacctgcgcgggcaagattgaggcgggcgcggtggaccagtcggacgggtcgttcctggacgacgcgcagcaggagggctacgtgctgacgtgcgtcgcctaccccaagtcggactgcgtcatccacacccacaaggagggggacctgtattagggggcgtgccgtgctccgcccacatctctggtgccagttggttgtgtgttgggtagaagaagaaggtgtgtctgtctgtaaaaccttgatggttgtttatccccttcctggctgctgcctgtgtgcgtgcgtgctttggtcgttggtcggaggtggttaagattgttgggtgaagccactacacccacggatggagaaggcgaataaaatgagggaacagctcgctgtgactgtgacggcattataaagcggtttcatggtc

SEQ ID NO: 68386 - protein, 152 aa, Triticum aestivum
  peptide (1)..(152): Ceres Seq. ID no. 13590250
  misc_feature (64)..(139): Pfam Name: 2Fe-2S iron-sulfur cluster binding domain Pfam Description: 2Fe-2S iron-sulfur cluster binding domain
  misc_feature (56)..(152): Homolog of NCBI NO: 15225888 NR Description: ferredoxin, putative [Arabidopsis thaliana]
  misc_feature (56)..(152): Homolog of NCBI NO: 119934 NR Description: Ferredoxin, root R-B1
  misc_feature (1)..(151): Homolog of NCBI NO: 2129915 NR Description: ferredoxin
  misc_feature (1)..(152): Homolog of NCBI NO: 19569591 NR Description: ferredoxin precursor [Triticum aestivum]
  misc_feature (1)..(152): Homolog of NCBI NO: 7430754 NR Description: ferredoxin [2Fe-2S], root - rice
  misc_feature (59)..(152): Homolog of NCBI NO: 6688560 NR Description: putative ferredoxin [Lycopersicon esculentum]
  misc_feature (1)..(152): Homolog of NCBI NO: 13182955 NR Description: ferredoxin [Impatiens balsamina]
  misc_feature (17)..(152): Homolog of NCBI NO: 3023750 NR Description: Ferredoxin VI, chloroplast precursor (Fd VI)
  misc_feature (1)..(152): Homolog of NCBI NO: 119958 NR Description: Ferredoxin III, chloroplast precursor (Fd III)
  misc_feature (1)..(152): Homolog of NCBI NO: 40714664 NR Description: putative ferredoxin [Oryza sativa (japonica
MSTCTFATSCVLLGNARTTDAPQKAVKSRLSFLGRGAVQVPSLRSSSFKKLDVSAAATYKVKLVTPEGDEHEFEAPDDTYILDSAETAGVELPYSCRAGACSTCAGKIEAGAVDQSDGSFLDDAQQEGYVLTCVAYPKSDCVIHTHKEGDLY

SEQ ID NO: 68387 - protein, 118 aa, Triticum aestivum
  peptide (1)..(118): Ceres Seq. ID no. 13590251
LKGGRRRRPPPPHTERTHARSTRRRQGKPPPPPRPSSPARRDRFQDVNLHVCDLLRALGQCSNNRCPPESGQEPPELPWPRRRAGAEPEVLLFQEAGRLRGGHVQGEAGDPGGGRARV

SEQ ID NO: 68388 - DNA, 1306 bp, Triticum aestivum
  misc_feature (1)..(1306): Ceres Seq. ID no. 12613953
ataaaatcctccccgttccatctcggccctcttctctcccaaccctcccccccttcaccgccgccgccacccccccgccgcgagctccgccgccccaatctccccgcggcagccatggcgaacatgcaggagtcgctcgccctggtgggcacgatgcgcggccacaacgacgtggtgacggcgatcgccgcgccgatcgacaactcgccctacatcgtgtccggctcccgcgacaagtcgctgctggtctgggacctcaccaacccggtgccgtccctcggcgacggcaccgtcggcaccgactacgccgtgcccttccgccgcctcaccggccacggccacttcgtccaggacgtggtcatcagctccgacggccagttcgcgctctccggctcctgggacggcgagctccgcctctgggacctctccaccggcctcaccacccgccgcttcgtcggccacaccaaggacgtcatctcggtcgccttctccgtcgacaaccgccagatcgtctccgcctcccgcgacaacaccatcaagctctggaacaccctcggcgagtgcaagtacaccatcggcggcgacatgggcggcggcgagggccacaccggctgggtctcgtgcgtcaggttctcccccaacatccagcagcccaccatcgtctccggctcctgggacaagaccgtcaaggtctggaatctcaccaactgcaagctccgctccaccctcgccggccacggtggctacgtgaacgccgtcgccgtcagccccgatggctcgctctgcgcctccggcggcaaggacggcgtcacgctgctctgggacctgtccgaggggaagaggctgtaccagctggaagccggctccatcatccatgcgctctgcttctcgcccaaccgctactggctctgcgctgcgacagaggaatctgtcaagatctgggacctcgagtccaagcatgtcgtgcaggacctcaagccagaagtgcaggtctccaagaaccagatgctgtactgcacaagcttgagctggagcgcggacggaagcaccctctacaccggatacaccgacgggaccatcagggtcttcaagatccaagccgggttcgccggatacgcgtaggggtcttgctggccagagaggttgtaatgcccgtcaagtttttgactgttctgaggcaacattgtctgcctggtactttcagcttgagttactgtttactttctgcttaggtgatttgttgatgagcacattatgaggtactatggaagacgatccgtttcgcaccagggtttttgctgctttc

SEQ ID NO: 68389 - protein, 409 aa, Triticum aestivum
  peptide (1)..(409): Ceres Seq. ID no. 12613954
KILPVPSRPSSLPTLPPFTAAATPPPRAPPPQSPRGSHGEHAGVARPGGHDARPQRRGDGDRRADRQLALHRVRLPRQVAAGLGPHQPGAVPRRRHRRHRLRRALPPPHRPRPLRPGRGHQLRRPVRALRLLGRRAPPLGPLHRPHHPPLRRPHQGRHLGRLLRRQPPDRLRLPRQHHQALEHPRRVQVHHRRRHGRRRGPHRLGLVRQVLPQHPAAHHRLRLLGQDRQGLESHQLQAPLHPRRPRWLRERRRRQPRWLALRLRRQGRRHAALGPVRGEEAVPAGSRLHHPCALLLAQPLLALRCDRGICQDLGPRVQACRAGPQARSAGLQEPDAVLHKLELERGRKHPLHRIHRRDHQGLQDPSRVRRIRVGVLLAREVVMPVKFLTVLRQHCLPGTFSLSYCLLSA

SEQ ID NO: 68390 - protein, 373 aa, Triticum aestivum
  peptide (1)..(373): Ceres Seq. ID no. 12613955
  misc_feature (42)..(365): Homolog of NCBI NO: 15220941 NR Description: G-protein beta family
  misc_feature (43)..(365): Homolog of NCBI NO: 4589834 NR Description: LeArcA1 protein [Lycopersicon esculentum]
  misc_feature (42)..(365): Homolog of NCBI NO: 3023847 NR Description: GUANINE NUCLEOTIDE-BINDING PROTEIN BETA
  misc_feature (43)..(365): Homolog of NCBI NO: 7446126 NR Description: GTP-binding protein beta chain homolog -
  misc_feature (43)..(365): Homolog of NCBI NO: 4589836 NR Description: LeArcA2 protein [Lycopersicon esculentum]
  misc_feature (39)..(373): Homolog of NCBI NO: 34911282 NR Description: guanine nucleotide-binding protein beta
IKSSPFHLGPLLSQPSPPSPPPPPPRRELRRPNLPAAAMANMQESLALVGTMRGHNDVVTAIAAPIDNSPYIVSGSRDKSLLVWDLTNPVPSLGDGTVGTDYAVPFRRLTGHGHFVQDVVISSDGQFALSGSWDGELRLWDLSTGLTTRRFVGHTKDVISVAFSVDNRQIVSASRDNTIKLWNTLGECKYTIGGDMGGGEGHTGWVSCVRFSPNIQQPTIVSGSWDKTVKVWNLTNCKLRSTLAGHGGYVNAVAVSPDGSLCASGGKDGVTLLWDLSEGKRLYQLEAGSIIHALCFSPNRYWLCAATEESVKIWDLESKHVVQDLKPEVQVSKNQMLYCTSLSWSADGSTLYTGYTDGTIRVFKIQAGFAGYA

SEQ ID NO: 68391 - protein, 335 aa, Triticum aestivum
  peptide (1)..(335): Ceres Seq. ID no. 12613956
  misc_feature (4)..(327): Homolog of NCBI NO: 15220941 NR Description: G-protein beta family
  misc_feature (5)..(327): Homolog of NCBI NO: 4589834 NR Description: LeArcA1 protein [Lycopersicon esculentum]
  misc_feature (4)..(327): Homolog of NCBI NO: 3023847 NR Description: GUANINE NUCLEOTIDE-BINDING PROTEIN BETA
  misc_feature (5)..(327): Homolog of NCBI NO: 7446126 NR Description: GTP-binding protein beta chain homolog -
  misc_feature (5)..(327): Homolog of NCBI NO: 4589836 NR Description: LeArcA2 protein [Lycopersicon esculentum]
  misc_feature (1)..(335): Homolog of NCBI NO: 34911282 NR Description: guanine nucleotide-binding protein beta
MANMQESLALVGTMRGHNDVVTAIAAPIDNSPYIVSGSRDKSLLVWDLTNPVPSLGDGTVGTDYAVPFRRLTGHGHFVQDVVISSDGQFALSGSWDGELRLWDLSTGLTTRRFVGHTKDVISVAFSVDNRQIVSASRDNTIKLWNTLGECKYTIGGDMGGGEGHTGWVSCVRFSPNIQQPTIVSGSWDKTVKVWNLTNCKLRSTLAGHGGYVNAVAVSPDGSLCASGGKDGVTLLWDLSEGKRLYQLEAGSIIHALCFSPNRYWLCAATEESVKIWDLESKHVVQDLKPEVQVSKNQMLYCTSLSWSADGSTLYTGYTDGTIRVFKIQAGFAGYA

SEQ ID NO: 68392 - DNA, 1869 bp, Triticum aestivum
  misc_feature (1)..(1869): Ceres Seq. ID no. 12614124
caacacacatcatccaatcaacgcacatcacttcctcttataacacagttaaccatggataaggcatacattgccatcctctccttcgccttcctcttcctgatccactacattctaggcaaggtcaccaatggcaggcacagcaagggcgccgtccagctgccgccgagcccccgggccatcccgttcctcggccacctccacctcctggagaagccgttccacgccgctctgtgcggcctcgccaagcgcctcggccccgtcttctcgctgcgcctcggctcgcgccgcgcggtggtggtgtcctcgccggagtgcgccagggagtgcttcacggagcacgacgtgatcttcgccgaccggccccagttcccctcgcagctgctcgtgtccttcgacggcatcgcgctctccacgtccagctacggcccgcactggcgcaacctccgtcgcgtcgccgccgtgcagctgctctctgcgcaccgcgtcgcctgcatgtcgggcgtgatcgggggcgaggtgcgcgccatggcgcgccggcttttccgggccgccgcggcgtcccccgacggcgccgcgcgggtcgagctgaagcggaggctcttcgagctctccctcagcgtgctcatggagaccatcgcccagaccaaggggacccggccggaggccgacgccgacacggacatgtccctggaggcccaggagttcaagaaggtggtggacgagatcatcccgcacatcggcgccgccaacctgtgggactacctgccggtgctgcggtggttcgacgtgttcggagtgaggaacaagatccttgccgcggtgagcaggagggacgccttcatgctgcatctcatcgacaacgagcgccggaggcttgacgatggcggcgccgaaggcgacaagaagagcatgatcgccgtgctgctcactctgcagaagacggagccagaggtgtacaccgataccatgatcatggctctctgcgcgaatttattcggggctggaacggagaccacgtcgacgacgacggagtgggcgatgtcgctgctgctgaaccacccggcggccctcaaagaggcgcaggccgagatcgacgcggccgtggggacctcccggctggtgaccgccgacgacgtgccccggctggcctacctgcagtgcatcgtgagcgagacgctgcggctgtacccggcggcaccgatgctgctgccgcaccagtcctcggctgactgcaaggtcggcggctacaacgtgccgagcggcacgatgctgatggtgaacgcgtacgccatccaccgggacccggcggcgtgggagcggccgctggagttcgtcccggagcggttcgaggacgggaaggccgaggggcggttcatgatcccgttcgggatgggccggcggcggtgccccggagagacgctggcgctgcggactatcggcatggtgctggccacgctggtgcagtgcttcgactgggagcgcgtggacggcgcggaggtggacatgacggagggcggcgggctcaccatccccaaggccgtgccgctcgaggccgtgtgcaggccgcgcccggccatgcgcgacgtgcttgagagcctctgatctgacaatccaacttcgttcttggcatcataaaatgcatggactggtggcgtgctgatgtagtagtaaataaagtcgtgacccttgtgtgagcagagtcaagctagctatcatcctatgcagtaaattacaggtaagtgtcggggttttgtgagaactagctaaactatctaggtagcgctcgtggatcgtgatagtaccaagccagcaatttgtaatttagtttgtatcaagaatgttgtgtatgggataacaaattatttc

SEQ ID NO: 68393 - protein, 534 aa, Triticum aestivum
  peptide (1)..(534): Ceres Seq. ID no. 12614125
  misc_feature (19)..(534): Homolog of NCBI NO: 7430635 NR Description: cytochrome P450 (EC 1.14.-.-) 81B1c - Jerusalem
  misc_feature (13)..(534): Homolog of NCBI NO: 3059131 NR Description: cytochrome P450 [Helianthus tuberosus]
  misc_feature (55)..(534): Homolog of NCBI NO: 38344454 NR Description: OSJNBa0017P10.2 [Oryza sativa (japonica
  misc_feature (19)..(534): Homolog of NCBI NO: 14488355 NR Description: putative cytochrome P450 [Oryza sativa (japonica
  misc_feature (19)..(531): Homolog of NCBI NO: 14488358 NR Description: putative cytochrome P450 [Oryza sativa (japonica
  misc_feature (19)..(534): Homolog of NCBI NO: 14488373 NR Description: putative cytochrome P450 [Oryza sativa (japonica
  misc_feature (5)..(534): Homolog of NCBI NO: 14488353 NR Description: putative cytochrome P450 [Oryza sativa (japonica
  misc_feature (19)..(534): Homolog of NCBI NO: 13661748 NR Description: putative cytochrome P450 [Lolium rigidum]
  misc_feature (19)..(534): Homolog of NCBI NO: 13661744 NR Description: putative cytochrome P450 [Lolium rigidum]
  misc_feature (19)..(534): Homolog of NCBI NO: 13661746 NR Description: putative cytochrome P450 [Lolium rigidum]
QHTSSNQRTSLPLITQLTMDKAYIAILSFAFLFLIHYILGKVTNGRHSKGAVQLPPSPRAIPFLGHLHLLEKPFHAALCGLAKRLGPVFSLRLGSRRAVVVSSPECARECFTEHDVIFADRPQFPSQLLVSFDGIALSTSSYGPHWRNLRRVAAVQLLSAHRVACMSGVIGGEVRAMARRLFRAAAASPDGAARVELKRRLFELSLSVLMETIAQTKGTRPEADADTDMSLEAQEFKKVVDEIIPHIGAANLWDYLPVLRWFDVFGVRNKILAAVSRRDAFMLHLIDNERRRLDDGGAEGDKKSMIAVLLTLQKTEPEVYTDTMIMALCANLFGAGTETTSTTTEWAMSLLLNHPAALKEAQAEIDAAVGTSRLVTADDVPRLAYLQCIVSETLRLYPAAPMLLPHQSSADCKVGGYNVPSGTMLMVNAYAIHRDPAAWERPLEFVPERFEDGKAEGRFMIPFGMGRRRCPGETLALRTIGMVLATLVQCFDWERVDGAEVDMTEGGGLTIPKAVPLEAVCRPRPAMRDVLESL

SEQ ID NO: 68394 - protein, 516 aa, Triticum aestivum
  peptide (1)..(516): Ceres Seq. ID no. 12614126
  misc_feature (1)..(516): Homolog of NCBI NO: 7430635 NR Description: cytochrome P450 (EC 1.14.-.-) 81B1c - Jerusalem
  misc_feature (1)..(516): Homolog of NCBI NO: 3059131 NR Description: cytochrome P450 [Helianthus tuberosus]
  misc_feature (37)..(516): Homolog of NCBI NO: 38344454 NR Description: OSJNBa0017P10.2 [Oryza sativa (japonica
  misc_feature (1)..(516): Homolog of NCBI NO: 14488355 NR Description: putative cytochrome P450 [Oryza sativa (japonica
  misc_feature (1)..(513): Homolog of NCBI NO: 14488358 NR Description: putative cytochrome P450 [Oryza sativa (japonica
  misc_feature (1)..(516): Homolog of NCBI NO: 14488373 NR Description: putative cytochrome P450 [Oryza sativa (japonica
  misc_feature (1)..(516): Homolog of NCBI NO: 14488353 NR Description: putative cytochrome P450 [Oryza sativa (japonica
  misc_feature (1)..(516): Homolog of NCBI NO: 13661748 NR Description: putative cytochrome P450 [Lolium rigidum]
  misc_feature (1)..(516): Homolog of NCBI NO: 13661744 NR Description: putative cytochrome P450 [Lolium rigidum]
  misc_feature (1)..(516): Homolog of NCBI NO: 13661746 NR Description: putative cytochrome P450 [Lolium rigidum]
MDKAYIAILSFAFLFLIHYILGKVTNGRHSKGAVQLPPSPRAIPFLGHLHLLEKPFHAALCGLAKRLGPVFSLRLGSRRAVVVSSPECARECFTEHDVIFADRPQFPSQLLVSFDGIALSTSSYGPHWRNLRRVAAVQLLSAHRVACMSGVIGGEVRAMARRLFRAAAASPDGAARVELKRRLFELSLSVLMETIAQTKGTRPEADADTDMSLEAQEFKKVVDEIIPHIGAANLWDYLPVLRWFDVFGVRNKILAAVSRRDAFMLHLIDNERRRLDDGGAEGDKKSMIAVLLTLQKTEPEVYTDTMIMALCANLFGAGTETTSTTTEWAMSLLLNHPAALKEAQAEIDAAVGTSRLVTADDVPRLAYLQCIVSETLRLYPAAPMLLPHQSSADCKVGGYNVPSGTMLMVNAYAIHRDPAAWERPLEFVPERFEDGKAEGRFMIPFGMGRRRCPGETLALRTIGMVLATLVQCFDWERVDGAEVDMTEGGGLTIPKAVPLEAVCRPRPAMRDVLESL

SEQ ID NO: 68395 - protein, 369 aa, Triticum aestivum
  peptide (1)..(369): Ceres Seq. ID no. 12614127
  misc_feature (1)..(369): Homolog of NCBI NO: 7430635 NR Description: cytochrome P450 (EC 1.14.-.-) 81B1c - Jerusalem
  misc_feature (1)..(369): Homolog of NCBI NO: 3059131 NR Description: cytochrome P450 [Helianthus tuberosus]
  misc_feature (1)..(369): Homolog of NCBI NO: 38344454 NR Description: OSJNBa0017P10.2 [Oryza sativa (japonica
  misc_feature (1)..(369): Homolog of NCBI NO: 14488355 NR Description: putative cytochrome P450 [Oryza sativa (japonica
  misc_feature (1)..(366): Homolog of NCBI NO: 14488358 NR Description: putative cytochrome P450 [Oryza sativa (japonica
  misc_feature (1)..(369): Homolog of NCBI NO: 14488373 NR Description: putative cytochrome P450 [Oryza sativa (japonica
  misc_feature (1)..(369): Homolog of NCBI NO: 14488353 NR Description: putative cytochrome P450 [Oryza sativa (japonica
  misc_feature (1)..(369): Homolog of NCBI NO: 13661748 NR Description: putative cytochrome P450 [Lolium rigidum]
  misc_feature (1)..(369): Homolog of NCBI NO: 13661744 NR Description: putative cytochrome P450 [Lolium rigidum]
  misc_feature (1)..(369): Homolog of NCBI NO: 13661746 NR Description: putative cytochrome P450 [Lolium rigidum]
MSGVIGGEVRAMARRLFRAAAASPDGAARVELKRRLFELSLSVLMETIAQTKGTRPEADADTDMSLEAQEFKKVVDEIIPHIGAANLWDYLPVLRWFDVFGVRNKILAAVSRRDAFMLHLIDNERRRLDDGGAEGDKKSMIAVLLTLQKTEPEVYTDTMIMALCANLFGAGTETTSTTTEWAMSLLLNHPAALKEAQAEIDAAVGTSRLVTADDVPRLAYLQCIVSETLRLYPAAPMLLPHQSSADCKVGGYNVPSGTMLMVNAYAIHRDPAAWERPLEFVPERFEDGKAEGRFMIPFGMGRRRCPGETLALRTIGMVLATLVQCFDWERVDGAEVDMTEGGGLTIPKAVPLEAVCRPRPAMRDVLESL

SEQ ID NO: 68396 - DNA, 1223 bp, Triticum aestivum
  misc_feature (1)..(1223): Ceres Seq. ID no. 13596359
aactccactccgccgcgataagccctagcctccacctccgtctccatggcgaccaccaccaccctttcccacccgctctccgtgcccatcgccgggggccgcgtccggcgctgccccctcaccctgctcgccccggcccgcgcggccccccggcggccgacgcccctcctcgtcgcccgcgccaagcgcaccaacaactccagcgctgccccgaagcgagaggcggacgaggaggttgaggtggaggaggagctgccgtggatccaggacaaggcgctggacctcgtggagttcaccggcaccgtcacgcaggccatccccggcccccgcgtcggctccagccccgtgccgtggctcctcgctgtgccgctcgcctacgtcggcgtctccttcgccctcgccgccgtccgcaccttccgcaggttcacctccccgcgcactcagaagaagaagagggtgaccaagaatatattcttgttgaagtcactagacgagttgtttcagaagggcagggaagcagtggattttccagctcttcaagaactaatgcaaaagacaggatttgacatggatgatgtagtaagaaagtacatccgatacacactgaatgaaaaacaattcaatcctgatgtggttgtggatctcatacatcttaggaaagcatcgatgttagaagataatgaagttgctgaaattctgaatgagatatctagacgaattgttcgggaaaaaggtccaatagttatggacttatctgggtttacagagcaaggttttaagcggaagcttgctgtgcaaacattgttcggaaaaatcatgtacttatcagagctcccagagttctgttcccgggacggctcgcttgttgtcaaagaaatctttggagttacagacgaggatgcagacagccttcgcagtcgtaccctttctgaagctggtgatatcgagtcgttagaaaggatggtcgaagattctgatgaacatggtaccccatcatcatcttgaagtatgttagtggttggatacttatcatctttgagttttgtcaatggttgaagaagagagggttgtcctggatagttgactgcaagttttgtaaatctaccttctactaggattgtagcttctggcagtatctcggacctgtctaccacctgactaaaacaaggaagttgttgagagaatggtagcagtgagtttatataaagcgacaattgttaact

SEQ ID NO: 68397 - protein, 319 aa, Triticum aestivum
  peptide (1)..(319): Ceres Seq. ID no. 13596360
  misc_feature (33)..(283): Homolog of NCBI NO: 9759348 NR Description: gene_id:MAH20.10~pir||T27191~similar to unknown
  misc_feature (10)..(308): Homolog of NCBI NO: 18415850 NR Description: expressed protein [Arabidopsis thaliana]
  misc_feature (10)..(318): Homolog of NCBI NO: 21592521 NR Description: unknown [Arabidopsis thaliana]
  misc_feature (7)..(317): Homolog of NCBI NO: 38344450 NR Description: OSJNBa0038O10.22 [Oryza sativa (japonica
MATTTTLSHPLSVPIAGGRVRRCPLTLLAPARAAPRRPTPLLVARAKRTNNSSAAPKREADEEVEVEEELPWIQDKALDLVEFTGTVTQAIPGPRVGSSPVPWLLAVPLAYVGVSFALAAVRTFRRFTSPRTQKKKRVTKNIFLLKSLDELFQKGREAVDFPALQELMQKTGFDMDDVVRKYIRYTLNEKQFNPDVVVDLIHLRKASMLEDNEVAEILNEISRRIVREKGPIVMDLSGFTEQGFKRKLAVQTLFGKIMYLSELPEFCSRDGSLVVKEIFGVTDEDADSLRSRTLSEAGDIESLERMVEDSDEHGTPSSS

SEQ ID NO: 68398 - DNA, 530 bp, Triticum aestivum
  misc_feature (1)..(530): Ceres Seq. ID no. 13654264
aagggaagttggcagaagctagagaagaattgaaactagcaaaactcttagagaagcgtcttgaagcccctcaacaagacagtgaggatggtgcacatgagttagccacagcagctgttcagcagagcaattcgatccagcagtctgccagcgtcaccactcacaccaatccgttgacctatgcccctccagcacaggaaaacaagtcggttgagcctcaaaaagcaatgtccagccgagaccgtctcagaatccaacgtgaatccctcactcacaagcgcaacgccctgaagttgaggagagaaggaaagactgcggaagcagatgcggaattcgaattggccaagtcactagagagccaactggaagagtcagatagccagggttcgaactctggaggaaagtctgaagcaagtgacgcgtttgtggaagatcttattgatcctcaaatgatgtctgccctgaaatccatcggcnggagcgcagctgacctgttcacgcaatctccgagccctcaacctttggtgaaa

SEQ ID NO: 68399 - protein, 176 aa, Triticum aestivum
  peptide (1)..(176): Ceres Seq. ID no. 13654265
  misc_feature (88)..(121): Pfam Name: TPR Domain Pfam Description: TPR Domain
  misc_feature (63)..(140): Homolog of NCBI NO: 31126731 NR Description: unknown protein [Oryza sativa (japonica
  misc_feature (1)..(35): Homolog of NCBI NO: 31126731 NR Description: unknown protein [Oryza sativa (japonica
  misc_feature (37)..(156): Homolog of NCBI NO: 31126731 NR Description: unknown protein [Oryza sativa (japonica
  misc_feature (1)..(158): Homolog of NCBI NO: 38564274 NR Description: At1g61690 [Arabidopsis thaliana]
  misc_feature (1)..(158): Homolog of NCBI NO: 25404340 NR Description: hypothetical protein T13M11.5 [imported] -
  misc_feature (1)..(158): Homolog of NCBI NO: 15220569 NR Description: expressed protein [Arabidopsis thaliana]
  misc_feature (1)..(175): Homolog of NCBI NO: 31126731 NR Description: unknown protein [Oryza sativa (japonica
  misc_feature (159)..(159): Xaa is any aa, unknown or other
GKLAEAREELKLAKLLEKRLEAPQQDSEDGAHELATAAVQQSNSIQQSASVTTHTNPLTYAPPAQENKSVEPQKAMSSRDRLRIQRESLTHKRNALKLRREGKTAEADAEFELAKSLESQLEESDSQGSNSGGKSEASDAFVEDLIDPQMMSALKSIGXSAADLFTQSPSPQPLVK

SEQ ID NO: 68400 - protein, 101 aa, Triticum aestivum
  peptide (1)..(101): Ceres Seq. ID no. 13654266
  misc_feature (13)..(46): Pfam Name: TPR Domain Pfam Description: TPR Domain
  misc_feature (1)..(65): Homolog of NCBI NO: 31126731 NR Description: unknown protein [Oryza sativa (japonica
  misc_feature (1)..(81): Homolog of NCBI NO: 31126731 NR Description: unknown protein [Oryza sativa (japonica
  misc_feature (1)..(83): Homolog of NCBI NO: 38564274 NR Description: At1g61690 [Arabidopsis thaliana]
  misc_feature (1)..(83): Homolog of NCBI NO: 25404340 NR Description: hypothetical protein T13M11.5 [imported] -
  misc_feature (1)..(83): Homolog of NCBI NO: 15220569 NR Description: expressed protein [Arabidopsis thaliana]
  misc_feature (1)..(100): Homolog of NCBI NO: 31126731 NR Description: unknown protein [Oryza sativa (japonica
  misc_feature (84)..(84): Xaa is any aa, unknown or other
MSSRDRLRIQRESLTHKRNALKLRREGKTAEADAEFELAKSLESQLEESDSQGSNSGGKSEASDAFVEDLIDPQMMSALKSIGXSAADLFTQSPSPQPLVK

SEQ ID NO: 68401 - DNA, 1257 bp, Triticum aestivum
  misc_feature (1)..(1257): Ceres Seq. ID no. 13595992
acctaacccattcaagtcgatcaatcatcagcaaaaaaaacactatagtaacaactgacagcgtgagggcgctcgcaatggcgagccgtttgggagtcgtgctggctttagcggctgtcgtccttcttgccgccgcgggggccgccgccgggcaatccacgccacggccacccaacgcccagggcccgaagccgaagccgaagccgatgaaggtcaagtgcaccgagaaccgcaaggagaacccctactgtttcaaccggaacatggactgccccgccaactgcccccagtcctgctaccccgactgcaacacatgcaaacccgtctgcgtctgcaacaccccgggggcgtgcggcgacccgcggttcataggtggtgacggcaacgccttctacttccacggacgcagggacgccgacttctgcgtcgtctccgaccgcgaccttcacatcaacgcgcacttcatcggcaagagcggccacagtggcatgtcccgggacttcacctggatccaggccatcgctgtgctcttcgacggccaccgcctctacctcggcgccaggaagaccggcacctgggacgacgccgtcgagcacctggacatcaccctggacggcgagcctgtctaccttcccgctgacctcatcgaaggcgccaagtggacgtccagccgcgtgcccgagctgtcggtgacccgcaccaaggcggccaacggcgtcctcgtcaccgtcgccggaaagttcagcgtcagggccaacgccgtgcccatcaccgaggaggaatcgagggtgcaccgctacggtgtcaccgccgatgactgcctcgcgcacctcgagctggcgttcaagttcgacgcgctcaccgacgacgtccacggtgtggtcggacagacgtaccgctccgactacgtcaaccatttcgacgtgagggcctccatgcccaccatgggaggagatgccaccttcaccacctccagcctgttcgccgccgactgcagcgtggcgcgctatggagtcagccgtggaaacgacggtgccgcggtgctatctgagctcgctggtgtcacctgcgccagcggcatggacggcaaaggtgtcgtgtgcaagaagtaaaacgcttctgccatgcatatggcgagtgcccgtgtatgtctgcatgcatgcatggttgacaagtacacacagaaataagcaaaggacatacattaatgtgtttggaacttgtaactttatcaagaaatagtatgcgtccgtttgc

SEQ ID NO: 68402 - protein, 369 aa, Triticum aestivum
  peptide (1)..(369): Ceres Seq. ID no. 15221721
  misc_feature (24)..(346): Homolog of NCBI NO: 4514635 NR Description: root cap protein 1 [Zea mays]
  misc_feature (26)..(336): Homolog of NCBI NO: 34905940 NR Description: similar to root cap protein
  misc_feature (32)..(337): Homolog of NCBI NO: 34905934 NR Description: similar to root cap protein
  misc_feature (70)..(369): Homolog of NCBI NO: 7484468 NR Description: late embryonic abundant protein EMB7 - white
  misc_feature (28)..(369): Homolog of NCBI NO: 21741738 NR Description: OSJNBa0073L04.18 [Oryza sativa (japonica
  misc_feature (30)..(341): Homolog of NCBI NO: 34905936 NR Description: similar to root cap protein
  misc_feature (28)..(341): Homolog of NCBI NO: 34905930 NR Description: similar to root cap protein
  misc_feature (56)..(369): Homolog of NCBI NO: 30685319 NR Description: late embryogenesis abundant protein -related
  misc_feature (56)..(369): Homolog of NCBI NO: 11994465 NR Description: contains similarity to late embryogenesis
  misc_feature (28)..(369): Homolog of NCBI NO: 4514637 NR Description: root cap protein 2 [Zea mays]
LTHSSRSIISKKNTIVTTDSVRALAMASRLGVVLALAAVVLLAAAGAAAGQSTPRPPNAQGPKPKPKPMKVKCTENRKENPYCFNRNMDCPANCPQSCYPDCNTCKPVCVCNTPGACGDPRFIGGDGNAFYFHGRRDADFCVVSDRDLHINAHFIGKSGHSGMSRDFTWIQAIAVLFDGHRLYLGARKTGTWDDAVEHLDITLDGEPVYLPADLIEGAKWTSSRVPELSVTRTKAANGVLVTVAGKFSVRANAVPITEEESRVHRYGVTADDCLAHLELAFKFDALTDDVHGVVGQTYRSDYVNHFDVRASMPTMGGDATFTTSSLFAADCSVARYGVSRGNDGAAVLSELAGVTCASGMDGKGVVCKK

SEQ ID NO: 68403 - protein, 344 aa, Triticum aestivum
  peptide (1)..(344): Ceres Seq. ID no. 15221722
  misc_feature (1)..(321): Homolog of NCBI NO: 4514635 NR Description: root cap protein 1 [Zea mays]
  misc_feature (1)..(311): Homolog of NCBI NO: 34905940 NR Description: similar to root cap protein
  misc_feature (7)..(312): Homolog of NCBI NO: 34905934 NR Description: similar to root cap protein
  misc_feature (45)..(344): Homolog of NCBI NO: 7484468 NR Description: late embryonic abundant protein EMB7 - white
  misc_feature (3)..(344): Homolog of NCBI NO: 21741738 NR Description: OSJNBa0073L04.18 [Oryza sativa (japonica
  misc_feature (5)..(316): Homolog of NCBI NO: 34905936 NR Description: similar to root cap protein
  misc_feature (3)..(316): Homolog of NCBI NO: 34905930 NR Description: similar to root cap protein
  misc_feature (31)..(344): Homolog of NCBI NO: 30685319 NR Description: late embryogenesis abundant protein -related
  misc_feature (31)..(344): Homolog of NCBI NO: 11994465 NR Description: contains similarity to late embryogenesis
  misc_feature (3)..(344): Homolog of NCBI NO: 4514637 NR Description: root cap protein 2 [Zea mays]
MASRLGVVLALAAVVLLAAAGAAAGQSTPRPPNAQGPKPKPKPMKVKCTENRKENPYCFNRNMDCPANCPQSCYPDCNTCKPVCVCNTPGACGDPRFIGGDGNAFYFHGRRDADFCVVSDRDLHINAHFIGKSGHSGMSRDFTWIQAIAVLFDGHRLYLGARKTGTWDDAVEHLDITLDGEPVYLPADLIEGAKWTSSRVPELSVTRTKAANGVLVTVAGKFSVRANAVPITEEESRVHRYGVTADDCLAHLELAFKFDALTDDVHGVVGQTYRSDYVNHFDVRASMPTMGGDATFTTSSLFAADCSVARYGVSRGNDGAAVLSELAGVTCASGMDGKGVVCKK

SEQ ID NO: 68404 - protein, 301 aa, Triticum aestivum
  peptide (1)..(301): Ceres Seq. ID no. 15221723
  misc_feature (1)..(278): Homolog of NCBI NO: 4514635 NR Description: root cap protein 1 [Zea mays]
  misc_feature (1)..(268): Homolog of NCBI NO: 34905940 NR Description: similar to root cap protein
  misc_feature (1)..(269): Homolog of NCBI NO: 34905934 NR Description: similar to root cap protein
  misc_feature (2)..(301): Homolog of NCBI NO: 7484468 NR Description: late embryonic abundant protein EMB7 - white
  misc_feature (1)..(301): Homolog of NCBI NO: 21741738 NR Description: OSJNBa0073L04.18 [Oryza sativa (japonica
  misc_feature (1)..(273): Homolog of NCBI NO: 34905936 NR Description: similar to root cap protein
  misc_feature (1)..(273): Homolog of NCBI NO: 34905930 NR Description: similar to root cap protein
  misc_feature (1)..(301): Homolog of NCBI NO: 30685319 NR Description: late embryogenesis abundant protein -related
  misc_feature (1)..(301): Homolog of NCBI NO: 11994465 NR Description: contains similarity to late embryogenesis
  misc_feature (1)..(301): Homolog of NCBI NO: 4514637 NR Description: root cap protein 2 [Zea mays]
MKVKCTENRKENPYCFNRNMDCPANCPQSCYPDCNTCKPVCVCNTPGACGDPRFIGGDGNAFYFHGRRDADFCVVSDRDLHINAHFIGKSGHSGMSRDFTWIQAIAVLFDGHRLYLGARKTGTWDDAVEHLDITLDGEPVYLPADLIEGAKWTSSRVPELSVTRTKAANGVLVTVAGKFSVRANAVPITEEESRVHRYGVTADDCLAHLELAFKFDALTDDVHGVVGQTYRSDYVNHFDVRASMPTMGGDATFTTSSLFAADCSVARYGVSRGNDGAAVLSELAGVTCASGMDGKGVVCKK

SEQ ID NO: 68405 - DNA, 727 bp, Triticum aestivum
  misc_feature (1)..(727): Ceres Seq. ID no. 12584185
gacaaaaatcacgtgaggggatccttggagacgctctcatagcagagaggccgacgaacggtgaggtcaaaatcccgagcgaagagagaggcgggcaggaaagatggcggcggccgcactgcgtccggcgatcctccgccacatccgactctcgcccgccacggcggcccctctcgccgccgccgccgcggccggccggcccctcgccctcgcgccgtggctcgcgcggccaatgtcctcacacgacgcccacctcacccgcgacgaggtcgtcggccgcgtcctcgacgtcctcaagtgccaccccaaggtcgagccctccaaggtgacccccgaggcgcacttcgagaaggatctggggctggacagcctggacacggtggaggtggtgatggcgatcgaggaagagttcaagctcgagatccccgacttggaggctgacaagatcaactcgcttccgctcgccatcgagtatgtcgccaaccaccccatggccggctgagtgcccacccttccgattgccgaccgtgccagggtgaggcattttctcgtttctgtttggggatgatgaataattgcctggagttgttcaggaaaactggtccctggtgctccgcaatgtgtcggtcgctattggtcttggatgcaactgtaacattccgcagtgtcgctgatgaactggccttgttggtcgcacgcttgtttttgtagtatatctgtttaatcc

SEQ ID NO: 68406 - protein, 132 aa, Triticum aestivum
  peptide (1)..(132): Ceres Seq. ID no. 12584186
  misc_feature (59)..(125): Pfam Name: Phosphopantetheine attachment site Pfam Description: Phosphopantetheine attachment site
  misc_feature (24)..(127): Homolog of NCBI NO: 27754007 NR Description: RIKEN cDNA 2610003B19 [Mus musculus]
  misc_feature (15)..(131): Homolog of NCBI NO: 6322656 NR Description: mitochondrial acyl carrier protein; Acp1p
  misc_feature (2)..(131): Homolog of NCBI NO: 34485510 NR Description: acyl carrier protein 1 [Chlamydomonas reinhardtii]
  misc_feature (1)..(131): Homolog of NCBI NO: 32407719 NR Description: hypothetical protein [Neurospora crassa]
  misc_feature (7)..(131): Homolog of NCBI NO: 40743607 NR Description: hypothetical protein AN5704.2 [Aspergillus
  misc_feature (5)..(131): Homolog of NCBI NO: 15217894 NR Description: acyl carrier protein, putative
  misc_feature (5)..(131): Homolog of NCBI NO: 21553376 NR Description: acyl carrier protein, putative [Arabidopsis
  misc_feature (5)..(131): Homolog of NCBI NO: 15450375 NR Description: At2g44620/F16B22.11 [Arabidopsis thaliana]
  misc_feature (5)..(131): Homolog of NCBI NO: 15224918 NR Description: acyl carrier protein
  misc_feature (1)..(131): Homolog of NCBI NO: 34900336 NR Description: putative acyl carrier protein
MAAAALRPAILRHIRLSPATAAPLAAAAAAGRPLALAPWLARPMSSHDAHLTRDEVVGRVLDVLKCHPKVEPSKVTPEAHFEKDLGLDSLDTVEVVMAIEEEFKLEIPDLEADKINSLPLAIEYVANHPMAG

SEQ ID NO: 68407 - protein, 108 aa, Triticum aestivum
  peptide (1)..(108): Ceres Seq. ID no. 12584187
QKSREGILGDALIAERPTNGEVKIPSEERGGQERWRRPHCVRRSSATSDSRPPRRPLSPPPPRPAGPSPSRRGSRGQCPHTTPTSPATRSSAASSTSSSATPRSSPPR

SEQ ID NO: 68408 - protein, 89 aa, Triticum aestivum
  peptide (1)..(89): Ceres Seq. ID no. 12584188
  misc_feature (16)..(82): Pfam Name: Phosphopantetheine attachment site Pfam Description: Phosphopantetheine attachment site
  misc_feature (1)..(84): Homolog of NCBI NO: 27754007 NR Description: RIKEN cDNA 2610003B19 [Mus musculus]
  misc_feature (1)..(88): Homolog of NCBI NO: 6322656 NR Description: mitochondrial acyl carrier protein; Acp1p
  misc_feature (1)..(88): Homolog of NCBI NO: 34485510 NR Description: acyl carrier protein 1 [Chlamydomonas reinhardtii]
  misc_feature (1)..(88): Homolog of NCBI NO: 32407719 NR Description: hypothetical protein [Neurospora crassa]
  misc_feature (1)..(88): Homolog of NCBI NO: 40743607 NR Description: hypothetical protein AN5704.2 [Aspergillus
  misc_feature (1)..(88): Homolog of NCBI NO: 15217894 NR Description: acyl carrier protein, putative
  misc_feature (1)..(88): Homolog of NCBI NO: 21553376 NR Description: acyl carrier protein, putative [Arabidopsis
  misc_feature (1)..(88): Homolog of NCBI NO: 15450375 NR Description: At2g44620/F16B22.11 [Arabidopsis thaliana]
  misc_feature (1)..(88): Homolog of NCBI NO: 15224918 NR Description: acyl carrier protein
  misc_feature (1)..(88): Homolog of NCBI NO: 34900336 NR Description: putative acyl carrier protein
MSSHDAHLTRDEVVGRVLDVLKCHPKVEPSKVTPEAHFEKDLGLDSLDTVEVVMAIEEEFKLEIPDLEADKINSLPLAIEYVANHPMAG

SEQ ID NO: 68409 - DNA, 775 bp, Triticum aestivum
  misc_feature (1)..(775): Ceres Seq. ID no. 12598299
aaatcagacaaaacacgatggcatcagcagcgccattctccggcaccggcagtctccttcgcctgacaaaaccaggaacgccacagccccagttcttctcccctccgccgtctcgctcccacttccaccttcgaacccgccccgccaaggcaaagagcccaatcgccggagccatcgcctcctcttccatggcggcagcccagccccagacgtgcgacggccaacaacaacgggcggaggaggccatgaagctgctgttcgtcgagatgggcgtcgggtacgaccagcacggacaggacatcacctccgccgcggtgcgcgcctgcaaggatgccatctcctccaactccatccccgccttccgccgcgggtcgataccaggggtgaacagtgaacagatgaaactgcagatcaagctgggtgtcccgaggccggtgcagcatctgttggactttgagagaatcaaggccgtcttcccctatggtgagatcaccagctgcgaggtcattgacggcgggatgatctgttcaagtggaacatgcatcgaagcaatgggagataaaaacgatgactgctacattgtcaatgctgcagtttacgtcggttactaatgctagcctggaggaattgttgtattggaacagtggaaaacttgaaaaaaaaacctggccgggagaggggaactggaaattctcgtaggcaataagtatgtataactgttatgaacagagaaagggtcaaaatagggggaggccatgaagcctcccggtagtcc

SEQ ID NO: 68410 - protein, 202 aa, Triticum aestivum
  peptide (1)..(202): Ceres Seq. ID no. 12598300
  misc_feature (81)..(200): Homolog of NCBI NO: 23127863 NR Description: hypothetical protein [Nostoc punctiforme]
  misc_feature (83)..(202): Homolog of NCBI NO: 16799587 NR Description: lin0512 [Listeria innocua]
  misc_feature (83)..(202): Homolog of NCBI NO: 16802555 NR Description: lmo0512 [Listeria monocytogenes EGD-e]
  misc_feature (83)..(202): Homolog of NCBI NO: 23098421 NR Description: hypothetical protein [Oceanobacillus iheyensis
  misc_feature (84)..(202): Homolog of NCBI NO: 23098097 NR Description: hypothetical protein [Oceanobacillus iheyensis
  misc_feature (82)..(202): Homolog of NCBI NO: 37520060 NR Description: hypothetical protein glr0491 [Gloeobacter
  misc_feature (82)..(202): Homolog of NCBI NO: 30690579 NR Description: expressed protein [Arabidopsis thaliana]
  misc_feature (6)..(159): Homolog of NCBI NO: 34912624 NR Description: P0410E01.16 [Oryza sativa (japonica
  misc_feature (28)..(202): Homolog of NCBI NO: 21954066 NR Description: unknown protein [Arabidopsis thaliana]
  misc_feature (28)..(202): Homolog of NCBI NO: 18396927 NR Description: expressed protein
IRQNTMASAAPFSGTGSLLRLTKPGTPQPQFFSPPPSRSHFHLRTRPAKAKSPIAGAIASSSMAAAQPQTCDGQQQRAEEAMKLLFVEMGVGYDQHGQDITSAAVRACKDAISSNSIPAFRRGSIPGVNSEQMKLQIKLGVPRPVQHLLDFERIKAVFPYGEITSCEVIDGGMICSSGTCIEAMGDKNDDCYIVNAAVYVGY

SEQ ID NO: 68411 - protein, 197 aa, Triticum aestivum
  peptide (1)..(197): Ceres Seq. ID no. 12598301
  misc_feature (76)..(195): Homolog of NCBI NO: 23127863 NR Description: hypothetical protein [Nostoc punctiforme]
  misc_feature (78)..(197): Homolog of NCBI NO: 16799587 NR Description: lin0512 [Listeria innocua]
  misc_feature (78)..(197): Homolog of NCBI NO: 16802555 NR Description: lmo0512 [Listeria monocytogenes EGD-e]
  misc_feature (78)..(197): Homolog of NCBI NO: 23098421 NR Description: hypothetical protein [Oceanobacillus iheyensis
  misc_feature (79)..(197): Homolog of NCBI NO: 23098097 NR Description: hypothetical protein [Oceanobacillus iheyensis
  misc_feature (77)..(197): Homolog of NCBI NO: 37520060 NR Description: hypothetical protein glr0491 [Gloeobacter
  misc_feature (77)..(197): Homolog of NCBI NO: 30690579 NR Description: expressed protein [Arabidopsis thaliana]
  misc_feature (1)..(154): Homolog of NCBI NO: 34912624 NR Description: P0410E01.16 [Oryza sativa (japonica
  misc_feature (23)..(197): Homolog of NCBI NO: 21954066 NR Description: unknown protein [Arabidopsis thaliana]
  misc_feature (23)..(197): Homolog of NCBI NO: 18396927 NR Description: expressed protein
MASAAPFSGTGSLLRLTKPGTPQPQFFSPPPSRSHFHLRTRPAKAKSPIAGAIASSSMAAAQPQTCDGQQQRAEEAMKLLFVEMGVGYDQHGQDITSAAVRACKDAISSNSIPAFRRGSIPGVNSEQMKLQIKLGVPRPVQHLLDFERIKAVFPYGEITSCEVIDGGMICSSGTCIEAMGDKNDDCYIVNAAVYVGY

SEQ ID NO: 68412 - protein, 140 aa, Triticum aestivum
  peptide (1)..(140): Ceres Seq. ID no. 12598302
  misc_feature (19)..(138): Homolog of NCBI NO: 23127863 NR Description: hypothetical protein [Nostoc punctiforme]
  misc_feature (21)..(140): Homolog of NCBI NO: 16799587 NR Description: lin0512 [Listeria innocua]
  misc_feature (21)..(140): Homolog of NCBI NO: 16802555 NR Description: lmo0512 [Listeria monocytogenes EGD-e]
  misc_feature (21)..(140): Homolog of NCBI NO: 23098421 NR Description: hypothetical protein [Oceanobacillus iheyensis
  misc_feature (22)..(140): Homolog of NCBI NO: 23098097 NR Description: hypothetical protein [Oceanobacillus iheyensis
  misc_feature (20)..(140): Homolog of NCBI NO: 37520060 NR Description: hypothetical protein glr0491 [Gloeobacter
  misc_feature (20)..(140): Homolog of NCBI NO: 30690579 NR Description: expressed protein [Arabidopsis thaliana]
  misc_feature (1)..(97): Homolog of NCBI NO: 34912624 NR Description: P0410E01.16 [Oryza sativa (japonica
  misc_feature (1)..(140): Homolog of NCBI NO: 21954066 NR Description: unknown protein [Arabidopsis thaliana]
  misc_feature (1)..(140): Homolog of NCBI NO: 18396927 NR Description: expressed protein
MAAAQPQTCDGQQQRAEEAMKLLFVEMGVGYDQHGQDITSAAVRACKDAISSNSIPAFRRGSIPGVNSEQMKLQIKLGVPRPVQHLLDFERIKAVFPYGEITSCEVIDGGMICSSGTCIEAMGDKNDDCYIVNAAVYVGY

SEQ ID NO: 68413 - DNA, 899 bp, Triticum aestivum
  misc_feature (1)..(899): Ceres Seq. ID no. 13654167
cactcccctgtctgtctccaagtccaagatcacaccgcgctttcttccttccccgtcgccgatccagacgaagcgccgcacgccggttcccttcacccccgcccgccaacgtctccggccaggttggatccatggcggaaaagaaggtcgtgctgaagctggacctgcacgacgacaagcagaagcagagggctctcaaggtcgtctccactctccacggcatcgaccagatcgccgtggacatgaaggaccagaagatgacggtggtgggcaccgtcgaccccgtggacctcgtcggcaggctgcgcagcaagctcttccccacggcgcagatgctctccgtcggcccggccaaggaggagaagaaggacggcggcgccaagaaggacgacggcaagaaggatggcgacaagaaggagccgatcccggtgtacacgccgtggtacccgccgccgccgccgctgtaccacccgcacccgtactaccacaaccacagcgccgaggaggaccccagctcctgcgtcatctgctgatcggcgcgcgccgctcccttgtacattttgtagctggccgtgtgctctgctgcctgccggtcgaccatgcctgctacggtgatcgacggcgtgcaccatacttaaggccgtttaaggattttgcgccagtgatccggctgctgtgcttgtgcatctgcttagtttataaagtgcagatatggaatttattagtgtgtagtgtagaattactactagatagaactgctggagttggattttgagtgaaagttcaccgagtgctctgctctccaatgtgataacagagtagtgaaataattagattaagtgctctgctctctggtgtggaaagaaaatagtgaagcccaataaataaattgaaggtgc

SEQ ID NO: 68414 - protein, 257 aa, Triticum aestivum
  peptide (1)..(257): Ceres Seq. ID no. 13654168
TPLSVSKSKITPRFLPSPSPIQTKRRTPVPFTPARQRLRPGWIHGGKEGRAEAGPARRQAEAEGSQGRLHSPRHRPDRRGHEGPEDDGGGHRRPRGPRRQAAQQALPHGADALRRPGQGGEEGRRRQEGRRQEGWRQEGADPGVHAVVPAAAAAVPPAPVLPQPQRRGGPQLLRHLLIGARRSLVHFVAGRVLCCLPVDHACYGDRRRAPYLRPFKDFAPVIRLLCLCICLVYKVQIWNLLVCSVELLLDRTAGVGF

SEQ ID NO: 68415 - protein, 176 aa, Triticum aestivum
  peptide (1)..(176): Ceres Seq. ID no. 13654169
  misc_feature (49)..(118): Pfam Name: Heavy-metal-associated domain Pfam Description: Heavy-metal-associated domain
  misc_feature (47)..(139): Homolog of NCBI NO: 34902246 NR Description: Unknown protein [Oryza sativa (japonica
  misc_feature (47)..(140): Homolog of NCBI NO: 15223416 NR Description: heavy-metal-associated domain-containing protein
  misc_feature (47)..(139): Homolog of NCBI NO: 13543783 NR Description: Unknown (protein for MGC:7642) [Mus musculus]
  misc_feature (47)..(155): Homolog of NCBI NO: 21929723 NR Description: barley stem rust resistance protein
  misc_feature (47)..(155): Homolog of NCBI NO: 21728344 NR Description: stem rust resistance protein Rpg1
  misc_feature (47)..(155): Homolog of NCBI NO: 21929729 NR Description: barley stem rust resistance protein
  misc_feature (47)..(175): Homolog of NCBI NO: 29124977 NR Description: unknown [Populus tremuloides]
  misc_feature (44)..(176): Homolog of NCBI NO: 32488374 NR Description: OSJNBa0043A12.4 [Oryza sativa (japonica
LPCLSPSPRSHRAFFLPRRRSRRSAARRFPSPPPANVSGQVGSMAEKKVVLKLDLHDDKQKQRALKVVSTLHGIDQIAVDMKDQKMTVVGTVDPVDLVGRLRSKLFPTAQMLSVGPAKEEKKDGGAKKDDGKKDGDKKEPIPVYTPWYPPPPPLYHPHPYYHNHSAEEDPSSCVIC

SEQ ID NO: 68416 - protein, 133 aa, Triticum aestivum
  peptide (1)..(133): Ceres Seq. ID no. 13654170
  misc_feature (6)..(75): Pfam Name: Heavy-metal-associated domain Pfam Description: Heavy-metal-associated domain
  misc_feature (4)..(96): Homolog of NCBI NO: 34902246 NR Description: Unknown protein [Oryza sativa (japonica
  misc_feature (4)..(97): Homolog of NCBI NO: 15223416 NR Description: heavy-metal-associated domain-containing protein
  misc_feature (4)..(96): Homolog of NCBI NO: 13543783 NR Description: Unknown (protein for MGC:7642) [Mus musculus]
  misc_feature (4)..(112): Homolog of NCBI NO: 21929723 NR Description: barley stem rust resistance protein
  misc_feature (4)..(112): Homolog of NCBI NO: 21728344 NR Description: stem rust resistance protein Rpg1
  misc_feature (4)..(112): Homolog of NCBI NO: 21929729 NR Description: barley stem rust resistance protein
  misc_feature (4)..(132): Homolog of NCBI NO: 29124977 NR Description: unknown [Populus tremuloides]
  misc_feature (1)..(133): Homolog of NCBI NO: 32488374 NR Description: OSJNBa0043A12.4 [Oryza sativa (japonica
MAEKKVVLKLDLHDDKQKQRALKVVSTLHGIDQIAVDMKDQKMTVVGTVDPVDLVGRLRSKLFPTAQMLSVGPAKEEKKDGGAKKDDGKKDGDKKEPIPVYTPWYPPPPPLYHPHPYYHNHSAEEDPSSCVIC

SEQ ID NO: 68417 - DNA, 1130 bp, Triticum aestivum
  misc_feature (1)..(1130): Ceres Seq. ID no. 13654553
actgcacactaccacactccccactctcccacgccacgccgactagcttcctccattaccctcctcctttgcttgcccagacctcggcgaggctccggcgagagagcgagagcgaaagctcccttccgctgctgcaatggcggttcctctggtgctcatgctcttggtcgccatgttcaccggctcagatgcgatgtactgcgtgtgcaagtcggacgcgaacccggtggcgatgcagaaggccatcgactacgcgtgcggcaagggcgccgactgcacccagatcacctccagcgggccctgcttccagccctcctccgtcgtcgcccactgctcctacgcctgcaacagctactaccagaagaacgccggcatgggcgccacctgcgatttcatgggcgtcgccaccctcaccggcgccgaccccagcgccggatcctgcaagtaccccgccagcgctagcggcgtcggcactggagcaggcaccggcaccggcggcatgggaaccggcggcacagggacaggcaccggaggcatgggaaccggcaccggaaccagcaccggaacgggcacgggcgtcggcaccggcaccagcaccggcggcatggggagcatgaccccgccgggcgcgaccagctccgggatgccggggagccccttcggcggcggcgcgtacggcccgtctggcatgaaccaggactacagcgcagccgtggtcggtcgccgcgtggccgtcgcggggctcctcgtggcggcagccgcgccgctcctcctccacttcatctgatgcggtggtgaccactggttggccggcggaaaggcgcgtcggcaatgctggcgggtgcgacgccggattcggtgggcacgccccgccgcttttgtgtccggctcgctctctcgcctgcctttccggcgtctgcgtcgttttgatggttcgatcggacgtactagtagcgtagtgtctgtctgtctgtccatgagtgctagtactcttattaagctgaccaccccatgtggtgtttgtaccggtgcgggtcgtggtagagttgatgagatctggtaggggattctttcttccttctcgtagcggtgacggtgttccgagacatataattatgtgttgtcgttcc

SEQ ID NO: 68418 - protein, 216 aa, Triticum aestivum
  peptide (1)..(216): Ceres Seq. ID no. 13654554
  misc_feature (77)..(203): Pfam Name: Dehydrin Pfam Description: Dehydrin
  misc_feature (5)..(169): Homolog of NCBI NO: 21592859 NR Description: unknown [Arabidopsis thaliana]
  misc_feature (4)..(169): Homolog of NCBI NO: 15241485 NR Description: glycosyl hydrolase family 17 [Arabidopsis
  misc_feature (16)..(209): Homolog of NCBI NO: 34912962 NR Description: beta-1,3 glucanase-like protein
  misc_feature (1)..(151): Homolog of NCBI NO: 18394637 NR Description: glycosyl hydrolase family 17 [Arabidopsis
  misc_feature (5)..(108): Homolog of NCBI NO: 34909796 NR Description: P0403C05.4 [Oryza sativa (japonica
  misc_feature (1)..(171): Homolog of NCBI NO: 15222715 NR Description: glycosyl hydrolase family 17 [Arabidopsis
  misc_feature (1)..(184): Homolog of NCBI NO: 25404810 NR Description: unknown protein, 45065-49536 [imported] -
  misc_feature (1)..(213): Homolog of NCBI NO: 18409239 NR Description: expressed protein [Arabidopsis thaliana]
  misc_feature (1)..(184): Homolog of NCBI NO: 21553768 NR Description: unknown [Arabidopsis thaliana]
  misc_feature (1)..(167): Homolog of NCBI NO: 22775658 NR Description: contains ESTs
MAVPLVLMLLVAMFTGSDAMYCVCKSDANPVAMQKAIDYACGKGADCTQITSSGPCFQPSSVVAHCSYACNSYYQKNAGMGATCDFMGVATLTGADPSAGSCKYPASASGVGTGAGTGTGGMGTGGTGTGTGGMGTGTGTSTGTGTGVGTGTSTGGMGSMTPPGATSSGMPGSPFGGGAYGPSGMNQDYSAAVVGRRVAVAGLLVAAAAPLLLHFI

SEQ ID NO: 68419 - protein, 209 aa, Triticum aestivum
  peptide (1)..(209): Ceres Seq. ID no. 13654555
  misc_feature (70)..(196): Pfam Name: Dehydrin Pfam Description: Dehydrin
  misc_feature (1)..(162): Homolog of NCBI NO: 21592859 NR Description: unknown [Arabidopsis thaliana]
  misc_feature (1)..(162): Homolog of NCBI NO: 15241485 NR Description: glycosyl hydrolase family 17 [Arabidopsis
  misc_feature (9)..(202): Homolog of NCBI NO: 34912962 NR Description: beta-1,3 glucanase-like protein
  misc_feature (1)..(144): Homolog of NCBI NO: 18394637 NR Description: glycosyl hydrolase family 17 [Arabidopsis
  misc_feature (1)..(101): Homolog of NCBI NO: 34909796 NR Description: P0403C05.4 [Oryza sativa (japonica
  misc_feature (1)..(164): Homolog of NCBI NO: 15222715 NR Description: glycosyl hydrolase family 17 [Arabidopsis
  misc_feature (1)..(177): Homolog of NCBI NO: 25404810 NR Description: unknown protein, 45065-49536 [imported] -
  misc_feature (1)..(206): Homolog of NCBI NO: 18409239 NR Description: expressed protein [Arabidopsis thaliana]
  misc_feature (1)..(177): Homolog of NCBI NO: 21553768 NR Description: unknown [Arabidopsis thaliana]
  misc_feature (1)..(160): Homolog of NCBI NO: 22775658 NR Description: contains ESTs
MLLVAMFTGSDAMYCVCKSDANPVAMQKAIDYACGKGADCTQITSSGPCFQPSSVVAHCSYACNSYYQKNAGMGATCDFMGVATLTGADPSAGSCKYPASASGVGTGAGTGTGGMGTGGTGTGTGGMGTGTGTSTGTGTGVGTGTSTGGMGSMTPPGATSSGMPGSPFGGGAYGPSGMNQDYSAAVVGRRVAVAGLLVAAAAPLLLHFI

SEQ ID NO: 68420 - protein, 204 aa, Triticum aestivum
  peptide (1)..(204): Ceres Seq. ID no. 13654556
  misc_feature (65)..(191): Pfam Name: Dehydrin Pfam Description: Dehydrin
  misc_feature (1)..(157): Homolog of NCBI NO: 21592859 NR Description: unknown [Arabidopsis thaliana]
  misc_feature (1)..(157): Homolog of NCBI NO: 15241485 NR Description: glycosyl hydrolase family 17 [Arabidopsis
  misc_feature (4)..(197): Homolog of NCBI NO: 34912962 NR Description: beta-1,3 glucanase-like protein
  misc_feature (1)..(139): Homolog of NCBI NO: 18394637 NR Description: glycosyl hydrolase family 17 [Arabidopsis
  misc_feature (1)..(96): Homolog of NCBI NO: 34909796 NR Description: P0403C05.4 [Oryza sativa (japonica
  misc_feature (1)..(159): Homolog of NCBI NO: 15222715 NR Description: glycosyl hydrolase family 17 [Arabidopsis
  misc_feature (1)..(172): Homolog of NCBI NO: 25404810 NR Description: unknown protein, 45065-49536 [imported] -
  misc_feature (1)..(201): Homolog of NCBI NO: 18409239 NR Description: expressed protein [Arabidopsis thaliana]
  misc_feature (1)..(172): Homolog of NCBI NO: 21553768 NR Description: unknown [Arabidopsis thaliana]
  misc_feature (1)..(155): Homolog of NCBI NO: 22775658 NR Description: contains ESTs
MFTGSDAMYCVCKSDANPVAMQKAIDYACGKGADCTQITSSGPCFQPSSVVAHCSYACNSYYQKNAGMGATCDFMGVATLTGADPSAGSCKYPASASGVGTGAGTGTGGMGTGGTGTGTGGMGTGTGTSTGTGTGVGTGTSTGGMGSMTPPGATSSGMPGSPFGGGAYGPSGMNQDYSAAVVGRRVAVAGLLVAAAAPLLLHFI

SEQ ID NO: 68421 - DNA, 1408 bp, Triticum aestivum
  misc_feature (1)..(1408): Ceres Seq. ID no. 13596097
gccaacagtccaataaaagggactgcacccatcagtgtaaaaacaagcagcagtcaggcttcaatacaagcagactagtacgtagtacacgcaaggcagctcttctagttcttaggtgtgtgtagtacgtgcatcgatcctgtttgtttgatcctcatagagctacctactcgatcgcaccacttgaaattgcagccaaggccttgtagcacacccaagctagctagcagagcatttggtatttgaattggccgggaggaactatggtgctggacaagcaagacaggagcagagtcctggtaattggtggcacaggtcacattgggaagcacatcgttgctgcgagtgtccgccgcgacaacccgacctgtgtcctcattagggatgctgcaccggcttatctggccaaggcgcagctcctcaagagcttcattgattccggtgttgctctcatcaagggggatttatttgaccacgacagcctcgtaaatgccatcaagggtgcagatgccgtgatctcggccgtggggacctgtcagctcgacgagcagacgaggattgtcatggccatcaaggaggctggcaatgtcattaagaggttcctgccgtctgagttcggctctgacccagagcgggttcacaccgtggatccagcggccacactatacgctggtaaaatcagccttcgccgtctgatcgaggcggagggtatacctcatacatatgtctgctgcaacgggttcgccgaaacctaccttgtgagcatcggcgatgttacggctcttggcgctggtcctcggtccgacaagatcactgtcctaggcgatggagttgcaaaaggggtgtttgtggtggaagaggacatagctgcctacacggtgagagcgatcgaggatacgaggaccctgaacaagatcctgtacatgaggccgccggcgaacatcgtgtcccacaacgagctcatcgcactgtgggagaagaaagcgggaaggactttccagatcgctcgcatcccagagccggatctcctcaagttgatcaaggaggcggcataccctctcaacatgatgctgtcccactcgctctccgtcttggtgaggggcgaccaagccaacttcgacatcgagccgtcctttggtgttgaggccaccgagctgtaccctgacgtgaagtacaccaccgtcgacgagtacctggaccgcctcctctgacacttcttggctggatggagcactaaagatgatagagcagtggcctctccaaatgcaatgatgcgtgtgtcttgtgtgcaaattcaccagaaagaaaagaagaacctctgcgttccttgctaaaaaacatgatttgtggccgtgcataggctagtttatatatctttcctaataataaagggattatngcttntgcc

SEQ ID NO: 68422 - protein, 315 aa, Triticum aestivum
  peptide (1)..(315): Ceres Seq. ID no. 13596098
  misc_feature (7)..(315): Pfam Name: Isoflavone reductase Pfam Description: Isoflavone reductase
  misc_feature (7)..(315): Homolog of NCBI NO: 3114903 NR Description: phenylcoumaran benzylic ether reductase
  misc_feature (8)..(313): Homolog of NCBI NO: 19310585 NR Description: putative NAD(P)H oxidoreductase, isoflavone
  misc_feature (8)..(313): Homolog of NCBI NO: 15234993 NR Description: isoflavone reductase, putative [Arabidopsis
  misc_feature (8)..(315): Homolog of NCBI NO: 10764491 NR Description: allergenic isoflavone reductase-like protein Bet
  misc_feature (7)..(315): Homolog of NCBI NO: 3114901 NR Description: phenylcoumaran benzylic ether reductase
  misc_feature (7)..(315): Homolog of NCBI NO: 3114899 NR Description: phenylcoumaran benzylic ether reductase
  misc_feature (8)..(315): Homolog of NCBI NO: 3243234 NR Description: isoflavone reductase related protein [Pyrus
  misc_feature (7)..(315): Homolog of NCBI NO: 1708421 NR Description: ISOFLAVONE REDUCTASE HOMOLOG IRL
MVLDKQDRSRVLVIGGTGHIGKHIVAASVRRDNPTCVLIRDAAPAYLAKAQLLKSFIDSGVALIKGDLFDHDSLVNAIKGADAVISAVGTCQLDEQTRIVMAIKEAGNVIKRFLPSEFGSDPERVHTVDPAATLYAGKISLRRLIEAEGIPHTYVCCNGFAETYLVSIGDVTALGAGPRSDKITVLGDGVAKGVFVVEEDIAAYTVRAIEDTRTLNKILYMRPPANIVSHNELIALWEKKAGRTFQIARIPEPDLLKLIKEAAYPLNMMLSHSLSVLVRGDQANFDIEPSFGVEATELYPDVKYTTVDEYLDRLL

SEQ ID NO: 68423 - protein, 215 aa, Triticum aestivum
  peptide (1)..(215): Ceres Seq. ID no. 13596099
  misc_feature (1)..(215): Pfam Name: Isoflavone reductase Pfam Description: Isoflavone reductase
  misc_feature (1)..(215): Homolog of NCBI NO: 3114903 NR Description: phenylcoumaran benzylic ether reductase
  misc_feature (1)..(213): Homolog of NCBI NO: 19310585 NR Description: putative NAD(P)H oxidoreductase, isoflavone
  misc_feature (1)..(213): Homolog of NCBI NO: 15234993 NR Description: isoflavone reductase, putative [Arabidopsis
  misc_feature (1)..(215): Homolog of NCBI NO: 10764491 NR Description: allergenic isoflavone reductase-like protein Bet
  misc_feature (1)..(215): Homolog of NCBI NO: 3114901 NR Description: phenylcoumaran benzylic ether reductase
  misc_feature (1)..(215): Homolog of NCBI NO: 3114899 NR Description: phenylcoumaran benzylic ether reductase
  misc_feature (1)..(215): Homolog of NCBI NO: 3243234 NR Description: isoflavone reductase related protein [Pyrus
  misc_feature (1)..(215): Homolog of NCBI NO: 1708421 NR Description: ISOFLAVONE REDUCTASE HOMOLOG IRL
MAIKEAGNVIKRFLPSEFGSDPERVHTVDPAATLYAGKISLRRLIEAEGIPHTYVCCNGFAETYLVSIGDVTALGAGPRSDKITVLGDGVAKGVFVVEEDIAAYTVRAIEDTRTLNKILYMRPPANIVSHNELIALWEKKAGRTFQIARIPEPDLLKLIKEAAYPLNMMLSHSLSVLVRGDQANFDIEPSFGVEATELYPDVKYTTVDEYLDRLL

SEQ ID NO: 68424 - DNA, 1210 bp, Triticum aestivum
  misc_feature (1)..(1210): Ceres Seq. ID no. 14313544
acatcgatgagaaaaaggcagccaaggcgcacacttccaccacacaacgcgcgctttacgagagcagggaaccagaggggaactcgtgcttagctttcctgtagcttcgtttgcaccatccatggccgatccagccgaggagaccgtcgccgcgcccccgccgaccccggcagctcccgccgagggcgccccgccgctgtcggcggagccgccggctagcaccgacgcctcgccggagaaggcggccccgcctgcgcctgcgccggacacgacggtgaggtcccgggggttcaggctgctcggcgaggacacctccgtgcacaaggtgctcggtggcggtaaaactgctgatgtactgttatggaaggacaagaaaacaactgctgtagtgatcggtggcacaactgtcatatgggttttatttgaagtgcttgattaccatctcttaactctgctatcccatgtgatgattggtgtcctggccatcttgttcgtgtggtcgaaagctatgaccttcatcaagaagagtccgccagatattcctgtagtcgagatacctgaagacctcgctgtgaatgtatcacgggcactacgcagcgatgtcaacagatcacttcacttgttgcgcgagattgcaatggggcatgatctgaagaaattccttggtgtgattgctggtctctgggttctgtcagaagttggaagctgctgtgatttcctcaccttgatatatattgctgtcctgatgatccacacggtgccgatcttgtacgacaagtaccaggacaaggtggatcacttcgccggaaaggcccataccgaggcgtgcaagcactacgaggtgctggaccagaaggttctgagcaagataccccgaggaccggcgaaaaccaagaagacctagaatgctgggtgtctcgtgagtgcatgctgggtcgcttgtggttccgtgatcatatgcgtaatgcgacgagacgtcactcgtcttacggtcttgccttctgctcagcattgtattagctatttgtatatgcaactctgaaaacttcgaactgctacctttctactatcgcagtcgcttgtagatacctgtcctgttacttgtgtgtacgtgcggcagatgtgttctcgtgtggatgttcttagtgaaaacctgaatggatgttcttgaaagaaaataacctgctgaatactactggactattaatcc

SEQ ID NO: 68425 - protein, 260 aa, Triticum aestivum; identical to SEQ ID NO: 59269
  peptide (1)..(260): Ceres Seq. ID no. 14313545
  misc_feature (1)..(251): Homolog of NCBI NO: 34610241 NR Description: reticulon 4 isoform B2 [Mus musculus]
  misc_feature (1)..(251): Homolog of NCBI NO: 5821140 NR Description: ASY [Homo sapiens]
  misc_feature (1)..(251): Homolog of NCBI NO: 24431933 NR Description: reticulon 4; neuroendocrine-specific protein C
  misc_feature (1)..(251): Homolog of NCBI NO: 16740576 NR Description: RTN4 protein [Homo sapiens]
  misc_feature (1)..(251): Homolog of NCBI NO: 4838513 NR Description: foocen-m2 [Rattus norvegicus]
  misc_feature (65)..(260): Homolog of NCBI NO: 38345298 NR Description: OSJNBa0043A12.26 [Oryza sativa (japonica
  misc_feature (49)..(260): Homolog of NCBI NO: 34899590 NR Description: hypothetical protein~similar to Oryza sativa
  misc_feature (58)..(260): Homolog of NCBI NO: 34897094 NR Description: unknown protein [Oryza sativa (japonica
  misc_feature (32)..(259): Homolog of NCBI NO: 34909318 NR Description: OSJNBb0021A09.5 [Oryza sativa (japonica
  misc_feature (21)..(259): Homolog of NCBI NO: 34904202 NR Description: P0492F05.25 [Oryza sativa (japonica

SEQ ID NO: 68426 - protein, 145 aa, Triticum aestivum; identical to SEQ ID NO: 59270
  peptide (1)..(145): Ceres Seq. ID no. 14313546
  misc_feature (1)..(136): Homolog of NCBI NO: 34610241 NR Description: reticulon 4 isoform B2 [Mus musculus]
  misc_feature (1)..(136): Homolog of NCBI NO: 5821140 NR Description: ASY [Homo sapiens]
  misc_feature (1)..(136): Homolog of NCBI NO: 24431933 NR Description: reticulon 4; neuroendocrine-specific protein C
  misc_feature (1)..(136): Homolog of NCBI NO: 16740576 NR Description: RTN4 protein [Homo sapiens]
  misc_feature (1)..(136): Homolog of NCBI NO: 4838513 NR Description: foocen-m2 [Rattus norvegicus]
  misc_feature (1)..(145): Homolog of NCBI NO: 38345298 NR Description: OSJNBa0043A12.26 [Oryza sativa (japonica
  misc_feature (1)..(145): Homolog of NCBI NO: 34899590 NR Description: hypothetical protein~similar to Oryza sativa
  misc_feature (1)..(145): Homolog of NCBI NO: 34897094 NR Description: unknown protein [Oryza sativa (japonica
  misc_feature (1)..(144): Homolog of NCBI NO: 34909318 NR Description: OSJNBb0021A09.5 [Oryza sativa (japonica
  misc_feature (1)..(144): Homolog of NCBI NO: 34904202 NR Description: P0492F05.25 [Oryza sativa (japonica

SEQ ID NO: 68427 - protein, 131 aa, Triticum aestivum
  peptide (1)..(131): Ceres Seq. ID no. 14313547
  misc_feature (1)..(122): Homolog of NCBI NO: 34610241 NR Description: reticulon 4 isoform B2 [Mus musculus]
  misc_feature (1)..(122): Homolog of NCBI NO: 5821140 NR Description: ASY [Homo sapiens]
  misc_feature (1)..(122): Homolog of NCBI NO: 24431933 NR Description: reticulon 4; neuroendocrine-specific protein C
  misc_feature (1)..(122): Homolog of NCBI NO: 16740576 NR Description: RTN4 protein [Homo sapiens]
  misc_feature (1)..(122): Homolog of NCBI NO: 4838513 NR Description: foocen-m2 [Rattus norvegicus]
  misc_feature (1)..(131): Homolog of NCBI NO: 38345298 NR Description: OSJNBa0043A12.26 [Oryza sativa (japonica
  misc_feature (1)..(131): Homolog of NCBI NO: 34899590 NR Description: hypothetical protein~similar to Oryza sativa
  misc_feature (1)..(131): Homolog of NCBI NO: 34897094 NR Description: unknown protein [Oryza sativa (japonica
  misc_feature (1)..(130): Homolog of NCBI NO: 34909318 NR Description: OSJNBb0021A09.5 [Oryza sativa (japonica
  misc_feature (1)..(130): Homolog of NCBI NO: 34904202 NR Description: P0492F05.25 [Oryza sativa (japonica
MTFIKKSPPDIPVVEIPEDLAVNVSRALRSDVNRSLHLLREIAMGHDLKKFLGVIAGLWVLSEVGSCCDFLTLIYIAVLMIHTVPILYDKYQDKVDHFAGKAHTEACKHYEVLDQKVLSKIPRGPAKTKKT

SEQ ID NO: 68428 - DNA, 1529 bp, Triticum aestivum
  misc_feature (1)..(1529): Ceres Seq. ID no. 14303576
atctgcgccttctggtgagagtacgtgtgttggttgttcttgcaggcacttgcacgcgtggtcaccatggagctgccccacgccgcgctcgcgctgatcgtcgccgcggccgccacgctctccgtcgcagtggcctacgacccgctggatcccaacgggaacatcaccatcaaatgggacgttctctcgtggacgccagacggatacgtcgcgacggtgacgatcaacaacttccagacgtaccggcagatcatggcgccggggtggacggtggggtggacgtgggcgaagcgggaggtgatctggtccatggtgggcgcgcaggccacggagcagggcgactgctccaagttcaaggccaacctcccgcactcgtgcaagcgcacccccgccgtcgtcgacctgctcccgggcgtgccctacaaccagcagatcgccaactgctgccgcggcggcgtcgtctccgcctacggccaggacccgtccggcgccgtgtcctccttccaggtcagcgtcggccaggccggcaccaccaaccgcaccgtcaaggtccccaagaacttcaccctcctcggccccggcccaggctacacctgcggccccgccaaggtcgtcccctccaccgtcttcctcaccgccgaccaccgccgcaagacccaggccctcatgacgtggaacgtgacgtgcacctactcgcagcacctggcgtccaagtacccgacctgctgcgtctccttctcctccttctacaacgacaccatcgtgccctgcgccaagtgcgcgtgcggctgcgagcacaagacctgcgcccgcagcgagcgggactcgaagcggctcatgtcggcgtcggggaagagcagcgcgcacgcggtcaccgcggtgcgcgggcacgtgaaccggcagagcgcggcgccgctgctgcagtgcacgacccacatgtgccccgtgcgcgtccactggcacgtcaagctcaactaccacgactactggcgcgccaaggtgaccgtcaccaacttcaactaccgcaccaactacaccggctggacgctcgtcgcccagcaccccaacctcgacaacatcaccgaggtcttcagcttcgactacaagcccgtcgtctcctacggctccatcaatgatacggcgctgttctacgggatgaagttcttcaacgaccagctcatggaggcggggccgtacgggaacgtgcagtcggaggtgctgatgcgcaaggacgccagcacattcacgttcaggcaggggtgggcgttcccgcggaagatctacttcaacggcgacgagtgccggatgccgccgccggactcctacccttacctgcccaactccgcgccggcgtcgctcgtgagctccgcctccgtcgtcgtcgccttcttggttctactcatggcatgagcgtcggaggcggccatgatgttttgcctgtagatcataggagaacgttttgggcttcaaggttgagatcggtggtgttttaatctggatataattaaacgcaagtttttccccattac

SEQ ID NO: 68429 - protein, 447 aa, Triticum aestivum
  peptide (1)..(447): Ceres Seq. ID no. 14303577
  misc_feature (6)..(428): Homolog of NCBI NO: 38230578 NR Description: phytochelatin synthetase [Triticum aestivum]
  misc_feature (6)..(428): Homolog of NCBI NO: 30090032 NR Description: phytochelatin synthetase [Triticum monococcum]
  misc_feature (10)..(445): Homolog of NCBI NO: 15232863 NR Description: predicted GPI-anchored protein [Arabidopsis
  misc_feature (1)..(443): Homolog of NCBI NO: 18424412 NR Description: phytochelatin synthetase - like protein
  misc_feature (1)..(443): Homolog of NCBI NO: 21553837 NR Description: phytochelatin synthetase-like protein
  misc_feature (40)..(444): Homolog of NCBI NO: 11358657 NR Description: probable phytochelatin synthetase - Arabidopsis
  misc_feature (21)..(444): Homolog of NCBI NO: 30685446 NR Description: phytochelatin synthetase -related [Arabidopsis
  misc_feature (271)..(445): Homolog of NCBI NO: 34014146 NR Description: BRITTLE CULM1 [Oryza sativa (japonica
  misc_feature (1)..(264): Homolog of NCBI NO: 34014146 NR Description: BRITTLE CULM1 [Oryza sativa (japonica
  misc_feature (10)..(447): Homolog of NCBI NO: 34394570 NR Description: putative phytochelatin synthetase
MELPHAALALIVAAAATLSVAVAYDPLDPNGNITIKWDVLSWTPDGYVATVTINNFQTYRQIMAPGWTVGWTWAKREVIWSMVGAQATEQGDCSKFKANLPHSCKRTPAVVDLLPGVPYNQQIANCCRGGVVSAYGQDPSGAVSSFQVSVGQAGTTNRTVKVPKNFTLLGPGPGYTCGPAKVVPSTVFLTADHRRKTQALMTWNVTCTYSQHLASKYPTCCVSFSSFYNDTIVPCAKCACGCEHKTCARSERDSKRLMSASGKSSAHAVTAVRGHVNRQSAAPLLQCTTHMCPVRVHWHVKLNYHDYWRAKVTVTNFNYRTNYTGWTLVAQHPNLDNITEVFSFDYKPVVSYGSINDTALFYGMKFFNDQLMEAGPYGNVQSEVLMRKDASTFTFRQGWAFPRKIYFNGDECRMPPPDSYPYLPNSAPASLVSSASVVVAFLVLLMA

SEQ ID NO: 68430 - protein, 385 aa, Triticum aestivum
  peptide (1)..(385): Ceres Seq. ID no. 14303578
  misc_feature (1)..(366): Homolog of NCBI NO: 38230578 NR Description: phytochelatin synthetase [Triticum aestivum]
  misc_feature (1)..(366): Homolog of NCBI NO: 30090032 NR Description: phytochelatin synthetase [Triticum monococcum]
  misc_feature (1)..(383): Homolog of NCBI NO: 15232863 NR Description: predicted GPI-anchored protein [Arabidopsis
  misc_feature (1)..(381): Homolog of NCBI NO: 18424412 NR Description: phytochelatin synthetase - like protein
  misc_feature (1)..(381): Homolog of NCBI NO: 21553837 NR Description: phytochelatin synthetase-like protein
  misc_feature (1)..(382): Homolog of NCBI NO: 11358657 NR Description: probable phytochelatin synthetase - Arabidopsis
  misc_feature (1)..(382): Homolog of NCBI NO: 30685446 NR Description: phytochelatin synthetase -related [Arabidopsis
  misc_feature (209)..(383): Homolog of NCBI NO: 34014146 NR Description: BRITTLE CULM1 [Oryza sativa (japonica
  misc_feature (1)..(202): Homolog of NCBI NO: 34014146 NR Description: BRITTLE CULM1 [Oryza sativa (japonica
  misc_feature (1)..(385): Homolog of NCBI NO: 34394570 NR Description: putative phytochelatin synthetase
MAPGWTVGWTWAKREVIWSMVGAQATEQGDCSKFKANLPHSCKRTPAVVDLLPGVPYNQQIANCCRGGVVSAYGQDPSGAVSSFQVSVGQAGTTNRTVKVPKNFTLLGPGPGYTCGPAKVVPSTVFLTADHRRKTQALMTWNVTCTYSQHLASKYPTCCVSFSSFYNDTIVPCAKCACGCEHKTCARSERDSKRLMSASGKSSAHAVTAVRGHVNRQSAAPLLQCTTHMCPVRVHWHVKLNYHDYWRAKVTVTNFNYRTNYTGWTLVAQHPNLDNITEVFSFDYKPVVSYGSINDTALFYGMKFFNDQLMEAGPYGNVQSEVLMRKDASTFTFRQGWAFPRKIYFNGDECRMPPPDSYPYLPNSAPASLVSSASVVVAFLVLLMA

SEQ ID NO: 68431 - protein, 377 aa, Triticum aestivum
  peptide (1)..(377): Ceres Seq. ID no. 14303579
LRLLVRVRVLVVLAGTCTRGHHGAAPRRARADRRRGRHALRRSGLRPAGSQREHHHQMGRSLVDARRIRRDGDDQQLPDVPADHGAGVDGGVDVGEAGGDLVHGGRAGHGAGRLLQVQGQPPALVQAHPRRRRPAPGRALQPADRQLLPRRRRLRLRPGPVRRRVLLPGQRRPGRHHQPHRQGPQELHPPRPRPRLHLRPRQGRPLHRLPHRRPPPQDPGPHDVERDVHLLAAPGVQVPDLLRLLLLLLQRHHRALRQVRVRLRAQDLRPQRAGLEAAHVGVGEEQRARGHRGARAREPAERGAAAAVHDPHVPRARPLARQAQLPRLLARQGDRHQLQLPHQLHRLDARRPAPQPRQHHRGLQLRLQARRLLRLHQ

SEQ ID NO: 68432 - DNA, 541 bp, Triticum aestivum
  misc_feature (1)..(541): Ceres Seq. ID no. 13589020
aactcccggtcccggacgacctgcttggctgcgcgcgtctcgataccacctaccccgtcgccgtcagagcctcttcccacgcgccgctcccctgtccccgcaccccccgccgccgccgccgccgctccccgggacgagatggaggtcgctgccgctgccgccgccgtcgccgtcccgaggcacaaggtgaagaagcagattaacctcttctactgcgccgagtgcgaggagctcgccctcaaggtcgccgccgcctccgacgccatccagctccagtctatcaactggaggaacttccccgacgggttcccgaacctcttcatcaacaacgcgcacgacatccgggggcaagacgttggcnttcttggcttctttaagttggccgggaatcatttttgaacagatttccgtattcttcgcgcttgcccaagctcttnatcgcctccttcacgctcgtgctgnccttcttcccaaccggtaccttcgagcgcgtcgaggaggagggcgacgtcgccaccggcttcacgctcgcgcgcatcct

SEQ ID NO: 68433 - protein, 132 aa, Triticum aestivum
  peptide (1)..(132): Ceres Seq. ID no. 13589021
  misc_feature (53)..(125): Homolog of NCBI NO: 6573738 NR Description: F20B24.13 [Arabidopsis thaliana]
  misc_feature (53)..(125): Homolog of NCBI NO: 25402614 NR Description: hypothetical protein [imported] - Arabidopsis
  misc_feature (53)..(125): Homolog of NCBI NO: 15220191 NR Description: phosphoribosyl diphosphate synthase [Arabidopsis
  misc_feature (53)..(125): Homolog of NCBI NO: 25529012 NR Description: ribose-phosphate diphosphokinase (EC 2.7.6.1)
  misc_feature (50)..(125): Homolog of NCBI NO: 34910736 NR Description: putative phosphoribosyl pyrophosphate synthase
  misc_feature (65)..(132): Homolog of NCBI NO: 4902877 NR Description: phosphoribosyl pyrophosphate synthase isozyme 3
  misc_feature (65)..(125): Homolog of NCBI NO: 4902879 NR Description: phosphoribosyl pyrophosphate synthase isozyme 4
  misc_feature (64)..(125): Homolog of NCBI NO: 15228027 NR Description: ribose phosphate pyrophosphokinase -related
  misc_feature (47)..(125): Homolog of NCBI NO: 22671730 NR Description: phosphoribosyl pyrophosphate synthetase
  misc_feature (121)..(121): Xaa is any aa, unknown or other
NSRSRTTCLAARVSIPPTPSPSEPLPTRRSPVPAPPAAAAAAPRDEMEVAAAAAAVAVPRHKVKKQINLFYCAECEELALKVAAASDAIQLQSINWRNFPDGFPNLFINNAHDIRGQDVGXLGFFKLAGNHF

SEQ ID NO: 68434 - protein, 86 aa, Triticum aestivum
  peptide (1)..(86): Ceres Seq. ID no. 13589022
  misc_feature (7)..(79): Homolog of NCBI NO: 6573738 NR Description: F20B24.13 [Arabidopsis thaliana]
  misc_feature (7)..(79): Homolog of NCBI NO: 25402614 NR Description: hypothetical protein [imported] - Arabidopsis
  misc_feature (7)..(79): Homolog of NCBI NO: 15220191 NR Description: phosphoribosyl diphosphate synthase [Arabidopsis
  misc_feature (7)..(79): Homolog of NCBI NO: 25529012 NR Description: ribose-phosphate diphosphokinase (EC 2.7.6.1)
  misc_feature (4)..(79): Homolog of NCBI NO: 34910736 NR Description: putative phosphoribosyl pyrophosphate synthase
  misc_feature (19)..(86): Homolog of NCBI NO: 4902877 NR Description: phosphoribosyl pyrophosphate synthase isozyme 3
  misc_feature (19)..(79): Homolog of NCBI NO: 4902879 NR Description: phosphoribosyl pyrophosphate synthase isozyme 4
  misc_feature (18)..(79): Homolog of NCBI NO: 15228027 NR Description: ribose phosphate pyrophosphokinase -related
  misc_feature (1)..(79): Homolog of NCBI NO: 22671730 NR Description: phosphoribosyl pyrophosphate synthetase
  misc_feature (75)..(75): Xaa is any aa, unknown or other
MEVAAAAAAVAVPRHKVKKQINLFYCAECEELALKVAAASDAIQLQSINWRNFPDGFPNLFINNAHDIRGQDVGXLGFFKLAGNHF

SEQ ID NO: 68435 - protein, 66 aa, Triticum aestivum
  peptide (1)..(66): Ceres Seq. ID no. 13589023
LPVPDDLLGCARLDTTYPVAVRASSHAPLPCPRTPRRRRRRSPGRDGGRCRCRRRRRPEAQGEEAD

SEQ ID NO: 68436 - DNA, 1410 bp, Triticum aestivum
  misc_feature (1)..(1410): Ceres Seq. ID no. 14313551
aggcttgtggtgctcccatcccatggcgccgtggctgctgctcccctccttcccgtggcctcccccgccccctcccggctcctcctctggccgcggcggcggaggcggtggaggcgacggcggagattggaagcccaacgtcgtcacggccatcgccggcgtccacctcggccgctccctccgccgtcgcctcgccggcctcctctgctcgccggaggtgcggtctcttgatgtcttaccgagaataggtgacatttggtttggaggatcacagccacttgacacacagcaccttcttgggacgctgggaaatgtgttctccacatcgtttgtttgcagttctgcttttttcggtgggaataggtcaggtgggagatacgtcggtagcggaaatttgcagcccagacggtctcatgggatcaactcgaagaagaggctgtggactaatgtccttcttgctgttaacatcctggcttatatcgctcagatagcatcgcaaggaaagcttcttatgtggggagcaaaggtcaacagcctgattgatagaggggagttttggcgtttggctacatcaacaattcttcatggaaatcttactcatcttgctttcaattgtttttctttgaattcgattggccctactgtggagctcgttactggtcctaaaagatttcttgctgtttatttcacttccgcactggcaggttcactaatgagttatcgctattgtcaatcaccttctgttggcgcatcaggggccatttttggactggttggtgcctatgctgtttatacatggaggcacagaaagcttttggggcatggaagggaaagtttagagcagatcgcacgtgtggtcatcttaaacatgggtatgggtctcctttcaaggggcattgacaactggggtcatctaggaggcttgctcgggggagtggctgcggcatggtttcttggtccagcttggcaaaatcagtatgtaccaaaggagggaagaatggtgttcaaagacagggcacccattcaccagctaataggcagtaaacgatcgcggtaacagcgtgtatgataaccgtgctcctatttttactgtgtatattagctgagaaacgtgggagaggaaggataaaagaaagtaagaaggaagatcgagacaacataccaagcaaagggagcagccgaaaaccatggctgatacctagttttgcagaagaaatcacccaccatgtccatgtgtggcggctgctgagctagctctagctcagaggagaagagcagtgcctctcgagctagttggtgtgtttggatcatttgcaactgttacacttgtgacagggtaggtcaggcgatactgacaattgtattttacgtacatgtttatttatcaagcattgctagcgcctcgttgat

SEQ ID NO: 68437 - protein, 351 aa, Triticum aestivum
  peptide (1)..(351): Ceres Seq. ID no. 14313552
  misc_feature (148)..(319): Homolog of NCBI NO: 28378276 NR Description: integral membrane protein [Lactobacillus
  misc_feature (132)..(323): Homolog of NCBI NO: 15894241 NR Description: Uncharacterized membrane protein [Clostridium
  misc_feature (144)..(319): Homolog of NCBI NO: 16079543 NR Description: similar to hypothetical proteins [Bacillus
  misc_feature (148)..(318): Homolog of NCBI NO: 23121840 NR Description: hypothetical protein [Desulfitobacterium
  misc_feature (143)..(312): Homolog of NCBI NO: 28210270 NR Description: conserved membrane protein (rhomboid family)
  misc_feature (140)..(334): Homolog of NCBI NO: 23020903 NR Description: hypothetical protein [Clostridium thermocellum
  misc_feature (169)..(320): Homolog of NCBI NO: 22972591 NR Description: hypothetical protein [Chloroflexus aurantiacus]
  misc_feature (107)..(330): Homolog of NCBI NO: 25518651 NR Description: hypothetical protein F4F7.14 - Arabidopsis
  misc_feature (107)..(345): Homolog of NCBI NO: 30689150 NR Description: membrane protein, Rhomboid family [Arabidopsis
  misc_feature (107)..(345): Homolog of NCBI NO: 11761473 NR Description: unknown protein [Arabidopsis thaliana]
GLWCSHPMAPWLLLPSFPWPPPPPPGSSSGRGGGGGGGDGGDWKPNVVTAIAGVHLGRSLRRRLAGLLCSPEVRSLDVLPRIGDIWFGGSQPLDTQHLLGTLGNVFSTSFVCSSAFFGGNRSGGRYVGSGNLQPRRSHGINSKKRLWTNVLLAVNILAYIAQIASQGKLLMWGAKVNSLIDRGEFWRLATSTILHGNLTHLAFNCFSLNSIGPTVELVTGPKRFLAVYFTSALAGSLMSYRYCQSPSVGASGAIFGLVGAYAVYTWRHRKLLGHGRESLEQIARVVILNMGMGLLSRGIDNWGHLGGLLGGVAAAWFLGPAWQNQYVPKEGRMVFKDRAPIHQLIGSKRSR

SEQ ID NO: 68438 - protein, 344 aa, Triticum aestivum
  peptide (1)..(344): Ceres Seq. ID no. 14313553
  misc_feature (141)..(312): Homolog of NCBI NO: 28378276 NR Description: integral membrane protein [Lactobacillus
  misc_feature (125)..(316): Homolog of NCBI NO: 15894241 NR Description: Uncharacterized membrane protein [Clostridium
  misc_feature (137)..(312): Homolog of NCBI NO: 16079543 NR Description: similar to hypothetical proteins [Bacillus
  misc_feature (141)..(311): Homolog of NCBI NO: 23121840 NR Description: hypothetical protein [Desulfitobacterium
  misc_feature (136)..(305): Homolog of NCBI NO: 28210270 NR Description: conserved membrane protein (rhomboid family)
  misc_feature (133)..(327): Homolog of NCBI NO: 23020903 NR Description: hypothetical protein [Clostridium thermocellum
  misc_feature (162)..(313): Homolog of NCBI NO: 22972591 NR Description: hypothetical protein [Chloroflexus aurantiacus]
  misc_feature (100)..(323): Homolog of NCBI NO: 25518651 NR Description: hypothetical protein F4F7.14 - Arabidopsis
  misc_feature (100)..(338): Homolog of NCBI NO: 30689150 NR Description: membrane protein, Rhomboid family [Arabidopsis
  misc_feature (100)..(338): Homolog of NCBI NO: 11761473 NR Description: unknown protein [Arabidopsis thaliana]
MAPWLLLPSFPWPPPPPPGSSSGRGGGGGGGDGGDWKPNVVTAIAGVHLGRSLRRRLAGLLCSPEVRSLDVLPRIGDIWFGGSQPLDTQHLLGTLGNVFSTSFVCSSAFFGGNRSGGRYVGSGNLQPRRSHGINSKKRLWTNVLLAVNILAYIAQIASQGKLLMWGAKVNSLIDRGEFWRLATSTILHGNLTHLAFNCFSLNSIGPTVELVTGPKRFLAVYFTSALAGSLMSYRYCQSPSVGASGAIFGLVGAYAVYTWRHRKLLGHGRESLEQIARVVILNMGMGLLSRGIDNWGHLGGLLGGVAAAWFLGPAWQNQYVPKEGRMVFKDRAPIHQLIGSKRSR

SEQ ID NO: 68439 - protein, 181 aa, Triticum aestivum
  peptide (1)..(181): Ceres Seq. ID no. 14313554
  misc_feature (1)..(149): Homolog of NCBI NO: 28378276 NR Description: integral membrane protein [Lactobacillus
  misc_feature (1)..(153): Homolog of NCBI NO: 15894241 NR Description: Uncharacterized membrane protein [Clostridium
  misc_feature (1)..(149): Homolog of NCBI NO: 16079543 NR Description: similar to hypothetical proteins [Bacillus
  misc_feature (1)..(148): Homolog of NCBI NO: 23121840 NR Description: hypothetical protein [Desulfitobacterium
  misc_feature (1)..(142): Homolog of NCBI NO: 28210270 NR Description: conserved membrane protein (rhomboid family)
  misc_feature (1)..(164): Homolog of NCBI NO: 23020903 NR Description: hypothetical protein [Clostridium thermocellum
  misc_feature (1)..(150): Homolog of NCBI NO: 22972591 NR Description: hypothetical protein [Chloroflexus aurantiacus]
  misc_feature (1)..(160): Homolog of NCBI NO: 25518651 NR Description: hypothetical protein F4F7.14 - Arabidopsis
  misc_feature (1)..(175): Homolog of NCBI NO: 30689150 NR Description: membrane protein, Rhomboid family [Arabidopsis
  misc_feature (1)..(175): Homolog of NCBI NO: 11761473 NR Description: unknown protein [Arabidopsis thaliana]
MWGAKVNSLIDRGEFWRLATSTILHGNLTHLAFNCFSLNSIGPTVELVTGPKRFLAVYFTSALAGSLMSYRYCQSPSVGASGAIFGLVGAYAVYTWRHRKLLGHGRESLEQIARVVILNMGMGLLSRGIDNWGHLGGLLGGVAAAWFLGPAWQNQYVPKEGRMVFKDRAPIHQLIGSKRSR

SEQ ID NO: 68440 - DNA, 1425 bp, Triticum aestivum
  misc_feature (1)..(1425): Ceres Seq. ID no. 13662335
ctacttcaaatagacttggaatgggccattagtacgagttggtgtggtgtgcatcgcgatctatggacatggacatggaggagcctccccacctgttcctgtgccccatctccatggagctcatgcaggagcccgtcacggtgtccaccggcgtcacctacgaccgccgcagcatcgagcgctggctcttctcgtacggccgggccacctgcccggccaccatgcagccgctcgccaaccttgacctcaccccgaaccacaccctcgcgcgcgtcatctcctcctggctcgaccgcggctccccttcctcctcctcctcgtcttcgtcgtcgccgtccacgtcgtcgctgtcgagtccggtccacgagctggggacgccgctgacgaggatgctggaggaggagcggctgcggtcggcgctgggcgacctcgaggagacgccgttcaaggtgaccgcgctcaagagcatgcggagctgcatggcgggcgacgtggccatgcagatcatcttcgtcgcctcgggcggcgttgaggcggtcggccgcgtgatggcgcaggcgctggccgagagcggcgcgggaggcgacttctccgcgttcacggtgtgcgaggaggccgccgcggtgctcgccgcgctcccgctctccgacaaggcgtcggtggggctcgttcttgcgccggagtgcctgaggcccgtcatggcgttgctccagcgcggcagcgcggaggcgaggttgcacgccatggacatcctcaccaagatctccagtgccggcgccggtgaccactggactgccggcatcgacgtcgacgacgtgctcaagtccctcctcgagctcctgtctgacgaggtctccgcgcgcctcagctcgcgcgcgctcgacgtgctgctggacgtcgtggagcggtcgccgagcgggcgcgccaaggccgtggaggtcggcgcggtgcacgtcctcgtcgagctcctcgtcgtggacgccgacgaccgccacgtcgccgagcggatactgctgcttctcaagcggctgtgcaagtgccccgagggccgcctcgccttcgccgagcacgacctgtcggtcgcggccgtggcgaggacaatgctgagggtgtcggatctggccacgcagctggccgtcaaggtgctgtggctcgtgtccatggtggcgcagtcggagaaggtgctcgaggacatggtgctcaccggcgccgtggcgaagctgctggggctgctgcacgtcgagagcgcgccgtccacgaagcaaaagacggtgaggatggtgaggatccacggcgtgttctggaggcagtacccttgcttccccaccgacctcaaggattacttgaggttgctcgattgatttgttcattagttccagataatctgcaagaaaagtgaacaaaaaccgtgaattttcttatagt

SEQ ID NO: 68441 - protein, 432 aa, Triticum aestivum
  peptide (1)..(432): Ceres Seq. ID no. 13662336
  misc_feature (7)..(75): Pfam Name: U-box domain Pfam Description: U-box domain
  misc_feature (176)..(420): Homolog of NCBI NO: 18402223 NR Description: expressed protein [Arabidopsis thaliana]
  misc_feature (2)..(429): Homolog of NCBI NO: 30013683 NR Description: Avr9/Cf-9 rapidly elicited protein 74 [Nicotiana
  misc_feature (1)..(153): Homolog of NCBI NO: 21741126 NR Description: OSJNBa0070M12.4 [Oryza sativa (japonica
  misc_feature (132)..(425): Homolog of NCBI NO: 21741126 NR Description: OSJNBa0070M12.4 [Oryza sativa (japonica
  misc_feature (3)..(426): Homolog of NCBI NO: 15231222 NR Description: expressed protein [Arabidopsis thaliana]
  misc_feature (1)..(75): Homolog of NCBI NO: 30686609 NR Description: expressed protein [Arabidopsis thaliana]
  misc_feature (1)..(75): Homolog of NCBI NO: 25408431 NR Description: hypothetical protein At2g35930 [imported] -
  misc_feature (106)..(424): Homolog of NCBI NO: 30686609 NR Description: expressed protein [Arabidopsis thaliana]
  misc_feature (106)..(424): Homolog of NCBI NO: 25408431 NR Description: hypothetical protein At2g35930 [imported] -
  misc_feature (7)..(432): Homolog of NCBI NO: 38346713 NR Description: OSJNBa0086O06.11 [Oryza sativa (japonica
MDMDMEEPPHLFLCPISMELMQEPVTVSTGVTYDRRSIERWLFSYGRATCPATMQPLANLDLTPNHTLARVISSWLDRGSPSSSSSSSSSPSTSSLSSPVHELGTPLTRMLEEERLRSALGDLEETPFKVTALKSMRSCMAGDVAMQIIFVASGGVEAVGRVMAQALAESGAGGDFSAFTVCEEAAAVLAALPLSDKASVGLVLAPECLRPVMALLQRGSAEARLHAMDILTKISSAGAGDHWTAGIDVDDVLKSLLELLSDEVSARLSSRALDVLLDVVERSPSGRAKAVEVGAVHVLVELLVVDADDRHVAERILLLLKRLCKCPEGRLAFAEHDLSVAAVARTMLRVSDLATQLAVKVLWLVSMVAQSEKVLEDMVLTGAVAKLLGLLHVESAPSTKQKTVRMVRIHGVFWRQYPCFPTDLKDYLRLLD

SEQ ID NO: 68442 - protein, 430 aa, Triticum aestivum
  peptide (1)..(430): Ceres Seq. ID no. 13662337
  misc_feature (5)..(73): Pfam Name: U-box domain Pfam Description: U-box domain
  misc_feature (174)..(418): Homolog of NCBI NO: 18402223 NR Description: expressed protein [Arabidopsis thaliana]
  misc_feature (1)..(427): Homolog of NCBI NO: 30013683 NR Description: Avr9/Cf-9 rapidly elicited protein 74 [Nicotiana
  misc_feature (1)..(151): Homolog of NCBI NO: 21741126 NR Description: OSJNBa0070M12.4 [Oryza sativa (japonica
  misc_feature (130)..(423): Homolog of NCBI NO: 21741126 NR Description: OSJNBa0070M12.4 [Oryza sativa (japonica
  misc_feature (1)..(424): Homolog of NCBI NO: 15231222 NR Description: expressed protein [Arabidopsis thaliana]
  misc_feature (1)..(73): Homolog of NCBI NO: 30686609 NR Description: expressed protein [Arabidopsis thaliana]
  misc_feature (1)..(73): Homolog of NCBI NO: 25408431 NR Description: hypothetical protein At2g35930 [imported] -
  misc_feature (104)..(422): Homolog of NCBI NO: 30686609 NR Description: expressed protein [Arabidopsis thaliana]
  misc_feature (104)..(422): Homolog of NCBI NO: 25408431 NR Description: hypothetical protein At2g35930 [imported] -
  misc_feature (5)..(430): Homolog of NCBI NO: 38346713 NR Description: OSJNBa0086O06.11 [Oryza sativa (japonica
MDMEEPPHLFLCPISMELMQEPVTVSTGVTYDRRSIERWLFSYGRATCPATMQPLANLDLTPNHTLARVISSWLDRGSPSSSSSSSSSPSTSSLSSPVHELGTPLTRMLEEERLRSALGDLEETPFKVTALKSMRSCMAGDVAMQIIFVASGGVEAVGRVMAQALAESGAGGDFSAFTVCEEAAAVLAALPLSDKASVGLVLAPECLRPVMALLQRGSAEARLHAMDILTKISSAGAGDHWTAGIDVDDVLKSLLELLSDEVSARLSSRALDVLLDVVERSPSGRAKAVEVGAVHVLVELLVVDADDRHVAERILLLLKRLCKCPEGRLAFAEHDLSVAAVARTMLRVSDLATQLAVKVLWLVSMVAQSEKVLEDMVLTGAVAKLLGLLHVESAPSTKQKTVRMVRIHGVFWRQYPCFPTDLKDYLRLLD

SEQ ID NO: 68443 - protein, 428 aa, Triticum aestivum
  peptide (1)..(428): Ceres Seq. ID no. 13662338
  misc_feature (3)..(71): Pfam Name: U-box domain Pfam Description: U-box domain
  misc_feature (172)..(416): Homolog of NCBI NO: 18402223 NR Description: expressed protein [Arabidopsis thaliana]
  misc_feature (1)..(425): Homolog of NCBI NO: 30013683 NR Description: Avr9/Cf-9 rapidly elicited protein 74 [Nicotiana
  misc_feature (1)..(149): Homolog of NCBI NO: 21741126 NR Description: OSJNBa0070M12.4 [Oryza sativa (japonica
  misc_feature (128)..(421): Homolog of NCBI NO: 21741126 NR Description: OSJNBa0070M12.4 [Oryza sativa (japonica
  misc_feature (1)..(422): Homolog of NCBI NO: 15231222 NR Description: expressed protein [Arabidopsis thaliana]
  misc_feature (1)..(71): Homolog of NCBI NO: 30686609 NR Description: expressed protein [Arabidopsis thaliana]
  misc_feature (1)..(71): Homolog of NCBI NO: 25408431 NR Description: hypothetical protein At2g35930 [imported] -
  misc_feature (102)..(420): Homolog of NCBI NO: 30686609 NR Description: expressed protein [Arabidopsis thaliana]
  misc_feature (102)..(420): Homolog of NCBI NO: 25408431 NR Description: hypothetical protein At2g35930 [imported] -
  misc_feature (3)..(428): Homolog of NCBI NO: 38346713 NR Description: OSJNBa0086O06.11 [Oryza sativa (japonica
MEEPPHLFLCPISMELMQEPVTVSTGVTYDRRSIERWLFSYGRATCPATMQPLANLDLTPNHTLARVISSWLDRGSPSSSSSSSSSPSTSSLSSPVHELGTPLTRMLEEERLRSALGDLEETPFKVTALKSMRSCMAGDVAMQIIFVASGGVEAVGRVMAQALAESGAGGDFSAFTVCEEAAAVLAALPLSDKASVGLVLAPECLRPVMALLQRGSAEARLHAMDILTKISSAGAGDHWTAGIDVDDVLKSLLELLSDEVSARLSSRALDVLLDVVERSPSGRAKAVEVGAVHVLVELLVVDADDRHVAERILLLLKRLCKCPEGRLAFAEHDLSVAAVARTMLRVSDLATQLAVKVLWLVSMVAQSEKVLEDMVLTGAVAKLLGLLHVESAPSTKQKTVRMVRIHGVFWRQYPCFPTDLKDYLRLLD

SEQ ID NO: 68444 - DNA, 1559 bp, Triticum aestivum
  misc_feature (1)..(1559): Ceres Seq. ID no. 13654557
agcctctccccccgccgccgcccaagccgctaccctttcctcctccccgccgccgccgccgccatggccaccaccgcgcgcccgctcgtctccgtcaaggctctggacggggacatggcaaccgacgcggccggcgtcccgatgccgcacgtcatgaaggcgccgatccgccccgacgtcatcaccttcgtccacaggctcgtctcctgcaacagccgccagccctacgccgtctcccgcaaggccggtcaccagacctcggccgagtcctggggcacgggtcgcgccgtctcgcgtatcccgcgtgtcggcggtggcggtacccaccgcgccggccagggagccttcggcaacatgtgccgtggcggacgcatgttcgcgcccacccggatctggcgcaagtggcaccgtcgcgtcaacgtccgcctccgccgcgtcgccgtcgcctccgccctcgccgccaccgccgtcccggccatcgtcaccgcccgcggccaccgcatcgagtccgtccccgagttcccgctcgtcgtctccgactcggccgagggcatcgagaagaccgcccaggccatcaaggtcctcaagcagctgggcgcctacgccgacgccgagaaggccaagctgtccgtgggcatccgccccggcaagggtaagatgcgcaaccgcaggtacatcaaccgcaagggccccctcatcgtctacggcaccgagggctccaagatcgtcaaggccttccgcaacctccctggtgtggatgttgccaacgtcgagcgcctcaacttgctcgaccttgcccctggtggccaccttggccggtttgtgatctggaccgagtctgccttcaagaagctggacgaggtgtacggctcctttgaggcgtcttcctccaagaagaagggcttcgttctccccaggcccaagatgaccaatgctgaccttggccgcctcatcaactctgatgaggtccagtctgtggtgaagcccatcaacaaggaggtcaagcgcagggaggccaggaagaaccctctgaagaacgctgctgccgtcctcaagctgaacccctattttggaactgcccgcaggatggcagttcttgctgaggcagcccgtgttaaggccaggaaggagaagatcaactccaagaggaccaagctcagcgcggaggaggcatctaagatcaaggctgctgggaaggcctggtaccagaccatgatctctgacagcgactacactgagttcgacgtcttctccaagtggctcggcgtcagccagtgatcatctagttgtagtagcagtctatcgtcctaccttaagagaccctaaagtatgattttgtgtcatgttatcgtttatctggagtctgagacatcttgctgttttggtagctgtttatctcaagtgttttatctatggacgcattttgggagacatgttatatggcatgctttatcgtcgtcgagttcttagttcagattttgagtcgtgtttttcatatatactttgttatgaatgcgaaataatttttggcattgtgaagttttgtggttggcataccc

SEQ ID NO: 68445 - protein, 425 aa, Triticum aestivum
  peptide (1)..(425): Ceres Seq. ID no. 13654558
  misc_feature (46)..(288): Pfam Name: Ribosomal protein L4/L1 family Pfam Description: Ribosomal protein L4/L1 family
  misc_feature (19)..(395): Homolog of NCBI NO: 27694877 NR Description: Similar to ribosomal protein [Xenopus laevis]
  misc_feature (19)..(395): Homolog of NCBI NO: 32822849 NR Description: Ribosomal protein [Xenopus laevis]
  misc_feature (119)..(425): Homolog of NCBI NO: 13605831 NR Description: AT5g02870/F9G14_180 [Arabidopsis thaliana]
  misc_feature (23)..(425): Homolog of NCBI NO: 26450328 NR Description: putative 60S ribosomal protein [Arabidopsis
  misc_feature (23)..(425): Homolog of NCBI NO: 21593543 NR Description: 60S ribosomal protein L4-B (L1) [Arabidopsis
  misc_feature (23)..(425): Homolog of NCBI NO: 15242558 NR Description: 60S ribosomal protein L4/L1 (RPL4D) [Arabidopsis
  misc_feature (20)..(425): Homolog of NCBI NO: 17367847 NR Description: 60S ribosomal protein L4 (L1)
  misc_feature (23)..(425): Homolog of NCBI NO: 15232723 NR Description: 60S ribosomal protein L4/L1 (RPL4A) [Arabidopsis
  misc_feature (22)..(425): Homolog of NCBI NO: 34393487 NR Description: putative 60S ribosomal protein L4/L1
  misc_feature (22)..(425): Homolog of NCBI NO: 34897236 NR Description: putative 60S ribosomal protein L1
SLSPRRRPSRYPFLLPAAAAAMATTARPLVSVKALDGDMATDAAGVPMPHVMKAPIRPDVITFVHRLVSCNSRQPYAVSRKAGHQTSAESWGTGRAVSRIPRVGGGGTHRAGQGAFGNMCRGGRMFAPTRIWRKWHRRVNVRLRRVAVASALAATAVPAIVTARGHRIESVPEFPLVVSDSAEGIEKTAQAIKVLKQLGAYADAEKAKLSVGIRPGKGKMRNRRYINRKGPLIVYGTEGSKIVKAFRNLPGVDVANVERLNLLDLAPGGHLGRFVIWTESAFKKLDEVYGSFEASSSKKKGFVLPRPKMTNADLGRLINSDEVQSVVKPINKEVKRREARKNPLKNAAAVLKLNPYFGTARRMAVLAEAARVKARKEKINSKRTKLSAEEASKIKAAGKAWYQTMISDSDYTEFDVFSKWLGVSQ

SEQ ID NO: 68446 - protein, 404 aa, Triticum aestivum
  peptide (1)..(404): Ceres Seq. ID no. 13654559
  misc_feature (25)..(267): Pfam Name: Ribosomal protein L4/L1 family Pfam Description: Ribosomal protein L4/L1 family
  misc_feature (1)..(374): Homolog of NCBI NO: 27694877 NR Description: Similar to ribosomal protein [Xenopus laevis]
  misc_feature (1)..(374): Homolog of NCBI NO: 32822849 NR Description: Ribosomal protein [Xenopus laevis]
  misc_feature (98)..(404): Homolog of NCBI NO: 13605831 NR Description: AT5g02870/F9G14_180 [Arabidopsis thaliana]
  misc_feature (2)..(404): Homolog of NCBI NO: 26450328 NR Description: putative 60S ribosomal protein [Arabidopsis
  misc_feature (2)..(404): Homolog of NCBI NO: 21593543 NR Description: 60S ribosomal protein L4-B (L1) [Arabidopsis
  misc_feature (2)..(404): Homolog of NCBI NO: 15242558 NR Description: 60S ribosomal protein L4/L1 (RPL4D) [Arabidopsis
  misc_feature (1)..(404): Homolog of NCBI NO: 17367847 NR Description: 60S ribosomal protein L4 (L1)
  misc_feature (2)..(404): Homolog of NCBI NO: 15232723 NR Description: 60S ribosomal protein L4/L1 (RPL4A) [Arabidopsis
  misc_feature (1)..(404): Homolog of NCBI NO: 34393487 NR Description: putative 60S ribosomal protein L4/L1
  misc_feature (1)..(404): Homolog of NCBI NO: 34897236 NR Description: putative 60S ribosomal protein L1
MATTARPLVSVKALDGDMATDAAGVPMPHVMKAPIRPDVITFVHRLVSCNSRQPYAVSRKAGHQTSAESWGTGRAVSRIPRVGGGGTHRAGQGAFGNMCRGGRMFAPTRIWRKWHRRVNVRLRRVAVASALAATAVPAIVTARGHRIESVPEFPLVVSDSAEGIEKTAQAIKVLKQLGAYADAEKAKLSVGIRPGKGKMRNRRYINRKGPLIVYGTEGSKIVKAFRNLPGVDVANVERLNLLDLAPGGHLGRFVIWTESAFKKLDEVYGSFEASSSKKKGFVLPRPKMTNADLGRLINSDEVQSVVKPINKEVKRREARKNPLKNAAAVLKLNPYFGTARRMAVLAEAARVKARKEKINSKRTKLSAEEASKIKAAGKAWYQTMISDSDYTEFDVFSKWLGVSQ

SEQ ID NO: 68447 - protein, 387 aa, Triticum aestivum
  peptide (1)..(387): Ceres Seq. ID no. 13654560
  misc_feature (8)..(250): Pfam Name: Ribosomal protein L4/L1 family Pfam Description: Ribosomal protein L4/L1 family
  misc_feature (1)..(357): Homolog of NCBI NO: 27694877 NR Description: Similar to ribosomal protein [Xenopus laevis]
  misc_feature (1)..(357): Homolog of NCBI NO: 32822849 NR Description: Ribosomal protein [Xenopus laevis]
  misc_feature (81)..(387): Homolog of NCBI NO: 13605831 NR Description: AT5g02870/F9G14_180 [Arabidopsis thaliana]
  misc_feature (1)..(387): Homolog of NCBI NO: 26450328 NR Description: putative 60S ribosomal protein [Arabidopsis
  misc_feature (1)..(387): Homolog of NCBI NO: 21593543 NR Description: 60S ribosomal protein L4-B (L1) [Arabidopsis
  misc_feature (1)..(387): Homolog of NCBI NO: 15242558 NR Description: 60S ribosomal protein L4/L1 (RPL4D) [Arabidopsis
  misc_feature (1)..(387): Homolog of NCBI NO: 17367847 NR Description: 60S ribosomal protein L4 (L1)
  misc_feature (1)..(387): Homolog of NCBI NO: 15232723 NR Description: 60S ribosomal protein L4/L1 (RPL4A) [Arabidopsis
  misc_feature (1)..(387): Homolog of NCBI NO: 34393487 NR Description: putative 60S ribosomal protein L4/L1
  misc_feature (1)..(387): Homolog of NCBI NO: 34897236 NR Description: putative 60S ribosomal protein L1
MATDAAGVPMPHVMKAPIRPDVITFVHRLVSCNSRQPYAVSRKAGHQTSAESWGTGRAVSRIPRVGGGGTHRAGQGAFGNMCRGGRMFAPTRIWRKWHRRVNVRLRRVAVASALAATAVPAIVTARGHRIESVPEFPLVVSDSAEGIEKTAQAIKVLKQLGAYADAEKAKLSVGIRPGKGKMRNRRYINRKGPLIVYGTEGSKIVKAFRNLPGVDVANVERLNLLDLAPGGHLGRFVIWTESAFKKLDEVYGSFEASSSKKKGFVLPRPKMTNADLGRLINSDEVQSVVKPINKEVKRREARKNPLKNAAAVLKLNPYFGTARRMAVLAEAARVKARKEKINSKRTKLSAEEASKIKAAGKAWYQTMISDSDYTEFDVFSKWLGVSQ

SEQ ID NO: 68448 - DNA, 2074 bp, Triticum aestivum
  misc_feature (1)..(2074): Ceres Seq. ID no. 13598312
aaccgcaaccgcaaccgctccgcccggcatctcgcctcgtcgcacttccctccagccccacacccagccagcacccggagacgagacgtgtacgtgcgcgtagcaccaacccgagcccagcggtgcgccgcagaaacaggcaggcagcggtgcgcggcgggacggaaggccagggtgacgtgcgggcgcgggccgggccagaggcctaagtagcgagcagcgccgatcgacggaccgaccggtcatgccgagcgcgctggggagcggcttcgccgggtcggtgaggctcaagtacgtgaagctggggtaccagtacctggtgaaccacttcctgacgctgctgctggtgccggtcatggcggccacggcgctcgagctggcgcgcctcggccccggcgagctgctcgcgctctggcgcgccctcgacctcgacctcgtgcacatcctctgctccgccttcctcgtcgtcttcgtcgccaccgtctacttcatgtcccgccccaggcccgtcttcctcgtcgactactgctgctacaagccctcccccagcttccgggtgcccttcaccaccttcatggagcacatcaagctcatctccaacaacgacaagagcctgcgcttccagacccgcatcctcgagcgctccgggctcggcgaggagacctgcctcccgccggccaaccactacatcccgcccaaccccagcatggaggcgtcgcgcgccgaggcgcagctcgtcatcttcaacgccatcgacgacctcgtccgccgcacgggcctcaagcccaaggacatcgacatcctcgtcgtcaactgcagcctcttctccccgacgccctccctctccgccatgatcatcaacaagtacaagctccgcagcaacatccgcagcttcaacctctccggcatgggatgcagcgccgggctcatctccatcgacctcgcgcgcgacatgctccaggtgcatcccaactcgaacgctctggtgatctcgacggagatcatcacgcccaacttctaccacgggagccggcgggacatgctgctgcccaactgcctgttccggatgggcgcggcggcgatcctgctgtccaaccggcggcgggaggcgcggcgcgccaagtacaggctggtgcacgtggtgcgcacgcacaagggcgcggacgaccgcgcgtaccggtgcgtgtacgaggaggaggacgacgaggggcactcgggcatctcgctctccaaggagctcatggccatcgccggcgaggcgctcaagtccaacatcaccaccatgggcccgctggtgctgcccatgtcggagcagctgctcttcttcttccgcctggtggggcgcaaggtgatcaacagcaagtggaagccctacatcccggacttcaagctggcgttcgagcacttctgcatccacgccggcggccgcgccgtcatcgacgagctgcagaagaacctggagctgtcgccgcggcacgtggaggcgtcgcgcatgacgctgcaccggttcggcaacacctccagcagctcgctctggtacgagctcgcctacatcgaggccaagggccgcatgcgcaagggcgaccgcgtgtggcagatcggcttcggcagcggcttcaagtgcaacagcgccgtctggaagtgcctccgcaccgtcaagacgcccaccgacgggccctgggacgactgcatccagcgctaccccgtccacatcccggaggtcgtcaagctgtgaggcgtcatcgacgacgagctcggctcgccgccggcggccgtgccctgcatctgcatgtacgtgccccccaaaacctggagctctgtgggggccccgaccaaattaaaccaatctctttctcctttgctctctttcttccttttctttttctagtattttcttcgccataaattaaattacatggatactcgtgggatgcgtcacacaaggaggggatcattcacagggagattaatcggctacccgaatatttatattggacgacgctaacgtgggcgtggttgttaaattgtttgtgtcacgaaattccactgcagtgaaagggataattacattggc

SEQ ID NO: 68449 - protein, 496 aa, Triticum aestivum
  peptide (1)..(496): Ceres Seq. ID no. 15222296
  misc_feature (329)..(469): Pfam Name: Chalcone and stilbene synthases, C-terminal domain Pfam Description: Chalcone and stilbene synthases, C-terminal
  misc_feature (9)..(491): Homolog of NCBI NO: 29417540 NR Description: beta-ketoacyl-CoA-synthase [Marchantia polymorpha]
  misc_feature (1)..(496): Homolog of NCBI NO: 9714501 NR Description: putative fatty acid elongase [Zea mays]
  misc_feature (9)..(490): Homolog of NCBI NO: 15226724 NR Description: very-long-chain fatty acid condensing enzyme
  misc_feature (1)..(488): Homolog of NCBI NO: 15223556 NR Description: very-long-chain fatty acid condensing enzyme
  misc_feature (7)..(496): Homolog of NCBI NO: 28393607 NR Description: putative fatty acid condensing enzyme CUT1
  misc_feature (7)..(496): Homolog of NCBI NO: 21618184 NR Description: fatty acid condensing enzyme CUT1, putative
  misc_feature (7)..(496): Homolog of NCBI NO: 15222592 NR Description: very-long-chain fatty acid condensing enzyme
  misc_feature (9)..(496): Homolog of NCBI NO: 21593111 NR Description: very-long-chain fatty acid condensing enzyme CUT1
  misc_feature (1)..(496): Homolog of NCBI NO: 15221431 NR Description: very-long-chain fatty acid condensing enzyme
  misc_feature (1)..(496): Homolog of NCBI NO: 17979464 NR Description: At1g68530/T26J14_10 [Arabidopsis thaliana]
MPSALGSGFAGSVRLKYVKLGYQYLVNHFLTLLLVPVMAATALELARLGPGELLALWRALDLDLVHILCSAFLVVFVATVYFMSRPRPVFLVDYCCYKPSPSFRVPFTTFMEHIKLISNNDKSLRFQTRILERSGLGEETCLPPANHYIPPNPSMEASRAEAQLVIFNAIDDLVRRTGLKPKDIDILVVNCSLFSPTPSLSAMIINKYKLRSNIRSFNLSGMGCSAGLISIDLARDMLQVHPNSNALVISTEIITPNFYHGSRRDMLLPNCLFRMGAAAILLSNRRREARRAKYRLVHVVRTHKGADDRAYRCVYEEEDDEGHSGISLSKELMAIAGEALKSNITTMGPLVLPMSEQLLFFFRLVGRKVINSKWKPYIPDFKLAFEHFCIHAGGRAVIDELQKNLELSPRHVEASRMTLHRFGNTSSSSLWYELAYIEAKGRMRKGDRVWQIGFGSGFKCNSAVWKCLRTVKTPTDGPWDDCIQRYPVHIPEVVKL

SEQ ID NO: 68450 - protein, 459 aa, Triticum aestivum
  peptide (1)..(459): Ceres Seq. ID no. 15222297
  misc_feature (292)..(432): Pfam Name: Chalcone and stilbene synthases, C-terminal domain Pfam Description: Chalcone and stilbene synthases, C-terminal
  misc_feature (1)..(454): Homolog of NCBI NO: 29417540 NR Description: beta-ketoacyl-CoA-synthase [Marchantia polymorpha]
  misc_feature (1)..(459): Homolog of NCBI NO: 9714501 NR Description: putative fatty acid elongase [Zea mays]
  misc_feature (1)..(453): Homolog of NCBI NO: 15226724 NR Description: very-long-chain fatty acid condensing enzyme
  misc_feature (1)..(451): Homolog of NCBI NO: 15223556 NR Description: very-long-chain fatty acid condensing enzyme
  misc_feature (1)..(459): Homolog of NCBI NO: 28393607 NR Description: putative fatty acid condensing enzyme CUT1
  misc_feature (1)..(459): Homolog of NCBI NO: 21618184 NR Description: fatty acid condensing enzyme CUT1, putative
  misc_feature (1)..(459): Homolog of NCBI NO: 15222592 NR Description: very-long-chain fatty acid condensing enzyme
  misc_feature (1)..(459): Homolog of NCBI NO: 21593111 NR Description: very-long-chain fatty acid condensing enzyme CUT1
  misc_feature (1)..(459): Homolog of NCBI NO: 15221431 NR Description: very-long-chain fatty acid condensing enzyme
  misc_feature (1)..(459): Homolog of NCBI NO: 17979464 NR Description: At1g68530/T26J14_10 [Arabidopsis thaliana]
MAATALELARLGPGELLALWRALDLDLVHILCSAFLVVFVATVYFMSRPRPVFLVDYCCYKPSPSFRVPFTTFMEHIKLISNNDKSLRFQTRILERSGLGEETCLPPANHYIPPNPSMEASRAEAQLVIFNAIDDLVRRTGLKPKDIDILVVNCSLFSPTPSLSAMIINKYKLRSNIRSFNLSGMGCSAGLISIDLARDMLQVHPNSNALVISTEIITPNFYHGSRRDMLLPNCLFRMGAAAILLSNRRREARRAKYRLVHVVRTHKGADDRAYRCVYEEEDDEGHSGISLSKELMAIAGEALKSNITTMGPLVLPMSEQLLFFFRLVGRKVINSKWKPYIPDFKLAFEHFCIHAGGRAVIDELQKNLELSPRHVEASRMTLHRFGNTSSSSLWYELAYIEAKGRMRKGDRVWQIGFGSGFKCNSAVWKCLRTVKTPTDGPWDDCIQRYPVHIPEVVKL

SEQ ID NO: 68451 - protein, 414 aa, Triticum aestivum
  peptide (1)..(414): Ceres Seq. ID no. 15222298
  misc_feature (247)..(387): Pfam Name: Chalcone and stilbene synthases, C-terminal domain Pfam Description: Chalcone and stilbene synthases, C-terminal
  misc_feature (1)..(409): Homolog of NCBI NO: 29417540 NR Description: beta-ketoacyl-CoA-synthase [Marchantia polymorpha]
  misc_feature (1)..(414): Homolog of NCBI NO: 9714501 NR Description: putative fatty acid elongase [Zea mays]
  misc_feature (1)..(408): Homolog of NCBI NO: 15226724 NR Description: very-long-chain fatty acid condensing enzyme
  misc_feature (1)..(406): Homolog of NCBI NO: 15223556 NR Description: very-long-chain fatty acid condensing enzyme
  misc_feature (1)..(414): Homolog of NCBI NO: 28393607 NR Description: putative fatty acid condensing enzyme CUT1
  misc_feature (1)..(414): Homolog of NCBI NO: 21618184 NR Description: fatty acid condensing enzyme CUT1, putative
  misc_feature (1)..(414): Homolog of NCBI NO: 15222592 NR Description: very-long-chain fatty acid condensing enzyme
  misc_feature (1)..(414): Homolog of NCBI NO: 21593111 NR Description: very-long-chain fatty acid condensing enzyme CUT1
  misc_feature (1)..(414): Homolog of NCBI NO: 15221431 NR Description: very-long-chain fatty acid condensing enzyme
  misc_feature (1)..(414): Homolog of NCBI NO: 17979464 NR Description: At1g68530/T26J14_10 [Arabidopsis thaliana]
MSRPRPVFLVDYCCYKPSPSFRVPFTTFMEHIKLISNNDKSLRFQTRILERSGLGEETCLPPANHYIPPNPSMEASRAEAQLVIFNAIDDLVRRTGLKPKDIDILVVNCSLFSPTPSLSAMIINKYKLRSNIRSFNLSGMGCSAGLISIDLARDMLQVHPNSNALVISTEIITPNFYHGSRRDMLLPNCLFRMGAAAILLSNRRREARRAKYRLVHVVRTHKGADDRAYRCVYEEEDDEGHSGISLSKELMAIAGEALKSNITTMGPLVLPMSEQLLFFFRLVGRKVINSKWKPYIPDFKLAFEHFCIHAGGRAVIDELQKNLELSPRHVEASRMTLHRFGNTSSSSLWYELAYIEAKGRMRKGDRVWQIGFGSGFKCNSAVWKCLRTVKTPTDGPWDDCIQRYPVHIPEVVKL

SEQ ID NO: 68452 - DNA, 1874 bp, Triticum aestivum
  misc_feature (1)..(1874): Ceres Seq. ID no. 13596189
cctaatcgaaaaccacccacgcgcgcaccagccaccccccactatggcggcggcggcggcggcgtctccagccaccgcgccctcctccttcccctccgcccgcgcccacaagccgacgctcctctccctccgcgtctcgaccaagctcagagcccccgcggccgcggcggcatcggcggcatccgacccggccccggccttcaggtccgtcacggccttcgcgccggcgacggtggcgaacctcggcccgggcttcgacttcctgggctgcgcggtcgccgacgcctcgctctccctcggcgacacagtcacggccaccctcgacccctcgctgcccgccggcgcggtcgccatctcctgcatcacctccccgtcccgcccccgcctcgccgaccgcctctcccgcgacccgctccgcaactgcgcgggcatcgccgccgtcgccgcgctgcgggccctcggcgtgcgctcgcacggcgtctccctcagcctcgccaagggcctgccgctcggctccgggctcggctcctcggccgcgtccgcggccgccgccgccaaggccgtcgacgcgctcttcgggtccctgctcccccgcgacggcctcgtgctcgccggcctcgagtccgagaaggccgtcagcggcttccacgccgacaacatcgcgccggccatcctcggcggattcgtcatggtgcggagctacgacccgttctgcctcgtgtcgctgccctgcccgccggcgctccgcctctgcttcgtgctcgtcaccccggactttgaggcgccgacgagcaagatgcgcgccgcgctgccgaagaacatcgccatgggccaccacgtgcgcaactccagccaggccgccgcgctcgtcgccggcgtgctgcagggcgacgccgccctcatcggctccgcgatgtcgtccgacttcattgtcgagcccaccagggcgcccctgatacctggcatggccgcggtgaaggccgccgctcttgaagccggagcgctggggtgtaccatcagcggagcaggcccgaccgcagtagctgtcattgagggagaggagaagggggaggaggtcgcccggaggatgatcgacgccttcctgtcggtcggcaagctgaaagcgaccgccaccgtcgctcagctcgacagagccggcgccagggtcatctccacctcaaatttggagtagaagctagagagactttggtgctccgttcccattcgtgtatcggcctgacggcaagggggaagggagatgcggtataacgttgggttgcatctaggcgggggcaaggatggacatgaagacggtggaccaggcggtgagggcgagggcggcgacgaggtaggtccagaggaaaacgaccgagcactcctcctgggcgacgtcgtagagctgcgccatggtgctgatgctcatcgcgggcggcagcgcgaactggagcatgagcacatactggtacagcgggtccggcggcaggaagccgagctccctcgccgtcctcaccaccacgatcccgaccaccggcaggatcatgtagcgcacgcagacgatggccgcgatcacccaccgcgacatggtcgtcttgcgcaggcctgccagaccattattcagtttcagatggtctgacacagacagacagacagacagagattcagttgttgtttacctttggtgaggttccctccaaggatgagaatcacacaggggatggtgccatctctgcaacaaacaatggcataacatttcagtcagtagatgcactgcatgtgtatgccgtgttgaactgtaaaatgaattggacagcaaaaaaaaaaaaaaaaaagcttatcgataccgyckacctckagggrgsscccgagtacccaat

SEQ ID NO: 68453 - protein, 396 aa, Triticum aestivum
  peptide (1)..(396): Ceres Seq. ID no. 15221795
  misc_feature (72)..(390): Homolog of NCBI NO: 14194907 NR Description: HOMOSERINE KINASE (HK)
  misc_feature (73)..(94): Homolog of NCBI NO: 14521243 NR Description: HOMOSERINE KINASE (HK). [Pyrococcus abyssi]
  misc_feature (135)..(388): Homolog of NCBI NO: 14521243 NR Description: HOMOSERINE KINASE (HK). [Pyrococcus abyssi]
  misc_feature (129)..(371): Homolog of NCBI NO: 20177962 NR Description: Homoserine kinase (HK)
  misc_feature (129)..(371): Homolog of NCBI NO: 13541837 NR Description: Homoserine kinase [Thermoplasma volcanium]
  misc_feature (68)..(394): Homolog of NCBI NO: 21674844 NR Description: homoserine kinase [Chlorobium tepidum TLS]
  misc_feature (69)..(390): Homolog of NCBI NO: 23136657 NR Description: hypothetical protein [Cytophaga hutchinsonii]
  misc_feature (15)..(392): Homolog of NCBI NO: 39104572 NR Description: putative homoserine kinase HSK [Arabidopsis
  misc_feature (15)..(392): Homolog of NCBI NO: 4927412 NR Description: homoserine kinase [Arabidopsis thaliana]
  misc_feature (15)..(392): Homolog of NCBI NO: 15227800 NR Description: homoserine kinase [Arabidopsis thaliana]
LIENHPRAHQPPPTMAAAAAASPATAPSSFPSARAHKPTLLSLRVSTKLRAPAAAAASAASDPAPAFRSVTAFAPATVANLGPGFDFLGCAVADASLSLGDTVTATLDPSLPAGAVAISCITSPSRPRLADRLSRDPLRNCAGIAAVAALRALGVRSHGVSLSLAKGLPLGSGLGSSAASAAAAAKAVDALFGSLLPRDGLVLAGLESEKAVSGFHADNIAPAILGGFVMVRSYDPFCLVSLPCPPALRLCFVLVTPDFEAPTSKMRAALPKNIAMGHHVRNSSQAAALVAGVLQGDAALIGSAMSSDFIVEPTRAPLIPGMAAVKAAALEAGALGCTISGAGPTAVAVIEGEEKGEEVARRMIDAFLSVGKLKATATVAQLDRAGARVISTSNLE

SEQ ID NO: 68454 - protein, 382 aa, Triticum aestivum
  peptide (1)..(382): Ceres Seq. ID no. 15221796
  misc_feature (58)..(376): Homolog of NCBI NO: 14194907 NR Description: HOMOSERINE KINASE (HK)
  misc_feature (59)..(80): Homolog of NCBI NO: 14521243 NR Description: HOMOSERINE KINASE (HK). [Pyrococcus abyssi]
  misc_feature (121)..(374): Homolog of NCBI NO: 14521243 NR Description: HOMOSERINE KINASE (HK). [Pyrococcus abyssi]
  misc_feature (115)..(357): Homolog of NCBI NO: 20177962 NR Description: Homoserine kinase (HK)
  misc_feature (115)..(357): Homolog of NCBI NO: 13541837 NR Description: Homoserine kinase [Thermoplasma volcanium]
  misc_feature (54)..(380): Homolog of NCBI NO: 21674844 NR Description: homoserine kinase [Chlorobium tepidum TLS]
  misc_feature (55)..(376): Homolog of NCBI NO: 23136657 NR Description: hypothetical protein [Cytophaga hutchinsonii]
  misc_feature (1)..(378): Homolog of NCBI NO: 39104572 NR Description: putative homoserine kinase HSK [Arabidopsis
  misc_feature (1)..(378): Homolog of NCBI NO: 4927412 NR Description: homoserine kinase [Arabidopsis thaliana]
  misc_feature (1)..(378): Homolog of NCBI NO: 15227800 NR Description: homoserine kinase [Arabidopsis thaliana]
MAAAAAASPATAPSSFPSARAHKPTLLSLRVSTKLRAPAAAAASAASDPAPAFRSVTAFAPATVANLGPGFDFLGCAVADASLSLGDTVTATLDPSLPAGAVAISCITSPSRPRLADRLSRDPLRNCAGIAAVAALRALGVRSHGVSLSLAKGLPLGSGLGSSAASAAAAAKAVDALFGSLLPRDGLVLAGLESEKAVSGFHADNIAPAILGGFVMVRSYDPFCLVSLPCPPALRLCFVLVTPDFEAPTSKMRAALPKNIAMGHHVRNSSQAAALVAGVLQGDAALIGSAMSSDFIVEPTRAPLIPGMAAVKAAALEAGALGCTISGAGPTAVAVIEGEEKGEEVARRMIDAFLSVGKLKATATVAQLDRAGARVISTSNLE

SEQ ID NO: 68455 - protein, 259 aa, Triticum aestivum
  peptide (1)..(259): Ceres Seq. ID no. 15221797
  misc_feature (65)..(223): Pfam Name: HlyD family secretion protein Pfam Description: HlyD family secretion protein
  misc_feature (2)..(259): Homolog of NCBI NO: 23018788 NR Description: hypothetical protein [Thermobifida fusca]
PNRKPPTRAPATPHYGGGGGGVSSHRALLLPLRPRPQADAPLPPRLDQAQSPRGRGGIGGIRPGPGLQVRHGLRAGDGGEPRPGLRLPGLRGRRRLALPRRHSHGHPRPLAARRRGRHLLHHLPVPPPPRRPPLPRPAPQLRGHRRRRRAAGPRRALARRLPQPRQGPAARLRARLLGRVRGRRRQGRRRALRVPAPPRRPRARRPRVREGRQRLPRRQHRAGHPRRIRHGAELRPVLPRVAALPAGAPPLLRARHPGL

SEQ ID NO: 68456 - DNA, 1487 bp, Triticum aestivum
  misc_feature (1)..(1487): Ceres Seq. ID no. 13598278
gaggtcgacggtatcgataagcttttttttttttttttttctgaatagtatgttttttattaactcaatggtacgtagcacttgatttctctgtgtttcctagaatgaaacaatgtcttacgaaatgcttgttactctattcttatatgtcctgtacttttgaaattagaaaaataattactacaccacccccatactccatagacagaatttgccggtcttcaagggttagccagctcgaggtctccggttttcctcgccatctgctgctgcagcagctggttcttctgcgccgccgccttcttctgctggaccttctcgccatacatgtaggaggcaaagccccagaggcagagcaccagcgcgatgccctttggcccgtcgaacttctcgtggaggaagatgacggcgaggacctcggagagcggcaggaggacggcgaccatgatgccggcgaggagcgaagaggcgcaagtgacgagccccacgacgcccaggttgagcagctgccacgccacggcaccccatacgagcactaggtagtacttggtctcgccgagcccgaatgccgccgcctcgatcggcagcgcgttgaagtcgctcttgatggccatgccgagcaggcacaccatcgtgccggcgaggcccatcatggcctgcatctgcatcaccgtggagtagggtggcggcgcgctcgcggctggtcccctccgccgcccaaaccgctccatggcgacctcaacgagcggcagcacgagcccggcgagcgcggccgccgcgatggcctcgccgaacccggtccagtacgtcttggatggctcgcccgccggcttcccggacccgggaccgacgccgagcaccgcgggaccgatggtgagcagcaggacggcgttggcagagaagggcgtgaagcggagcccgacgaagaggaacgcgaacacggcggtgaaggcgagctgcgtcgccagtagcaaggacgacgtggacagcggcagcgcctgcgaccccatcgcatacacgaagcacgacacggcgtacaagctgcctagcacgacggccgcgccaacgaggcgaggcgggaggaggaggttgacgatgccgtggcggcggccgcggaagatggagacgcacaggggcgggaggaggagcggccagccggagatctggaccagcgcggagagccacaggcgttgcccgccgtggacgaagtagacccgcagcaggagcggcccgctggagccgatgaggacgaggcaggcgctgaatatgaccagcggtgaaggccggtagcgagccggcgaggcggccgtggcgcggggcggcgaggcgcttggcgtctttgctgcttcctgcatggccgggctggcactagcagttgtgatcgccatgatccgtcttagcttagctgcaagtatgtttgtactgctactttgctgtttcttggatgccctctctaatcctcccgcacagatgggatgagagcttgt

SEQ ID NO: 68457 - protein, 160 aa, Triticum aestivum
  peptide (1)..(160): Ceres Seq. ID no. 13598279
MATSTSGSTSPASAAAAMASPNPVQYVLDGSPAGFPDPGPTPSTAGPMVSSRTALAEKGVKRSPTKRNANTAVKASCVASSKDDVDSGSACDPIAYTKHDTAYKLPSTTAAPTRRGGRRRLTMPWRRPRKMETHRGGRRSGQPEIWTSAESHRRCPPWTK

SEQ ID NO: 68458 - protein, 144 aa, Triticum aestivum
  peptide (1)..(144): Ceres Seq. ID no. 13598280
  misc_feature (98)..(144): Homolog of NCBI NO: 9837383 NR Description: retinitis pigmentosa GTPase regulator [Bos taurus]
MKQCLTKCLLLYSYMSCTFEIRKIITTPPPYSIDRICRSSRVSQLEVSGFPRHLLLQQLVLLRRRLLLLDLLAIHVGGKAPEAEHQRDALWPVELLVEEDDGEDLGERQEDGDHDAGEERRGASDEPHDAQVEQLPRHGTPYEH

SEQ ID NO: 68459 - protein, 143 aa, Triticum aestivum
  peptide (1)..(143): Ceres Seq. ID no. 13598281
MASPNPVQYVLDGSPAGFPDPGPTPSTAGPMVSSRTALAEKGVKRSPTKRNANTAVKASCVASSKDDVDSGSACDPIAYTKHDTAYKLPSTTAAPTRRGGRRRLTMPWRRPRKMETHRGGRRSGQPEIWTSAESHRRCPPWTK

SEQ ID NO: 68460 - DNA, 1094 bp, Triticum aestivum
  misc_feature (1)..(1094): Ceres Seq. ID no. 12614195
atctcatcctctctctctcacacacacacaaaaccactacaggcatccatcacgattccttgcctacgcctcctcatggcggctgccaccggcgccaagcagcagcatccgcacccagctccaccaccgggggcaacggtggtggaccccaagttcgagtgggcggagaaggccggcacctacgtgctccgcctcaccctgaccggcttcaggaaggacgacttccgggtgcaggtcgacggcgcgggccggctcaccatccgcggcaccaggccgggcgcctccctccacaaggtcttccagctgccctccgccgccagcctcgacgacatcgccggccgcttcgaggccggtgtgctcacgctcaccatgcccaagcgtgccggtgcgcccaaggaggagggtgcgccaacagagcaggtcgacggcgacgggaagaggagagacgccggcggtgagaagaaggtgcctgaacccgcaccttccggtgatgcggctcccacatccatcgaggagatcagaacgaagcccaaggaagagcagcagaggccgaagaaggaaaaagaactggatcccaaggctccccaggcggcagcagctgcgcagacaccggagaagcaagcaccgaatccaacctccagcgacaagaccatggcggtggttgaccgggagtgcctggcagagacggtgaggcgacgcggcgaggaagagagggcctaggctgctgcggcggcgacggccatggaagctagagcagagcaggagaagaaggcggcggccacggcgtgcagccgctggaaagagcgcatgacggaaggcctggggcagctgacggacatgaagtgggcggagagcgcaatggagatggcgaggaagaacaaggaggtggtggccgtcggagtcgccgccttcacactcggcttcttcgtctcccagaggctcttcaagaagtgagtagctatatggagcatgaacatgtcacatacaccaacagtgagtaatacgtacgggctagtattgtgtggttataatgtacattgactgaacaaccatgtaaaaaggtatttgtgtataatcaaagtgggtgtacattg

SEQ ID NO: 68461 - protein, 239 aa, Triticum aestivum
  peptide (1)..(239): Ceres Seq. ID no. 12614196
  misc_feature (54)..(130): Homolog of NCBI NO: 34912184 NR Description: P0700A11.18 [Oryza sativa (japonica
  misc_feature (63)..(239): Homolog of NCBI NO: 31415965 NR Description: hypothetical protein [Oryza sativa (japonica
  misc_feature (48)..(173): Homolog of NCBI NO: 34912180 NR Description: P0700A11.16 [Oryza sativa (japonica
  misc_feature (49)..(239): Homolog of NCBI NO: 34912188 NR Description: P0700A11.20 [Oryza sativa (japonica
ISSSLSHTHTKPLQASITIPCLRLLMAAATGAKQQHPHPAPPPGATVVDPKFEWAEKAGTYVLRLTLTGFRKDDFRVQVDGAGRLTIRGTRPGASLHKVFQLPSAASLDDIAGRFEAGVLTLTMPKRAGAPKEEGAPTEQVDGDGKRRDAGGEKKVPEPAPSGDAAPTSIEEIRTKPKEEQQRPKKEKELDPKAPQAAAAAQTPEKQAPNPTSSDKTMAVVDRECLAETVRRRGEEERA

SEQ ID NO: 68462 - protein, 214 aa, Triticum aestivum
  peptide (1)..(214): Ceres Seq. ID no. 12614197
  misc_feature (29)..(105): Homolog of NCBI NO: 34912184 NR Description: P0700A11.18 [Oryza sativa (japonica
  misc_feature (38)..(214): Homolog of NCBI NO: 31415965 NR Description: hypothetical protein [Oryza sativa (japonica
  misc_feature (23)..(148): Homolog of NCBI NO: 34912180 NR Description: P0700A11.16 [Oryza sativa (japonica
  misc_feature (24)..(214): Homolog of NCBI NO: 34912188 NR Description: P0700A11.20 [Oryza sativa (japonica
MAAATGAKQQHPHPAPPPGATVVDPKFEWAEKAGTYVLRLTLTGFRKDDFRVQVDGAGRLTIRGTRPGASLHKVFQLPSAASLDDIAGRFEAGVLTLTMPKRAGAPKEEGAPTEQVDGDGKRRDAGGEKKVPEPAPSGDAAPTSIEEIRTKPKEEQQRPKKEKELDPKAPQAAAAAQTPEKQAPNPTSSDKTMAVVDRECLAETVRRRGEEERA

SEQ ID NO: 68463 - protein, 151 aa, Triticum aestivum
  peptide (1)..(151): Ceres Seq. ID no. 12614198
  misc_feature (78)..(151): Homolog of NCBI NO: 30526291 NR Description: latency associated nuclear antigen [Saimiriine
  misc_feature (104)..(151): Homolog of NCBI NO: 30526291 NR Description: latency associated nuclear antigen [Saimiriine
LILSLSHTHKTTTGIHHDSLPTPPHGGCHRRQAAASAPSSTTGGNGGGPQVRVGGEGRHLRAPPHPDRLQEGRLPGAGRRRGPAHHPRHQAGRLPPQGLPAALRRQPRRHRRPLRGRCAHAHHAQACRCAQGGGCANRAGRRRREEERRRR

SEQ ID NO: 68464 - DNA, 1490 bp, Triticum aestivum
  misc_feature (1)..(1490): Ceres Seq. ID no. 13502983
gtgctctgctgccacccccaaatctcctccccactcccgaatcaaatcccccgtcacctccgccaccaccccaccccacctatccccaccgccggcgcgagcacgggagcgcgagcgcgagcggagcgatggccggcgcgggatcctcgtcgggcggctcgggcggcggcggggggagggagggcgactgggactgcggcggctgcggcaaccgcaactacgccttccgctccctctgcaaccgctgcaagcagccgcgcctcctcgtcgaccccaacaccccgcgcgactccaagtggctcccccgcgccggcgactggatctgcaacggttgcagtaacaataattatgcatccagaaagaactgcaagaagtgcaacctgcccaaggaggaagcagcgatgccgcagttatcaatgggaggaatgatgccagcctatgcagattatatggccagggtacaggagattgccaatgctgggtataagatgaactttggcaatccagctatgcagcagcagctactcgcaaacgcaaactggccctatgggatggctggtagatatggtatgcaatcgtctgcttggccgttcgccggcaacagcacaaatcagtttcaaggtgttccaaaggactggcgtagtggtgactggctctgcagctgtggattccataactattcatctcgtgctcagtgcaaagagtgtaatgcacctgtcccatcaggcatggcctctacaaccatgaaatccacaggagcagatagttcttcaacattaggtaataagcgtttggcatcagaggagcttgctaatgactgggataataaaaggctaaatccaggaaatgctaattatccactttcagcagcaggctcagataatttatttatgggtcaaggtgctggaaacaataatggccagacaacttattctgcatatgacaatggaaactcaatggcatctggacaaattccagggatgtctggtgtagttggtaaaggagcaaaatggcgtgaaggagactggttgtgcaccaactgcagcaatcataactacgcatctcgtgcattttgtaacagatgcaaaactgcgaaagagtcttcggttcatccgggtgcgctataataatagctttgcttgtacttttgcgaccaagttattgaagcgggtgtggagtctcctggttctgccacggctgatcggtcgctgccgtcgccaggattgttgttatgtttgtggtttggccctgcagtacttatgctgctgttaaaattgttctgtctgaatctaatattgtttgtgggagtttgcatttgtctacgccgagcactagaataaaacgtttcctgtatgtcgaagtgtaccatctgttttttgtttttgtgtgtgcgtgtgcaacgatttgatttgttcttcagtacctcaacagctatgatgtaatgtaatgctggatctatttcatgtggcaatgctggattttattgtttt

SEQ ID NO: 68465 - protein, 374 aa, Triticum aestivum
  peptide (1)..(374): Ceres Seq. ID no. 13502984
  misc_feature (59)..(88): Pfam Name: Zn-finger in Ran binding protein and others Pfam Description: Zn-finger in Ran binding protein and others
  misc_feature (59)..(85): Homolog of NCBI NO: 19114486 NR Description: RNA-binding / Ran zinc finger proteinrotein
  misc_feature (102)..(243): Homolog of NCBI NO: 19114486 NR Description: RNA-binding / Ran zinc finger proteinrotein
  misc_feature (102)..(242): Homolog of NCBI NO: 5803246 NR Description: ESTs AU077984(C62969),D41648(S4289), correspond to a region of the predicted gene.~Similar to putative
  misc_feature (102)..(242): Homolog of NCBI NO: 5679336 NR Description: putative zinc finger protein [Oryza sativa]
  misc_feature (213)..(371): Homolog of NCBI NO: 15239445 NR Description: expressed protein [Arabidopsis thaliana]
  misc_feature (41)..(132): Homolog of NCBI NO: 15865325 NR Description: putative non-ribosomal nucleolar protein
  misc_feature (200)..(290): Homolog of NCBI NO: 15227939 NR Description: zinc finger protein -related [Arabidopsis
  misc_feature (259)..(366): Homolog of NCBI NO: 15227939 NR Description: zinc finger protein -related [Arabidopsis
  misc_feature (56)..(183): Homolog of NCBI NO: 15227939 NR Description: zinc finger protein -related [Arabidopsis
  misc_feature (134)..(374): Homolog of NCBI NO: 38345582 NR Description: OSJNBa0027H06.18 [Oryza sativa (japonica
ALLPPPNLLPTPESNPPSPPPPPHPTYPHRRREHGSASASGAMAGAGSSSGGSGGGGGREGDWDCGGCGNRNYAFRSLCNRCKQPRLLVDPNTPRDSKWLPRAGDWICNGCSNNNYASRKNCKKCNLPKEEAAMPQLSMGGMMPAYADYMARVQEIANAGYKMNFGNPAMQQQLLANANWPYGMAGRYGMQSSAWPFAGNSTNQFQGVPKDWRSGDWLCSCGFHNYSSRAQCKECNAPVPSGMASTTMKSTGADSSSTLGNKRLASEELANDWDNKRLNPGNANYPLSAAGSDNLFMGQGAGNNNGQTTYSAYDNGNSMASGQIPGMSGVVGKGAKWREGDWLCTNCSNHNYASRAFCNRCKTAKESSVHPGAL

SEQ ID NO: 68466 - protein, 332 aa, Triticum aestivum
  peptide (1)..(332): Ceres Seq. ID no. 13502985
  misc_feature (17)..(46): Pfam Name: Zn-finger in Ran binding protein and others Pfam Description: Zn-finger in Ran binding protein and others
  misc_feature (17)..(43): Homolog of NCBI NO: 19114486 NR Description: RNA-binding / Ran zinc finger proteinrotein
  misc_feature (60)..(201): Homolog of NCBI NO: 19114486 NR Description: RNA-binding / Ran zinc finger proteinrotein
  misc_feature (60)..(200): Homolog of NCBI NO: 5803246 NR Description: ESTs AU077984(C62969),D41648(S4289), correspond to a region of the predicted gene.~Similar to putative
  misc_feature (60)..(200): Homolog of NCBI NO: 5679336 NR Description: putative zinc finger protein [Oryza sativa]
  misc_feature (171)..(329): Homolog of NCBI NO: 15239445 NR Description: expressed protein [Arabidopsis thaliana]
  misc_feature (1)..(90): Homolog of NCBI NO: 15865325 NR Description: putative non-ribosomal nucleolar protein
  misc_feature (158)..(248): Homolog of NCBI NO: 15227939 NR Description: zinc finger protein -related [Arabidopsis
  misc_feature (217)..(324): Homolog of NCBI NO: 15227939 NR Description: zinc finger protein -related [Arabidopsis
  misc_feature (14)..(141): Homolog of NCBI NO: 15227939 NR Description: zinc finger protein -related [Arabidopsis
  misc_feature (92)..(332): Homolog of NCBI NO: 38345582 NR Description: OSJNBa0027H06.18 [Oryza sativa (japonica
MAGAGSSSGGSGGGGGREGDWDCGGCGNRNYAFRSLCNRCKQPRLLVDPNTPRDSKWLPRAGDWICNGCSNNNYASRKNCKKCNLPKEEAAMPQLSMGGMMPAYADYMARVQEIANAGYKMNFGNPAMQQQLLANANWPYGMAGRYGMQSSAWPFAGNSTNQFQGVPKDWRSGDWLCSCGFHNYSSRAQCKECNAPVPSGMASTTMKSTGADSSSTLGNKRLASEELANDWDNKRLNPGNANYPLSAAGSDNLFMGQGAGNNNGQTTYSAYDNGNSMASGQIPGMSGVVGKGAKWREGDWLCTNCSNHNYASRAFCNRCKTAKESSVHPGAL

SEQ ID NO: 68467 - protein, 241 aa, Triticum aestivum
  peptide (1)..(241): Ceres Seq. ID no. 13502986
  misc_feature (1)..(29): Homolog of NCBI NO: 5803246 NR Description: ESTs AU077984(C62969),D41648(S4289), correspond to a region of the predicted gene.~Similar to putative
  misc_feature (1)..(29): Homolog of NCBI NO: 5679336 NR Description: putative zinc finger protein [Oryza sativa]
  misc_feature (1)..(110): Homolog of NCBI NO: 19114486 NR Description: RNA-binding / Ran zinc finger proteinrotein
  misc_feature (1)..(109): Homolog of NCBI NO: 5803246 NR Description: ESTs AU077984(C62969),D41648(S4289), correspond to a region of the predicted gene.~Similar to putative
  misc_feature (1)..(109): Homolog of NCBI NO: 5679336 NR Description: putative zinc finger protein [Oryza sativa]
  misc_feature (80)..(238): Homolog of NCBI NO: 15239445 NR Description: expressed protein [Arabidopsis thaliana]
  misc_feature (67)..(157): Homolog of NCBI NO: 15227939 NR Description: zinc finger protein -related [Arabidopsis
  misc_feature (126)..(233): Homolog of NCBI NO: 15227939 NR Description: zinc finger protein -related [Arabidopsis
  misc_feature (1)..(50): Homolog of NCBI NO: 15227939 NR Description: zinc finger protein -related [Arabidopsis
  misc_feature (1)..(241): Homolog of NCBI NO: 38345582 NR Description: OSJNBa0027H06.18 [Oryza sativa (japonica
MPQLSMGGMMPAYADYMARVQEIANAGYKMNFGNPAMQQQLLANANWPYGMAGRYGMQSSAWPFAGNSTNQFQGVPKDWRSGDWLCSCGFHNYSSRAQCKECNAPVPSGMASTTMKSTGADSSSTLGNKRLASEELANDWDNKRLNPGNANYPLSAAGSDNLFMGQGAGNNNGQTTYSAYDNGNSMASGQIPGMSGVVGKGAKWREGDWLCTNCSNHNYASRAFCNRCKTAKESSVHPGAL

SEQ ID NO: 68468 - DNA, 1129 bp, Triticum aestivum
  misc_feature (1)..(1129): Ceres Seq. ID no. 13595979
ctacaccatcacacaatatccagaaccatctcactgccaacctccgccatggcgttccgacgccctctcgctctccacccgctcgtgatcgccttcgtgctggtctcctgtctcgccggcgccgccacggcgaagcagacgggccagctgaccgtgttctggggccggaacgccggcgagggcacgctgcgcgaggcctgcgacacggggctctactccaccgtcgtcatctccttctacagcgtcttcgggcacggccgctactggggcgacctctctggccaccctctcgccggcgtcggtgccgacatcaagcactgccagtccacgaacatcctcgtcctcctctccatcggcgggcccgggaacggctactccctcccgtcctccgcctccgccgcagccgtcgccgacaacctctggaacgcgcacctcggcgggcgccggaacggcgtgtaccgcccgttcggcgacgccgccgtcgacggcatcgacttctacatcgaccagggcgcccccgaccactacgacgagctggccagccgcctcgacgggtacaaccggttctaccgcggccggaagggtgtgcgcctgacggcgacgccgcggtgcgggttgcccgaccgccgcctgggggcggcgctccggacggggctgttcgagcgcatccacgtcaggttctacggcaatgacacatgctcgctggggaagggcgggacgtacggcgtggtagagcagtgggagaagtggacggcggcgttcccaaggacccaggtgtacctgggcctcgcgccggcggagagcggcgtgccggagggggcgcagggcaccgtcgccgtttacctcaagtacctctactacgacctgctgcccaaggtgcagaaggcgaacaactatggcggggtcatggtctgggacagattcgccgacaagaagacacgctggagcagcgtcgtcaacggatgggcctgatcgtttatatcgctagctggtttacagctacggatccgagtatatactacttctactgtgtatgcgtgtgtatgaataaaacggcatccatatgataatgatatatggatgtgaactcaagttgtttcttgttctagtcaatgagataaggaatatg

SEQ ID NO: 68469 - protein, 323 aa, Triticum aestivum
  peptide (1)..(323): Ceres Seq. ID no. 13595980
  misc_feature (48)..(310): Pfam Name: Glycosyl hydrolases family 18 Pfam Description: Glycosyl hydrolases family 18
  misc_feature (28)..(323): Homolog of NCBI NO: 34913272 NR Description: putative xylanase inhibitor protein
  misc_feature (31)..(319): Homolog of NCBI NO: 38346492 NR Description: OSJNBa0020I02.6 [Oryza sativa (japonica
  misc_feature (20)..(323): Homolog of NCBI NO: 4884518 NR Description: class III chitinase homologue (OsChib3H-c) [Oryza
  misc_feature (28)..(323): Homolog of NCBI NO: 7451379 NR Description: chitinase (EC 3.2.1.14) III C10122 - rice
  misc_feature (20)..(323): Homolog of NCBI NO: 7451380 NR Description: chitinase (EC 3.2.1.14) III C10923 - rice
  misc_feature (20)..(323): Homolog of NCBI NO: 4884516 NR Description: class III chitinase homologue (OsChib3H-b) [Oryza
  misc_feature (17)..(317): Homolog of NCBI NO: 7451377 NR Description: chitinase (EC 3.2.1.14) III C00481 - rice
  misc_feature (17)..(316): Homolog of NCBI NO: 7451381 NR Description: chitinase (EC 3.2.1.14) III C10150 - rice
  misc_feature (17)..(323): Homolog of NCBI NO: 7451378 NR Description: chitinase (EC 3.2.1.14) III C10701 - rice
  misc_feature (17)..(323): Homolog of NCBI NO: 18693099 NR Description: putative xylanase inhibitor protein
LHHHTISRTISLPTSAMAFRRPLALHPLVIAFVLVSCLAGAATAKQTGQLTVFWGRNAGEGTLREACDTGLYSTVVISFYSVFGHGRYWGDLSGHPLAGVGADIKHCQSTNILVLLSIGGPGNGYSLPSSASAAAVADNLWNAHLGGRRNGVYRPFGDAAVDGIDFYIDQGAPDHYDELASRLDGYNRFYRGRKGVRLTATPRCGLPDRRLGAALRTGLFERIHVRFYGNDTCSLGKGGTYGVVEQWEKWTAAFPRTQVYLGLAPAESGVPEGAQGTVAVYLKYLYYDLLPKVQKANNYGGVMVWDRFADKKTRWSSVVNGWA

SEQ ID NO: 68470 - protein, 307 aa, Triticum aestivum
  peptide (1)..(307): Ceres Seq. ID no. 13595981
  misc_feature (32)..(294): Pfam Name: Glycosyl hydrolases family 18 Pfam Description: Glycosyl hydrolases family 18
  misc_feature (12)..(307): Homolog of NCBI NO: 34913272 NR Description: putative xylanase inhibitor protein
  misc_feature (15)..(303): Homolog of NCBI NO: 38346492 NR Description: OSJNBa0020I02.6 [Oryza sativa (japonica
  misc_feature (4)..(307): Homolog of NCBI NO: 4884518 NR Description: class III chitinase homologue (OsChib3H-c) [Oryza
  misc_feature (12)..(307): Homolog of NCBI NO: 7451379 NR Description: chitinase (EC 3.2.1.14) III C10122 - rice
  misc_feature (4)..(307): Homolog of NCBI NO: 7451380 NR Description: chitinase (EC 3.2.1.14) III C10923 - rice
  misc_feature (4)..(307): Homolog of NCBI NO: 4884516 NR Description: class III chitinase homologue (OsChib3H-b) [Oryza
  misc_feature (1)..(301): Homolog of NCBI NO: 7451377 NR Description: chitinase (EC 3.2.1.14) III C00481 - rice
  misc_feature (1)..(300): Homolog of NCBI NO: 7451381 NR Description: chitinase (EC 3.2.1.14) III C10150 - rice
  misc_feature (1)..(307): Homolog of NCBI NO: 7451378 NR Description: chitinase (EC 3.2.1.14) III C10701 - rice
  misc_feature (1)..(307): Homolog of NCBI NO: 18693099 NR Description: putative xylanase inhibitor protein
MAFRRPLALHPLVIAFVLVSCLAGAATAKQTGQLTVFWGRNAGEGTLREACDTGLYSTVVISFYSVFGHGRYWGDLSGHPLAGVGADIKHCQSTNILVLLSIGGPGNGYSLPSSASAAAVADNLWNAHLGGRRNGVYRPFGDAAVDGIDFYIDQGAPDHYDELASRLDGYNRFYRGRKGVRLTATPRCGLPDRRLGAALRTGLFERIHVRFYGNDTCSLGKGGTYGVVEQWEKWTAAFPRTQVYLGLAPAESGVPEGAQGTVAVYLKYLYYDLLPKVQKANNYGGVMVWDRFADKKTRWSSVVNGWA

SEQ ID NO: 68471 - protein, 229 aa, Triticum aestivum
  peptide (1)..(229): Ceres Seq. ID no. 13595982
TPSHNIQNHLTANLRHGVPTPSRSPPARDRLRAGLLSRRRRHGEADGPADRVLGPERRRGHAARGLRHGALLHRRHLLLQRLRARPLLGRPLWPPSRRRRCRHQALPVHEHPRPPLHRRARERLLPPVLRLRRSRRRQPLERAPRRAPERRVPPVRRRRRRRHRLLHRPGRPRPLRRAGQPPRRVQPVLPRPEGCAPDGDAAVRVARPPPGGGAPDGAVRAHPRQVLRQ

SEQ ID NO: 68472 - DNA, 1484 bp, Triticum aestivum
  misc_feature (1)..(1484): Ceres Seq. ID no. 13589016
gttgcttcctctccctttccatttccttccttgtcctttcctccaatcgaattggttccccaaatcttagggttagggtttcgtctattccgtaccttcctcccatattagcgcgtctggtccctgagcttgctttgcgcgtgggatgatgggcactgccgtggacctaggacggaggcagggcgacagccgcttctacgacgctgccagggctcgacgagggcaccatcacggccttcccaagtcgagacatatgatggacgacagtgatgaagatttccgtgattccagcagtgatggtagcagtgattatgaacatgtaagggccaaacactttgctcaggaaggcttctcaagggatgttggtgaatctggagttactcatggccgcttgctctttcagtacctcgagtttgattctccgttttgccgtgaacctttcactgataagatttctagcctttcagctagatttccaggattgaggacccttaggagttgtgatttatcagcgcggagttggatgagcatcgcttggtacccaatttatcgtatccctactggaccaacattaaaagatttagatgcctgctttctcactttccatcagctttcaaattgcccgcaaggagataatctgtgggctcctgatagcacaccaaacataccactcccagtttttggtttggcttcctacaagtttagcaactcagtctggtcctcaactgatggtgattggaaactggctagctgcttaaggcaagctgctgccgactggctgagagacagccgtgccggccatccagattatcagttctttgtctcccgtggtgcatacaacaggtagtgacaccaaatctgtgctttccgcagagctcatgaaagaatgtccgaagagtgtcttgtgaacatgattaagttctgagtgactgactggttgactgcttccaaatctcatgcatgttaccacaagatttgaagcttggatgcatacatccaaccgatgctggaaaaagaggtcgcggcagtttccccttctcctctcttccaccgccccttttgagagtcgctcatccccggctggcccgatctgatgcctcgtccgtcggcgacgctggctggcgatggctgctggaaaaagaggtcgcggcagtttccccttctcctctcttccaccgcccccttttgagagtcactcatccccggccggcccgatctggtgcctcgtccgtcggcgatgctggctggcgatggctgaggagaggtccctggttcttccatatgtatattagagtagcagtagacttagttagacttggctttatgccgtggtgtggcctcatgccagtcgggatacctgctgctagaccttgtgagcagagtctggtggtggctgtgattcacacttatatttgagcttaaagtctgagtgtataccgaattaggcttttccttcgatcggtttatgtcagagttcacactac

SEQ ID NO: 68473 - protein, 233 aa, Triticum aestivum
  peptide (1)..(233): Ceres Seq. ID no. 13589017
  misc_feature (67)..(225): Pfam Name: Protein of unknown function (DUF789) Pfam Description: Protein of unknown function (DUF789)
  misc_feature (28)..(233): Homolog of NCBI NO: 18958013 NR Description: At1g03610/F21B7_13 [Arabidopsis thaliana]
  misc_feature (35)..(232): Homolog of NCBI NO: 34394268 NR Description: hypothetical protein [Oryza sativa (japonica
  misc_feature (35)..(227): Homolog of NCBI NO: 15450996 NR Description: Unknown protein [Arabidopsis thaliana]
  misc_feature (74)..(233): Homolog of NCBI NO: 10177151 NR Description: gb|AAF31026.1~gene_id:K21P3.10~similar to unknown
  misc_feature (74)..(233): Homolog of NCBI NO: 22327664 NR Description: expressed protein [Arabidopsis thaliana]
  misc_feature (33)..(230): Homolog of NCBI NO: 34897254 NR Description: hypothetical protein [Oryza sativa (japonica
  misc_feature (33)..(228): Homolog of NCBI NO: 22329567 NR Description: expressed protein [Arabidopsis thaliana]
  misc_feature (27)..(228): Homolog of NCBI NO: 18379188 NR Description: expressed protein [Arabidopsis thaliana]
  misc_feature (2)..(35): Homolog of NCBI NO: 34914654 NR Description: P0504D03.18 [Oryza sativa (japonica
  misc_feature (67)..(233): Homolog of NCBI NO: 34914654 NR Description: P0504D03.18 [Oryza sativa (japonica
MMGTAVDLGRRQGDSRFYDAARARRGHHHGLPKSRHMMDDSDEDFRDSSSDGSSDYEHVRAKHFAQEGFSRDVGESGVTHGRLLFQYLEFDSPFCREPFTDKISSLSARFPGLRTLRSCDLSARSWMSIAWYPIYRIPTGPTLKDLDACFLTFHQLSNCPQGDNLWAPDSTPNIPLPVFGLASYKFSNSVWSSTDGDWKLASCLRQAAADWLRDSRAGHPDYQFFVSRGAYNR

SEQ ID NO: 68474 - protein, 232 aa, Triticum aestivum
  peptide (1)..(232): Ceres Seq. ID no. 13589018
  misc_feature (66)..(224): Pfam Name: Protein of unknown function (DUF789) Pfam Description: Protein of unknown function (DUF789)
  misc_feature (27)..(232): Homolog of NCBI NO: 18958013 NR Description: At1g03610/F21B7_13 [Arabidopsis thaliana]
  misc_feature (34)..(231): Homolog of NCBI NO: 34394268 NR Description: hypothetical protein [Oryza sativa (japonica
  misc_feature (34)..(226): Homolog of NCBI NO: 15450996 NR Description: Unknown protein [Arabidopsis thaliana]
  misc_feature (73)..(232): Homolog of NCBI NO: 10177151 NR Description: gb|AAF31026.1~gene_id:K21P3.10~similar to unknown
  misc_feature (73)..(232): Homolog of NCBI NO: 22327664 NR Description: expressed protein [Arabidopsis thaliana]
  misc_feature (32)..(229): Homolog of NCBI NO: 34897254 NR Description: hypothetical protein [Oryza sativa (japonica
  misc_feature (32)..(227): Homolog of NCBI NO: 22329567 NR Description: expressed protein [Arabidopsis thaliana]
  misc_feature (26)..(227): Homolog of NCBI NO: 18379188 NR Description: expressed protein [Arabidopsis thaliana]
  misc_feature (1)..(34): Homolog of NCBI NO: 34914654 NR Description: P0504D03.18 [Oryza sativa (japonica
  misc_feature (66)..(232): Homolog of NCBI NO: 34914654 NR Description: P0504D03.18 [Oryza sativa (japonica
MGTAVDLGRRQGDSRFYDAARARRGHHHGLPKSRHMMDDSDEDFRDSSSDGSSDYEHVRAKHFAQEGFSRDVGESGVTHGRLLFQYLEFDSPFCREPFTDKISSLSARFPGLRTLRSCDLSARSWMSIAWYPIYRIPTGPTLKDLDACFLTFHQLSNCPQGDNLWAPDSTPNIPLPVFGLASYKFSNSVWSSTDGDWKLASCLRQAAADWLRDSRAGHPDYQFFVSRGAYNR

SEQ ID NO: 68475 - protein, 197 aa, Triticum aestivum
  peptide (1)..(197): Ceres Seq. ID no. 13589019
  misc_feature (31)..(189): Pfam Name: Protein of unknown function (DUF789) Pfam Description: Protein of unknown function (DUF789)
  misc_feature (1)..(197): Homolog of NCBI NO: 9280648 NR Description: F21B7.22 [Arabidopsis thaliana]
  misc_feature (1)..(197): Homolog of NCBI NO: 18958013 NR Description: At1g03610/F21B7_13 [Arabidopsis thaliana]
  misc_feature (1)..(196): Homolog of NCBI NO: 34394268 NR Description: hypothetical protein [Oryza sativa (japonica
  misc_feature (1)..(191): Homolog of NCBI NO: 15450996 NR Description: Unknown protein [Arabidopsis thaliana]
  misc_feature (38)..(197): Homolog of NCBI NO: 10177151 NR Description: gb|AAF31026.1~gene_id:K21P3.10~similar to unknown
  misc_feature (38)..(197): Homolog of NCBI NO: 22327664 NR Description: expressed protein [Arabidopsis thaliana]
  misc_feature (1)..(194): Homolog of NCBI NO: 34897254 NR Description: hypothetical protein [Oryza sativa (japonica
  misc_feature (1)..(192): Homolog of NCBI NO: 22329567 NR Description: expressed protein [Arabidopsis thaliana]
  misc_feature (1)..(192): Homolog of NCBI NO: 18379188 NR Description: expressed protein [Arabidopsis thaliana]
  misc_feature (31)..(197): Homolog of NCBI NO: 34914654 NR Description: P0504D03.18 [Oryza sativa (japonica
MMDDSDEDFRDSSSDGSSDYEHVRAKHFAQEGFSRDVGESGVTHGRLLFQYLEFDSPFCREPFTDKISSLSARFPGLRTLRSCDLSARSWMSIAWYPIYRIPTGPTLKDLDACFLTFHQLSNCPQGDNLWAPDSTPNIPLPVFGLASYKFSNSVWSSTDGDWKLASCLRQAAADWLRDSRAGHPDYQFFVSRGAYNR

SEQ ID NO: 68476 - DNA, 1257 bp, Triticum aestivum
  misc_feature (1)..(1257): Ceres Seq. ID no. 13596048
  misc_feature: Pfam Name: ADH_zinc_N Pfam Description: Zinc-binding dehydrogenase
acaacaaccagcgcagcgagcaccacagacaccaagaatctttcacacagtctcacgcacgcagagccagtcgcacattttcggcgatggaggtgacccccaaccacacgcaggccgtgagcgggtgggcggccatggagccctccggcgaggtggtgcccttcgccttcaagcgccgggagaacggcgtggacgacgtcaccatcaaggtgcactactgcggcatgtgccacaccgacctccacttcatcaacaacgactggggcatcaccatgtaccccctcgtgcccggccacgagatcaccggcgttgtcacccgcgtcggcgccaacgtctccggcttccgccccggcgaccgcgtcggcgtcggctgcatcgccgcctcctgcctcgactgcgaccactgccgccgctccgaggagaactactgcgacaaggtcgcgctcacctacaacggcatcttctgggacggcagcgtcacctacggcggctactccagcatgctcgtcgcgcacaagcgcttcctcgtgcgcatcccggacgccctcccgctggacgccgccgcgccgctgctgtgcgccgggatcaccgtgtacagccccatgaagcagcacgggatgcttcaggctggcaggaggctcggcgtggtcgggctgggcgggctcggccacgtcgccgtcaagttcggcaaggcgttcgggctcaaggtcaccgtcatcagcacgtcgccggccaaggagcgggaggcgagggagagcctcaaggccgacgacttcgtcctcagcaccgacgagaagcagatgcaggccatggctcggagcctggactacgtgatcgacacggtgtcggcgcagcactcgctggggcccatcctggagctgctcaaggtgaacgggaagctggtgctggtggcggcgccggacaagcccgtggagctgccgtccttcccgctcatcttcgggaagaggacggtgagcgggagcatgacaggcggcatgaaggagacgcaggagatgatggacctgtgcggggagcacggcatcaccgctgacatcgagctcgtctccaccgatgggatcaacgacgcgttggccaggctcgcacgcaacgacgtccgctaccgcttcgtcgtcgacgttgccgggagtggctccaggctctagctgtttgtttaaattattggtgatttggacgcatggttcaacgtagattctgggcttctgtcagaaagaaagcatgggtacctgtttcattttc

SEQ ID NO: 68477 - protein, 386 aa, Triticum aestivum
  peptide (1)..(386): Ceres Seq. ID no. 15221749
  misc_feature: Pfam Name: ADH_zinc_N Pfam Description: Zinc-binding dehydrogenase
  misc_feature (29)..(382): Homolog of NCBI NO: 10720093 NR Description: Probable mannitol dehydrogenase (NAD-dependent
  misc_feature (35)..(382): Homolog of NCBI NO: 14279694 NR Description: sinapyl alcohol dehydrogenase [Populus
  misc_feature (41)..(382): Homolog of NCBI NO: 3913193 NR Description: Probable mannitol dehydrogenase 1 (NAD-dependent
  misc_feature (35)..(382): Homolog of NCBI NO: 21592964 NR Description: cinnamyl-alcohol dehydrogenase CAD1 [Arabidopsis
  misc_feature (35)..(382): Homolog of NCBI NO: 1168728 NR Description: Probable mannitol dehydrogenase (NAD-dependent
  misc_feature (35)..(385): Homolog of NCBI NO: 22475166 NR Description: putative sinapyl alcohol dehydrogenase
  misc_feature (35)..(382): Homolog of NCBI NO: 15235022 NR Description: mannitol dehydrogenase, putative [Arabidopsis
  misc_feature (35)..(382): Homolog of NCBI NO: 2146727 NR Description: cinnamyl-alcohol dehydrogenase (EC 1.1.1.195)
  misc_feature (41)..(386): Homolog of NCBI NO: 10720088 NR Description: Probable mannitol dehydrogenase (NAD-dependent
  misc_feature (29)..(386): Homolog of NCBI NO: 38344562 NR Description: OSJNBa0065B15.8 [Oryza sativa (japonica
NNQRSEHHRHQESFTQSHARRASRTFSAMEVTPNHTQAVSGWAAMEPSGEVVPFAFKRRENGVDDVTIKVHYCGMCHTDLHFINNDWGITMYPLVPGHEITGVVTRVGANVSGFRPGDRVGVGCIAASCLDCDHCRRSEENYCDKVALTYNGIFWDGSVTYGGYSSMLVAHKRFLVRIPDALPLDAAAPLLCAGITVYSPMKQHGMLQAGRRLGVVGLGGLGHVAVKFGKAFGLKVTVISTSPAKEREARESLKADDFVLSTDEKQMQAMARSLDYVIDTVSAQHSLGPILELLKVNGKLVLVAAPDKPVELPSFPLIFGKRTVSGSMTGGMKETQEMMDLCGEHGITADIELVSTDGINDALARLARNDVRYRFVVDVAGSGSRL

SEQ ID NO: 68478 - protein, 358 aa, Triticum aestivum
  peptide (1)..(358): Ceres Seq. ID no. 15221750
  misc_feature: Pfam Name: ADH_zinc_N Pfam Description: Zinc-binding dehydrogenase
  misc_feature (1)..(354): Homolog of NCBI NO: 10720093 NR Description: Probable mannitol dehydrogenase (NAD-dependent
  misc_feature (7)..(354): Homolog of NCBI NO: 14279694 NR Description: sinapyl alcohol dehydrogenase [Populus
  misc_feature (13)..(354): Homolog of NCBI NO: 3913193 NR Description: Probable mannitol dehydrogenase 1 (NAD-dependent
  misc_feature (7)..(354): Homolog of NCBI NO: 21592964 NR Description: cinnamyl-alcohol dehydrogenase CAD1 [Arabidopsis
  misc_feature (7)..(354): Homolog of NCBI NO: 1168728 NR Description: Probable mannitol dehydrogenase (NAD-dependent
  misc_feature (7)..(357): Homolog of NCBI NO: 22475166 NR Description: putative sinapyl alcohol dehydrogenase
  misc_feature (7)..(354): Homolog of NCBI NO: 15235022 NR Description: mannitol dehydrogenase, putative [Arabidopsis
  misc_feature (7)..(354): Homolog of NCBI NO: 2146727 NR Description: cinnamyl-alcohol dehydrogenase (EC 1.1.1.195)
  misc_feature (13)..(358): Homolog of NCBI NO: 10720088 NR Description: Probable mannitol dehydrogenase (NAD-dependent
  misc_feature (1)..(358): Homolog of NCBI NO: 38344562 NR Description: OSJNBa0065B15.8 [Oryza sativa (japonica
MEVTPNHTQAVSGWAAMEPSGEVVPFAFKRRENGVDDVTIKVHYCGMCHTDLHFINNDWGITMYPLVPGHEITGVVTRVGANVSGFRPGDRVGVGCIAASCLDCDHCRRSEENYCDKVALTYNGIFWDGSVTYGGYSSMLVAHKRFLVRIPDALPLDAAAPLLCAGITVYSPMKQHGMLQAGRRLGVVGLGGLGHVAVKFGKAFGLKVTVISTSPAKEREARESLKADDFVLSTDEKQMQAMARSLDYVIDTVSAQHSLGPILELLKVNGKLVLVAAPDKPVELPSFPLIFGKRTVSGSMTGGMKETQEMMDLCGEHGITADIELVSTDGINDALARLARNDVRYRFVVDVAGSGSRL

SEQ ID NO: 68479 - protein, 349 aa, Triticum aestivum
  peptide (1)..(349): Ceres Seq. ID no. 15221751
  misc_feature: Pfam Name: ADH_zinc_N Pfam Description: Zinc-binding dehydrogenase
QQPAQRAPQTPRIFHTVSRTQSQSHIFGDGGDPQPHAGRERVGGHGALRRGGALRLQAPGERRGRRHHQGALLRHVPHRPPLHQQRLGHHHVPPRARPRDHRRCHPRRRQRLRLPPRRPRRRRLHRRLLPRLRPLPPLRGELLRQGRAHLQRHLLGRQRHLRRLLQHARRAQALPRAHPGRPPAGRRRAAAVRRDHRVQPHEAARDASGWQEARRGRAGRARPRRRQVRQGVRAQGHRHQHVAGQGAGGEGEPQGRRLRPQHRREADAGHGSEPGLRDRHGVGAALAGAHPGAAQGEREAGAGGGAGQARGAAVLPAHLREEDGEREHDRRHEGDAGDDGPVRGARHHR

SEQ ID NO: 68480 - DNA, 595 bp, Triticum aestivum
  misc_feature (1)..(595): Ceres Seq. ID no. 13596190
aaaagacggagcggcggactctcctgcaatacatactccgccgccgccgccgccgccgccgcgatgcttctcttccacaagcaactgttctcgctccgtctcccagcttcacccgtgatcttctctctccgtcgggccctcttgtccacctcggcggccaccgacgccccgccggccccattcgccgtcgacgactacctcgtcaccacctgcggcctcacgccggagcaagccctcaaggccgccaagcacgtctcccactgcaagtccacctccaacgccgagtccgtcctcgcctacctcgccggccccaccctccgcttctccaaggccgacatcgcccacatcgtcgcccgcgacccgcggatcctcaactgcagcgtcgacgacaccctcaaggcccgcgtcgccatcttacgcggctatggcctctccgaagaccacgtccggaccttcctccgcatgacccccggcgtcttccgctccgtcagcatccaggagaagctcgggttctggttgcccttcctggggtcgccggagaagttcatccgcatcctcaagggcaactattacctgctcacgtcggacctcgagc

SEQ ID NO: 68481 - protein, 198 aa, Triticum aestivum
  peptide (1)..(198): Ceres Seq. ID no. 13596191
KRRSGGLSCNTYSAAAAAAAAMLLFHKQLFSLRLPASPVIFSLRRALLSTSAATDAPPAPFAVDDYLVTTCGLTPEQALKAAKHVSHCKSTSNAESVLAYLAGPTLRFSKADIAHIVARDPRILNCSVDDTLKARVAILRGYGLSEDHVRTFLRMTPGVFRSVSIQEKLGFWLPFLGSPEKFIRILKGNYYLLTSDLE

SEQ ID NO: 68482 - protein, 197 aa, Triticum aestivum
  peptide (1)..(197): Ceres Seq. ID no. 13596192
  misc_feature (16)..(192): Homolog of NCBI NO: 30684163 NR Description: proline-rich protein -related [Arabidopsis
KTERRTLLQYILRRRRRRRRDASLPQATVLAPSPSFTRDLLSPSGPLVHLGGHRRPAGPIRRRRLPRHHLRPHAGASPQGRQARLPLQVHLQRRVRPRLPRRPHPPLLQGRHRPHRRPRPADPQLQRRRHPQGPRRHLTRLWPLRRPRPDLPPHDPRRLPLRQHPGEARVLVALPGVAGEVHPHPQGQLLPAHVGPR

SEQ ID NO: 68483 - protein, 177 aa, Triticum aestivum
  peptide (1)..(177): Ceres Seq. ID no. 13596193
MLLFHKQLFSLRLPASPVIFSLRRALLSTSAATDAPPAPFAVDDYLVTTCGLTPEQALKAAKHVSHCKSTSNAESVLAYLAGPTLRFSKADIAHIVARDPRILNCSVDDTLKARVAILRGYGLSEDHVRTFLRMTPGVFRSVSIQEKLGFWLPFLGSPEKFIRILKGNYYLLTSDLE

SEQ ID NO: 68484 - DNA, 1488 bp, Triticum aestivum
  misc_feature (1)..(1488): Ceres Seq. ID no. 13596194
gaccctaaaccattcctcttctccacttcccctatcccttctttgctcgtggaaaaagctcgacctgctaatggcggcggcggcggacttcacgcagagcaagcaggccatgtcgtacgcgctctgcaagcacctgaacctcgatccgaatagcatatccagtacacttatcaaggagaatgatattgcgagcctattctcacatatcgtgacctcaccgcaggatgaggtcaagaagtgggttgagttctccagcaattttgttctaagtgatggagaacagcatgcattacttggtaatttgaatcaacatttgtcccagatgtcggtactattagctggtttcaaaccatcagcggcggacattattgtgtttgcaaccgtgcatgttttcatgtgtcatcttagtgacagtgagttgcagaaatatccaaatatattgcggtggatggactacattcagaatgttgttgattttggtatgacactgcaaaagataaacttgacgaaatctatcttcaacccacctgcacctgcaccttctcacccaaagaaagctgataaaggagatggtgatccaaattccaagaaagctgtttcaggacagaaggttgcggataagtcagatgtagctgctgactccaaaaaggctgcaggggagaataaggttcctggggataaggcaaatcctacttctaccaaaaacaacaaaccttctggggataaaaagaaagtccaagagaagactgccggcaaaacagaggcagctgcagagaaagctccacagaaaagtgcagaaaaggattctgagtgcagtgttagtatcctgaatatacaggtcggagttattcgcaaagcatggaaacatccatcagctgacagtcttctggtggaggagatagatttgggagatggcaatgtgcgtcaagttgttagtggtcttgcgaagttcttcagcccagatgaacttgttaatcgccatgttgtcttgatcacgaatgtgaagcctgggaagctgcgcgatgtaatgtctgctggattggtcttgtgtgcttcaaataaagatcatacagtcgtggagcctttgattcctccggaaggtgccaagcttggagaacgcatttcttttgctgggtttgatgggaagccggaagatgttctaaacccaaagaagaaacaattggacaagataacacctcatctccgtaccgacgagaatggaattgcaacgttccgaggggtaccattcactacatcagccggtctgtgtagatcctcagttccgaatgccgatgttaagtgagcaactcgttaagcatgctgatttcaaacattgatgtgctaagacacatgcagatgtaccattttgtcgtaatgcacatattaaatgttaccatatgttaacagagttgtcagttcttgacttttaatatctgaaaacaaattttgttttgtctatgcgcaaaaaggaaaaaaatggccctgatg

SEQ ID NO: 68485 - protein, 433 aa, Triticum aestivum
  peptide (1)..(433): Ceres Seq. ID no. 13596195
  misc_feature (278)..(373): Pfam Name: Putative tRNA binding domain Pfam Description: Putative tRNA binding domain
  misc_feature (232)..(433): Homolog of NCBI NO: 26352830 NR Description: unnamed protein product [Mus musculus]
  misc_feature (202)..(423): Homolog of NCBI NO: 28302254 NR Description: Similar to small inducible cytokine subfamily E,
  misc_feature (228)..(433): Homolog of NCBI NO: 6679639 NR Description: small inducible cytokine subfamily E, member 1
  misc_feature (228)..(433): Homolog of NCBI NO: 34860578 NR Description: endothelial monocyte activating polypeptide 2
  misc_feature (200)..(433): Homolog of NCBI NO: 12230649 NR Description: Probable methionyl-tRNA synthetase
  misc_feature (203)..(433): Homolog of NCBI NO: 15236350 NR Description: methionyl-tRNA synthetase - like protein
  misc_feature (58)..(432): Homolog of NCBI NO: 4140277 NR Description: aminoacyl-tRNA synthetase cofactor [Euplotes
  misc_feature (203)..(433): Homolog of NCBI NO: 25408718 NR Description: probable methionyl-tRNA synthetase
  misc_feature (203)..(433): Homolog of NCBI NO: 18405465 NR Description: methionyl-tRNA synthetase -related [Arabidopsis
  misc_feature (23)..(433): Homolog of NCBI NO: 34907808 NR Description: similar to methionyl-tRNA synthetase
TLNHSSSPLPLSLLCSWKKLDLLMAAAADFTQSKQAMSYALCKHLNLDPNSISSTLIKENDIASLFSHIVTSPQDEVKKWVEFSSNFVLSDGEQHALLGNLNQHLSQMSVLLAGFKPSAADIIVFATVHVFMCHLSDSELQKYPNILRWMDYIQNVVDFGMTLQKINLTKSIFNPPAPAPSHPKKADKGDGDPNSKKAVSGQKVADKSDVAADSKKAAGENKVPGDKANPTSTKNNKPSGDKKKVQEKTAGKTEAAAEKAPQKSAEKDSECSVSILNIQVGVIRKAWKHPSADSLLVEEIDLGDGNVRQVVSGLAKFFSPDELVNRHVVLITNVKPGKLRDVMSAGLVLCASNKDHTVVEPLIPPEGAKLGERISFAGFDGKPEDVLNPKKKQLDKITPHLRTDENGIATFRGVPFTTSAGLCRSSVPNADVK

SEQ ID NO: 68486 - protein, 410 aa, Triticum aestivum
  peptide (1)..(410): Ceres Seq. ID no. 13596196
  misc_feature (255)..(350): Pfam Name: Putative tRNA binding domain Pfam Description: Putative tRNA binding domain
  misc_feature (209)..(410): Homolog of NCBI NO: 26352830 NR Description: unnamed protein product [Mus musculus]
  misc_feature (179)..(400): Homolog of NCBI NO: 28302254 NR Description: Similar to small inducible cytokine subfamily E,
  misc_feature (205)..(410): Homolog of NCBI NO: 6679639 NR Description: small inducible cytokine subfamily E, member 1
  misc_feature (205)..(410): Homolog of NCBI NO: 34860578 NR Description: endothelial monocyte activating polypeptide 2
  misc_feature (177)..(410): Homolog of NCBI NO: 12230649 NR Description: Probable methionyl-tRNA synthetase
  misc_feature (180)..(410): Homolog of NCBI NO: 15236350 NR Description: methionyl-tRNA synthetase - like protein
  misc_feature (35)..(409): Homolog of NCBI NO: 4140277 NR Description: aminoacyl-tRNA synthetase cofactor [Euplotes
  misc_feature (180)..(410): Homolog of NCBI NO: 25408718 NR Description: probable methionyl-tRNA synthetase
  misc_feature (180)..(410): Homolog of NCBI NO: 18405465 NR Description: methionyl-tRNA synthetase -related [Arabidopsis
  misc_feature (1)..(410): Homolog of NCBI NO: 34907808 NR Description: similar to methionyl-tRNA synthetase
MAAAADFTQSKQAMSYALCKHLNLDPNSISSTLIKENDIASLFSHIVTSPQDEVKKWVEFSSNFVLSDGEQHALLGNLNQHLSQMSVLLAGFKPSAADIIVFATVHVFMCHLSDSELQKYPNILRWMDYIQNVVDFGMTLQKINLTKSIFNPPAPAPSHPKKADKGDGDPNSKKAVSGQKVADKSDVAADSKKAAGENKVPGDKANPTSTKNNKPSGDKKKVQEKTAGKTEAAAEKAPQKSAEKDSECSVSILNIQVGVIRKAWKHPSADSLLVEEIDLGDGNVRQVVSGLAKFFSPDELVNRHVVLITNVKPGKLRDVMSAGLVLCASNKDHTVVEPLIPPEGAKLGERISFAGFDGKPEDVLNPKKKQLDKITPHLRTDENGIATFRGVPFTTSAGLCRSSVPNADVK

SEQ ID NO: 68487 - protein, 397 aa, Triticum aestivum
  peptide (1)..(397): Ceres Seq. ID no. 13596197
  misc_feature (242)..(337): Pfam Name: Putative tRNA binding domain Pfam Description: Putative tRNA binding domain
  misc_feature (196)..(397): Homolog of NCBI NO: 26352830 NR Description: unnamed protein product [Mus musculus]
  misc_feature (166)..(387): Homolog of NCBI NO: 28302254 NR Description: Similar to small inducible cytokine subfamily E,
  misc_feature (192)..(397): Homolog of NCBI NO: 6679639 NR Description: small inducible cytokine subfamily E, member 1
  misc_feature (192)..(397): Homolog of NCBI NO: 34860578 NR Description: endothelial monocyte activating polypeptide 2
  misc_feature (164)..(397): Homolog of NCBI NO: 12230649 NR Description: Probable methionyl-tRNA synthetase
  misc_feature (167)..(397): Homolog of NCBI NO: 15236350 NR Description: methionyl-tRNA synthetase - like protein
  misc_feature (22)..(396): Homolog of NCBI NO: 4140277 NR Description: aminoacyl-tRNA synthetase cofactor [Euplotes
  misc_feature (167)..(397): Homolog of NCBI NO: 25408718 NR Description: probable methionyl-tRNA synthetase
  misc_feature (167)..(397): Homolog of NCBI NO: 18405465 NR Description: methionyl-tRNA synthetase -related [Arabidopsis
  misc_feature (1)..(397): Homolog of NCBI NO: 34907808 NR Description: similar to methionyl-tRNA synthetase
MSYALCKHLNLDPNSISSTLIKENDIASLFSHIVTSPQDEVKKWVEFSSNFVLSDGEQHALLGNLNQHLSQMSVLLAGFKPSAADIIVFATVHVFMCHLSDSELQKYPNILRWMDYIQNVVDFGMTLQKINLTKSIFNPPAPAPSHPKKADKGDGDPNSKKAVSGQKVADKSDVAADSKKAAGENKVPGDKANPTSTKNNKPSGDKKKVQEKTAGKTEAAAEKAPQKSAEKDSECSVSILNIQVGVIRKAWKHPSADSLLVEEIDLGDGNVRQVVSGLAKFFSPDELVNRHVVLITNVKPGKLRDVMSAGLVLCASNKDHTVVEPLIPPEGAKLGERISFAGFDGKPEDVLNPKKKQLDKITPHLRTDENGIATFRGVPFTTSAGLCRSSVPNADVK

SEQ ID NO: 68488 - DNA, 1367 bp, Triticum aestivum
  misc_feature (1)..(1367): Ceres Seq. ID no. 13596198
ccaacgcacaccaaacaaaaacaacaacaacaagatcaccggcgcatcccatcccagagcaaccacacacgcagacaagcaagaatggcgatcgccgtgagcgggcaatggactcgcctgcggacgctcggctgcggcgcgtcgggggccgtggtcaccctggcggccgacgccgcgtcgggggagctgttcgcggtcaagtccgtgcgcgcggcggacgcggcgcagctgagccgggagcaggggatcctctccgggctctcctcgccgcacgtcgtgggctgcatcggcggcggcggcgaccgcgacggctcctaccacctcttcctcgagttcgcccccggcggctcgctcgccgacgaggccgcgaggaatgggggccgcctggaggagcgcgccatccgggcgtacgcggcggacgtcctgcgcgggctcgcctacatccacggcaagtcgctcgtgcacggcgacgtcaagtcgaggaacgtagtgatcggcgccgacgggcgcgccatgatcgccgacttcgggtgcgcgagggccctcggttcggccgggccgatcggaggcacgccggcgttcatggccccggaggtggcacgaggcgaagagcaggggccggccgccgacgtgtgggctctcggctgcacggtcgtcgagatggccaccgggcgcgccccgtggggcgagatggacaacgtccttgccgccgtccaccggattgggtacacggacgccgtgccggaggtgccgacgtggctgtcagcggaggcgaagagtttcctcgccatgtgcttcgcgaggaacgcccgcgaccggtgcacggcggcgcagctcctggagcacccgttcgtggcattgcaggcaggagaggccaaggccaggtgggtgtctcccaagagcacgctcgacgcagcattctgggaatcggagaccgacgaggaagaggaggaggaggaggaggtttcggagagcccgtccgagaggatcaagtcattgtcgtgctccgtcttgccggactgggactccgacgaaggctggatcgacgtgctcggcgagcagtgcgaagcttgcgattcaccagcagcaaccaaggggccagctgatgtgtccagcagggcgccaagcaaagtgctcgggtccccggcggtgccagctgaagacgtagctgtcgtcggcaccctttcaagtgatgaacatgaagtggacgcagaggatgagcctttcggtgacgataccatcctggccgctgatccttcggtggaccgccagaaccaagtgtgttcgagctcagatagagatgtactttcatcatcacatgtaccctgtaataatcgagttcttgcaatagaaaagtttcgttttcc

SEQ ID NO: 68489 - protein, 455 aa, Triticum aestivum
  peptide (1)..(455): Ceres Seq. ID no. 13596199
  misc_feature (37)..(285): Pfam Name: Protein kinase domain Pfam Description: Protein kinase domain
  misc_feature (37)..(334): Homolog of NCBI NO: 19423926 NR Description: unknown protein [Arabidopsis thaliana]
  misc_feature (37)..(334): Homolog of NCBI NO: 15236903 NR Description: protein kinase family [Arabidopsis thaliana]
  misc_feature (36)..(334): Homolog of NCBI NO: 15225692 NR Description: protein kinase family [Arabidopsis thaliana]
  misc_feature (158)..(345): Homolog of NCBI NO: 19110337 NR Description: NPK1-related protein kinase-like protein [Zea
  misc_feature (35)..(439): Homolog of NCBI NO: 37530788 NR Description: putative NPK1-related protein kinase
  misc_feature (30)..(378): Homolog of NCBI NO: 37530786 NR Description: putative NPK1-related protein kinase
  misc_feature (36)..(362): Homolog of NCBI NO: 34911476 NR Description: NPK1-related protein kinase-like protein
  misc_feature (36)..(389): Homolog of NCBI NO: 34911474 NR Description: NPK1-related protein kinase-like protein
  misc_feature (29)..(394): Homolog of NCBI NO: 34911472 NR Description: NPK1-related protein kinase-like protein
  misc_feature (29)..(436): Homolog of NCBI NO: 34911466 NR Description: NPK1-related protein kinase-like protein
PTHTKQKQQQQDHRRIPSQSNHTRRQARMAIAVSGQWTRLRTLGCGASGAVVTLAADAASGELFAVKSVRAADAAQLSREQGILSGLSSPHVVGCIGGGGDRDGSYHLFLEFAPGGSLADEAARNGGRLEERAIRAYAADVLRGLAYIHGKSLVHGDVKSRNVVIGADGRAMIADFGCARALGSAGPIGGTPAFMAPEVARGEEQGPAADVWALGCTVVEMATGRAPWGEMDNVLAAVHRIGYTDAVPEVPTWLSAEAKSFLAMCFARNARDRCTAAQLLEHPFVALQAGEAKARWVSPKSTLDAAFWESETDEEEEEEEEVSESPSERIKSLSCSVLPDWDSDEGWIDVLGEQCEACDSPAATKGPADVSSRAPSKVLGSPAVPAEDVAVVGTLSSDEHEVDAEDEPFGDDTILAADPSVDRQNQVCSSSDRDVLSSSHVPCNNRVLAIEKFRF

SEQ ID NO: 68490 - protein, 427 aa, Triticum aestivum
  peptide (1)..(427): Ceres Seq. ID no. 13596200
  misc_feature (9)..(257): Pfam Name: Protein kinase domain Pfam Description: Protein kinase domain
  misc_feature (9)..(306): Homolog of NCBI NO: 19423926 NR Description: unknown protein [Arabidopsis thaliana]
  misc_feature (9)..(306): Homolog of NCBI NO: 15236903 NR Description: protein kinase family [Arabidopsis thaliana]
  misc_feature (8)..(306): Homolog of NCBI NO: 15225692 NR Description: protein kinase family [Arabidopsis thaliana]
  misc_feature (130)..(317): Homolog of NCBI NO: 19110337 NR Description: NPK1-related protein kinase-like protein [Zea
  misc_feature (7)..(411): Homolog of NCBI NO: 37530788 NR Description: putative NPK1-related protein kinase
  misc_feature (2)..(350): Homolog of NCBI NO: 37530786 NR Description: putative NPK1-related protein kinase
  misc_feature (8)..(334): Homolog of NCBI NO: 34911476 NR Description: NPK1-related protein kinase-like protein
  misc_feature (8)..(361): Homolog of NCBI NO: 34911474 NR Description: NPK1-related protein kinase-like protein
  misc_feature (1)..(366): Homolog of NCBI NO: 34911472 NR Description: NPK1-related protein kinase-like protein
  misc_feature (1)..(408): Homolog of NCBI NO: 34911466 NR Description: NPK1-related protein kinase-like protein
MAIAVSGQWTRLRTLGCGASGAVVTLAADAASGELFAVKSVRAADAAQLSREQGILSGLSSPHVVGCIGGGGDRDGSYHLFLEFAPGGSLADEAARNGGRLEERAIRAYAADVLRGLAYIHGKSLVHGDVKSRNVVIGADGRAMIADFGCARALGSAGPIGGTPAFMAPEVARGEEQGPAADVWALGCTVVEMATGRAPWGEMDNVLAAVHRIGYTDAVPEVPTWLSAEAKSFLAMCFARNARDRCTAAQLLEHPFVALQAGEAKARWVSPKSTLDAAFWESETDEEEEEEEEVSESPSERIKSLSCSVLPDWDSDEGWIDVLGEQCEACDSPAATKGPADVSSRAPSKVLGSPAVPAEDVAVVGTLSSDEHEVDAEDEPFGDDTILAADPSVDRQNQVCSSSDRDVLSSSHVPCNNRVLAIEKFRF

SEQ ID NO: 68491 - protein, 367 aa, Triticum aestivum
  peptide (1)..(367): Ceres Seq. ID no. 13596201
NAHQTKTTTTRSPAHPIPEQPHTQTSKNGDRRERAMDSPADARLRRVGGRGHPGGRRRVGGAVRGQVRARGGRGAAEPGAGDPLRALLAARRGLHRRRRRPRRLLPPLPRVRPRRLARRRGREEWGPPGGARHPGVRGGRPARARLHPRQVARARRRQVEERSDRRRRARHDRRLRVREGPRFGRADRRHAGVHGPGGGTRRRAGAGRRRVGSRLHGRRDGHRARPVGRDGQRPCRRPPDWVHGRRAGGADVAVSGGEEFPRHVLREERPRPVHGGAAPGAPVRGIAGRRGQGQVGVSQEHARRSILGIGDRRGRGGGGGGFGEPVREDQVIVVLRLAGLGLRRRLDRRARRAVRSLRFTSSNQGAS

SEQ ID NO: 68492 - DNA, 1492 bp, Triticum aestivum
  misc_feature (1)..(1492): Ceres Seq. ID no. 13596202
ctcctcaattcggaggaagcgagggctcgcgcccgatcgggttggtggctcgccgcgatggcgaccgacgccggcgccgccgacaggagctccgtcttccgcaagctccgcgccaaatccgacaataagatgtgcttcgactgcaacgccaagaaccccacctgggcctccgttacctacggcgtcttcctctgcatcgactgctccgccgtccaccgcagcctcggcgtccacgtctccttcgtcaggtcaacaaatttggattcatggaccccagaacagttgaaaatgatggtttatgggggaaacaaccgtgcacaagctttctttaagcagcatggttggactgatggtggaaagatcgaggcaaagtacacttcaagagctgctgacttatacagacagttgctcctcaaagaggtttctaaaagttcgacagaagatggcaataatagtgggccgccctccccagtcgcagcttctcagacttcaagccaagcagctgcatttcctgatttcaaactggtagaggtgccgaaagaagttgtgaatgagcctgagtctgaaattattcgttcacctaaagctcctacccattcattcaagaagccaatcggtggaaagaagcctggaagtaagactggtggacttggtgcgcgcaagcttacgacaaagccaagtgaaagcctctatgagcagaaacctgaagagccagctcctgccctgccatcggtggctgaaagcactacagctaggagcaaatctcatacttcccgatttgaatatgtggaaaatgtaccttctgctgggagcagctctgcggaaaaccaggcatttgggcatgttgcgcccccaaagtcttcaaactttttcggtgaatatgggatggacagtggatatcacaagaaatctacttctggtgcatccaaaatgcaggttgaggaaagtagtgaagcaagacagaagttctcaaatgcaaagtctatttcatcttctcagtttttcggtgatcaaaccaatttagaaaaagagggccaaatctccctccaaaaattctctgggtcctctgccatttcaagtgctgatctgtttggccaacaagcgaacaattctaatgcggatctgagtgcttcggatttgatcaacagaatctccttccaggccactcaggacttgacctctctcaagagcatggctgggcagactgggaagaagctgacatctatggcgtccaacatcatatctgatcttgatcggatcctctgagctgaatttacatatcacaggtcttcgatggtccgcctctcctgattgttactgcatgacaacagatttgtggtggtggctctgtatatgagtccataggaatcttaaaacttaaactcggtagagaaagaatgaggattttatcacaaatgctttctggctaaagtcgtaatagcatttggagtttcgtggggaaaaaaaaaaaaaaaaagcttatcgataccgt

SEQ ID NO: 68493 - protein, 421 aa, Triticum aestivum
  peptide (1)..(421): Ceres Seq. ID no. 15221798
  misc_feature (30)..(146): Pfam Name: Putative GTPase activating protein for Arf Pfam Description: Putative GTPase activating protein for Arf
  misc_feature (20)..(282): Homolog of NCBI NO: 12844436 NR Description: unnamed protein product [Mus musculus]
  misc_feature (301)..(419): Homolog of NCBI NO: 37362182 NR Description: ADP-ribosylation factor GTPase activating protein
  misc_feature (22)..(149): Homolog of NCBI NO: 37362182 NR Description: ADP-ribosylation factor GTPase activating protein
  misc_feature (28)..(413): Homolog of NCBI NO: 18403775 NR Description: ARF GTPase-activating domain-containing protein
  misc_feature (20)..(421): Homolog of NCBI NO: 15237500 NR Description: ARF GTPase-activating domain-containing protein
  misc_feature (17)..(421): Homolog of NCBI NO: 18414983 NR Description: ARF GTPase-activating domain-containing protein
  misc_feature (17)..(421): Homolog of NCBI NO: 7487780 NR Description: hypothetical protein T6K21.70 - Arabidopsis
  misc_feature (17)..(421): Homolog of NCBI NO: 13430530 NR Description: unknown protein [Arabidopsis thaliana]
  misc_feature (20)..(421): Homolog of NCBI NO: 29126345 NR Description: putative zinc finger protein
  misc_feature (20)..(421): Homolog of NCBI NO: 37537094 NR Description: unknown protein [Oryza sativa (japonica
LLNSEEARARARSGWWLAAMATDAGAADRSSVFRKLRAKSDNKMCFDCNAKNPTWASVTYGVFLCIDCSAVHRSLGVHVSFVRSTNLDSWTPEQLKMMVYGGNNRAQAFFKQHGWTDGGKIEAKYTSRAADLYRQLLLKEVSKSSTEDGNNSGPPSPVAASQTSSQAAAFPDFKLVEVPKEVVNEPESEIIRSPKAPTHSFKKPIGGKKPGSKTGGLGARKLTTKPSESLYEQKPEEPAPALPSVAESTTARSKSHTSRFEYVENVPSAGSSSAENQAFGHVAPPKSSNFFGEYGMDSGYHKKSTSGASKMQVEESSEARQKFSNAKSISSSQFFGDQTNLEKEGQISLQKFSGSSAISSADLFGQQANNSNADLSASDLINRISFQATQDLTSLKSMAGQTGKKLTSMASNIISDLDRIL

SEQ ID NO: 68494 - protein, 402 aa, Triticum aestivum
  peptide (1)..(402): Ceres Seq. ID no. 15221799
  misc_feature (11)..(127): Pfam Name: Putative GTPase activating protein for Arf Pfam Description: Putative GTPase activating protein for Arf
  misc_feature (1)..(263): Homolog of NCBI NO: 12844436 NR Description: unnamed protein product [Mus musculus]
  misc_feature (282)..(400): Homolog of NCBI NO: 37362182 NR Description: ADP-ribosylation factor GTPase activating protein
  misc_feature (3)..(130): Homolog of NCBI NO: 37362182 NR Description: ADP-ribosylation factor GTPase activating protein
  misc_feature (9)..(394): Homolog of NCBI NO: 18403775 NR Description: ARF GTPase-activating domain-containing protein
  misc_feature (1)..(402): Homolog of NCBI NO: 15237500 NR Description: ARF GTPase-activating domain-containing protein
  misc_feature (1)..(402): Homolog of NCBI NO: 18414983 NR Description: ARF GTPase-activating domain-containing protein
  misc_feature (1)..(402): Homolog of NCBI NO: 7487780 NR Description: hypothetical protein T6K21.70 - Arabidopsis
  misc_feature (1)..(402): Homolog of NCBI NO: 13430530 NR Description: unknown protein [Arabidopsis thaliana]
  misc_feature (1)..(402): Homolog of NCBI NO: 29126345 NR Description: putative zinc finger protein
  misc_feature (1)..(402): Homolog of NCBI NO: 37537094 NR Description: unknown protein [Oryza sativa (japonica
MATDAGAADRSSVFRKLRAKSDNKMCFDCNAKNPTWASVTYGVFLCIDCSAVHRSLGVHVSFVRSTNLDSWTPEQLKMMVYGGNNRAQAFFKQHGWTDGGKIEAKYTSRAADLYRQLLLKEVSKSSTEDGNNSGPPSPVAASQTSSQAAAFPDFKLVEVPKEVVNEPESEIIRSPKAPTHSFKKPIGGKKPGSKTGGLGARKLTTKPSESLYEQKPEEPAPALPSVAESTTARSKSHTSRFEYVENVPSAGSSSAENQAFGHVAPPKSSNFFGEYGMDSGYHKKSTSGASKMQVEESSEARQKFSNAKSISSSQFFGDQTNLEKEGQISLQKFSGSSAISSADLFGQQANNSNADLSASDLINRISFQATQDLTSLKSMAGQTGKKLTSMASNIISDLDRIL

SEQ ID NO: 68495 - protein, 378 aa, Triticum aestivum
  peptide (1)..(378): Ceres Seq. ID no. 15221800
  misc_feature (1)..(103): Pfam Name: Putative GTPase activating protein for Arf Pfam Description: Putative GTPase activating protein for Arf
  misc_feature (1)..(239): Homolog of NCBI NO: 12844436 NR Description: unnamed protein product [Mus musculus]
  misc_feature (258)..(376): Homolog of NCBI NO: 37362182 NR Description: ADP-ribosylation factor GTPase activating protein
  misc_feature (1)..(106): Homolog of NCBI NO: 37362182 NR Description: ADP-ribosylation factor GTPase activating protein
  misc_feature (1)..(370): Homolog of NCBI NO: 18403775 NR Description: ARF GTPase-activating domain-containing protein
  misc_feature (1)..(378): Homolog of NCBI NO: 15237500 NR Description: ARF GTPase-activating domain-containing protein
  misc_feature (1)..(378): Homolog of NCBI NO: 18414983 NR Description: ARF GTPase-activating domain-containing protein
  misc_feature (1)..(378): Homolog of NCBI NO: 7487780 NR Description: hypothetical protein T6K21.70 - Arabidopsis
  misc_feature (1)..(378): Homolog of NCBI NO: 13430530 NR Description: unknown protein [Arabidopsis thaliana]
  misc_feature (1)..(378): Homolog of NCBI NO: 29126345 NR Description: putative zinc finger protein
  misc_feature (1)..(378): Homolog of NCBI NO: 37537094 NR Description: unknown protein [Oryza sativa (japonica
MCFDCNAKNPTWASVTYGVFLCIDCSAVHRSLGVHVSFVRSTNLDSWTPEQLKMMVYGGNNRAQAFFKQHGWTDGGKIEAKYTSRAADLYRQLLLKEVSKSSTEDGNNSGPPSPVAASQTSSQAAAFPDFKLVEVPKEVVNEPESEIIRSPKAPTHSFKKPIGGKKPGSKTGGLGARKLTTKPSESLYEQKPEEPAPALPSVAESTTARSKSHTSRFEYVENVPSAGSSSAENQAFGHVAPPKSSNFFGEYGMDSGYHKKSTSGASKMQVEESSEARQKFSNAKSISSSQFFGDQTNLEKEGQISLQKFSGSSAISSADLFGQQANNSNADLSASDLINRISFQATQDLTSLKSMAGQTGKKLTSMASNIISDLDRIL

SEQ ID NO: 68496 - DNA, 1341 bp, Triticum aestivum
  misc_feature (1)..(1341): Ceres Seq. ID no. 14313548
atttctgttaggatgcgtatctgagtttgttattcctttttctgtttctgttaagcgtggcaggaggcgaggcggaggaggaggagaagatagagacgcaacccacgcgcggctagctagggtttgttccatctcccccctctctcgctcgctccctctctctcccgaggagcggaggaaggcggagggccggaggaggaagagaggcgggggatgtcgtcgtcgaactcgccgtgcgcggcgtgcaagctgctgaggcgcaagtgcacgcaggggtgcgtgttcgcgccctacttcccgccggaccagccggccaagttcgccaacgtgcacaaggtgttcggcgccagcaacgtctccaagctgctcaacgagatccccgtggcgcagcgggaggacgccgtcaactcgctcgcctacgaggccgaggcgcgcctgcgcgaccccgtctacggctgcgtcgcctacatctccgtcctccagctcaagatcaagcaggtgcgcgaggagatcgccaacgcgcgcaaggagctcgccggctacatcggccaggcagcctacgcgcccgtcgtccccgtgcagcacccccacgcgcagtacgccgccgccggcatgggcctcgtccagccccacccgcacccgcaccagcagatggcgatgcagcagcagcagcacccgtaccaccagcagcagatcgccgaggcgcagcacctggcggccgtcgtcgaggtggcgcgcgccgggcagcagcagcagcagcagcagcatcaccaccagcaccagcagcacgagatgatgatgatgcgccagacctacgccaacgtccacggcggggccgccgccgggccaacggtggccgtcgagcctccccagcaggccgcggcctacgacggcaccgccccgttcctcatccagcagcaagcgtcgccttccgccctgacctaccgcatggaggagccgtccccgccgccgcagtcctcgggccactcccacgtcgacatgtcccacgcgtcgcagcagcagcgtcatcagcacacggacggcagcgacgaggggagcgggggcgccccgacggcctgatggccatgctcccgcctccttcgcctccctgtgtcgatatttcccccctagctttttttccacggtttctttgatgttcgtttgttgggcacgagtcttttcgtcttcttgatcatatgatatcgaactggcatcgccatggctccccggaaagcatatccatggctcccggaggcggacaagctggtgatcttgctcaagcatatccatggcacactcagaacgatgtcactgttgcattagtttgtgtttggattcatc

SEQ ID NO: 68497 - protein, 288 aa, Triticum aestivum
  peptide (1)..(288): Ceres Seq. ID no. 14313549
  misc_feature (7)..(107): Pfam Name: Protein of unknown function DUF260 Pfam Description: Protein of unknown function DUF260
  misc_feature (4)..(122): Homolog of NCBI NO: 34896184 NR Description: contains ESTs C98868(E3203),C98869(E3203)~similar
  misc_feature (1)..(112): Homolog of NCBI NO: 29427827 NR Description: LOB domain protein 25
  misc_feature (1)..(112): Homolog of NCBI NO: 18405472 NR Description: lateral organ boundaries (LOB) domain protein 25
  misc_feature (1)..(112): Homolog of NCBI NO: 9294470 NR Description: gb|AAB60912.1~gene_id:MGF10.6~similar to unknown
  misc_feature (2)..(147): Homolog of NCBI NO: 15242624 NR Description: lateral organ boundaries (LOB) protein
  misc_feature (1)..(112): Homolog of NCBI NO: 21618134 NR Description: unknown [Arabidopsis thaliana]
  misc_feature (4)..(232): Homolog of NCBI NO: 34907508 NR Description: B1099D03.24 [Oryza sativa (japonica
  misc_feature (2)..(151): Homolog of NCBI NO: 15218746 NR Description: lateral organ boundaries (LOB) domain protein 6
  misc_feature (4)..(179): Homolog of NCBI NO: 15227870 NR Description: lateral organ boundaries (LOB) domain family
  misc_feature (1)..(272): Homolog of NCBI NO: 15240110 NR Description: lateral organ boundaries (LOB) domain family
MSSSNSPCAACKLLRRKCTQGCVFAPYFPPDQPAKFANVHKVFGASNVSKLLNEIPVAQREDAVNSLAYEAEARLRDPVYGCVAYISVLQLKIKQVREEIANARKELAGYIGQAAYAPVVPVQHPHAQYAAAGMGLVQPHPHPHQQMAMQQQQHPYHQQQIAEAQHLAAVVEVARAGQQQQQQQHHHQHQQHEMMMMRQTYANVHGGAAAGPTVAVEPPQQAAAYDGTAPFLIQQQASPSALTYRMEEPSPPPQSSGHSHVDMSHASQQQRHQHTDGSDEGSGGAPTA

SEQ ID NO: 68498 - protein, 155 aa, Triticum aestivum
  peptide (1)..(155): Ceres Seq. ID no. 14313550
  misc_feature (6)..(155): Pfam Name: Atrophin-1 family Pfam Description: Atrophin-1 family
  misc_feature (1)..(20): Homolog of NCBI NO: 29428042 NR Description: LOB domain protein 17
  misc_feature (1)..(25): Homolog of NCBI NO: 15230971 NR Description: lateral organ boundaries (LOB) domain protein,
  misc_feature (1)..(22): Homolog of NCBI NO: 18405401 NR Description: lateral organ boundaries (LOB) domain family
  misc_feature (1)..(14): Homolog of NCBI NO: 15242624 NR Description: lateral organ boundaries (LOB) protein
  misc_feature (1)..(99): Homolog of NCBI NO: 34907508 NR Description: B1099D03.24 [Oryza sativa (japonica
  misc_feature (1)..(18): Homolog of NCBI NO: 15218746 NR Description: lateral organ boundaries (LOB) domain protein 6
  misc_feature (1)..(46): Homolog of NCBI NO: 15227870 NR Description: lateral organ boundaries (LOB) domain family
  misc_feature (1)..(139): Homolog of NCBI NO: 15240110 NR Description: lateral organ boundaries (LOB) domain family
MGLVQPHPHPHQQMAMQQQQHPYHQQQIAEAQHLAAVVEVARAGQQQQQQQHHHQHQQHEMMMMRQTYANVHGGAAAGPTVAVEPPQQAAAYDGTAPFLIQQQASPSALTYRMEEPSPPPQSSGHSHVDMSHASQQQRHQHTDGSDEGSGGAPTA

SEQ ID NO: 68499 - DNA, 1491 bp, Triticum aestivum
  misc_feature (1)..(1491): Ceres Seq. ID no. 13596203
aacatcctaatcgaaaaatcaagggttttcctcctctcctctcctctcatagccttcgccgcttcaccgctgctgccttccctccctcgcaagcctcctccgcgtcgccgccgcccgcccgcccgatccgccatggcttccgacccgaacaaagattccaaatcggaggggctgtctgaggcaaaaaagggggcttccccgacagctggtgcaggccttcccagtccttttgatttttccaacatgagcagcttgcttaatgatccatctataagggagatggctgagcaaatcgccagcgaccctgtattcaaccagatggctgagcagcttcagaaaagtgcgcagggtgcaggggaacagggtgttccaaatttggatcctcaagcatacatggaaaccatgacacaagttatgcagaatcctcagtttatgtcaatggcggagcgtcttgggaatactcttatgcaggatcctgcaatgtccagtatgcttgagaacttgactagtccagctcacaaagagcagcttgaagagcgaatggcccgtatcaaggatgatccgtctttgaagccaattcttgatgagatagagcgtggtggtccatctgcaatggtgaagtactggaatgaccctgagattcttcaaaagattggccaggctatgtcattgaacttcccagtagatgctgctacttccactgtactatctggacctcaagaaactgatgaagaaggcgaggatgatgatgagtccattgtccataacaccgccagtgtcggtgatgcagagggtctgaagaaagcattagatggtggagcaaacaaggatgaagaagatttggagggaagaagggccttgcattttgcatgtggatacggcgagttgaagtgtgcagaaatccttctggaggcaggcgctgcagttgacgcactggataagaacaagaacaccccgctgcactatgccgctggatacggtcggaaggaatgcgtggatcttctcttgaagcacggcgctgctgtcacgctccaaaatctggatgggaagacccccatcgaggtggccaagctcaacagccagggcgaggtggtgaagctgcttgagcaggacgtgttcctatgaagcaaaaccctcagacccgccgcccatcgatcctaaaactctccctttggttcgggactctcggcggtgtcatatcctggcatggtgttggttgctttccctcggtttacttagttggtagctctcgcatgtaacctgtgtggccttgcggtgctacttaacaagagtccatcttctccgttggtttgatcctgctgtgcaaccctgttcttggtccatctccatgcacgggggatatgggttcgctgtgggagatgtcaggggtgatgatgattgcgtatatacccctttcgtgaatatttcttggtgttgaaaatgatacgtgaggtgcaaattttgtttaatctgttgtttaggctttctgct

SEQ ID NO: 68500 - protein, 374 aa, Triticum aestivum
  peptide (1)..(374): Ceres Seq. ID no. 13596204
  misc_feature (315)..(347): Pfam Name: Ankyrin repeat Pfam Description: Ankyrin repeat
  misc_feature (77)..(374): Homolog of NCBI NO: 30690372 NR Description: ankyrin repeat-containing protein 2 [Arabidopsis
  misc_feature (46)..(374): Homolog of NCBI NO: 4205079 NR Description: ankyrin repeat-containing protein 2 [Arabidopsis
  misc_feature (46)..(374): Homolog of NCBI NO: 3478700 NR Description: AFT protein [Arabidopsis thaliana]
  misc_feature (37)..(374): Homolog of NCBI NO: 38175562 NR Description: putative ankyrin domain protein
  misc_feature (46)..(374): Homolog of NCBI NO: 15237008 NR Description: ankyrin repeat-containing protein 2 [Arabidopsis
  misc_feature (50)..(374): Homolog of NCBI NO: 27573339 NR Description: unknown protein [Oryza sativa (japonica
  misc_feature (47)..(374): Homolog of NCBI NO: 29826244 NR Description: TGB12K interacting protein 3 [Nicotiana tabacum]
  misc_feature (47)..(374): Homolog of NCBI NO: 29826242 NR Description: TGB12K interacting protein 2 [Nicotiana tabacum]
  misc_feature (46)..(374): Homolog of NCBI NO: 24637568 NR Description: ankyrin domain protein [Nicotiana tabacum]
  misc_feature (46)..(374): Homolog of NCBI NO: 13310811 NR Description: ankyrin-repeat protein HBP1 [Nicotiana tabacum]
NILIEKSRVFLLSSPLIAFAASPLLPSLPRKPPPRRRRPPARSAMASDPNKDSKSEGLSEAKKGASPTAGAGLPSPFDFSNMSSLLNDPSIREMAEQIASDPVFNQMAEQLQKSAQGAGEQGVPNLDPQAYMETMTQVMQNPQFMSMAERLGNTLMQDPAMSSMLENLTSPAHKEQLEERMARIKDDPSLKPILDEIERGGPSAMVKYWNDPEILQKIGQAMSLNFPVDAATSTVLSGPQETDEEGEDDDESIVHNTASVGDAEGLKKALDGGANKDEEDLEGRRALHFACGYGELKCAEILLEAGAAVDALDKNKNTPLHYAAGYGRKECVDLLLKHGAAVTLQNLDGKTPIEVAKLNSQGEVVKLLEQDVFL

SEQ ID NO: 68501 - protein, 330 aa, Triticum aestivum
  peptide (1)..(330): Ceres Seq. ID no. 13596205
  misc_feature (271)..(303): Pfam Name: Ankyrin repeat Pfam Description: Ankyrin repeat
  misc_feature (33)..(330): Homolog of NCBI NO: 30690372 NR Description: ankyrin repeat-containing protein 2 [Arabidopsis
  misc_feature (2)..(330): Homolog of NCBI NO: 4205079 NR Description: ankyrin repeat-containing protein 2 [Arabidopsis
  misc_feature (2)..(330): Homolog of NCBI NO: 3478700 NR Description: AFT protein [Arabidopsis thaliana]
  misc_feature (1)..(330): Homolog of NCBI NO: 38175562 NR Description: putative ankyrin domain protein
  misc_feature (2)..(330): Homolog of NCBI NO: 15237008 NR Description: ankyrin repeat-containing protein 2 [Arabidopsis
  misc_feature (6)..(330): Homolog of NCBI NO: 27573339 NR Description: unknown protein [Oryza sativa (japonica
  misc_feature (3)..(330): Homolog of NCBI NO: 29826244 NR Description: TGB12K interacting protein 3 [Nicotiana tabacum]
  misc_feature (3)..(330): Homolog of NCBI NO: 29826242 NR Description: TGB12K interacting protein 2 [Nicotiana tabacum]
  misc_feature (2)..(330): Homolog of NCBI NO: 24637568 NR Description: ankyrin domain protein [Nicotiana tabacum]
  misc_feature (2)..(330): Homolog of NCBI NO: 13310811 NR Description: ankyrin-repeat protein HBP1 [Nicotiana tabacum]
MASDPNKDSKSEGLSEAKKGASPTAGAGLPSPFDFSNMSSLLNDPSIREMAEQIASDPVFNQMAEQLQKSAQGAGEQGVPNLDPQAYMETMTQVMQNPQFMSMAERLGNTLMQDPAMSSMLENLTSPAHKEQLEERMARIKDDPSLKPILDEIERGGPSAMVKYWNDPEILQKIGQAMSLNFPVDAATSTVLSGPQETDEEGEDDDESIVHNTASVGDAEGLKKALDGGANKDEEDLEGRRALHFACGYGELKCAEILLEAGAAVDALDKNKNTPLHYAAGYGRKECVDLLLKHGAAVTLQNLDGKTPIEVAKLNSQGEVVKLLEQDVFL

SEQ ID NO: 68502 - protein, 293 aa, Triticum aestivum
  peptide (1)..(293): Ceres Seq. ID no. 13596206
  misc_feature (234)..(266): Pfam Name: Ankyrin repeat Pfam Description: Ankyrin repeat
  misc_feature (1)..(293): Homolog of NCBI NO: 30690372 NR Description: ankyrin repeat-containing protein 2 [Arabidopsis
  misc_feature (1)..(293): Homolog of NCBI NO: 4205079 NR Description: ankyrin repeat-containing protein 2 [Arabidopsis
  misc_feature (1)..(293): Homolog of NCBI NO: 3478700 NR Description: AFT protein [Arabidopsis thaliana]
  misc_feature (1)..(293): Homolog of NCBI NO: 38175562 NR Description: putative ankyrin domain protein
  misc_feature (1)..(293): Homolog of NCBI NO: 15237008 NR Description: ankyrin repeat-containing protein 2 [Arabidopsis
  misc_feature (1)..(293): Homolog of NCBI NO: 27573339 NR Description: unknown protein [Oryza sativa (japonica
  misc_feature (1)..(293): Homolog of NCBI NO: 29826244 NR Description: TGB12K interacting protein 3 [Nicotiana tabacum]
  misc_feature (1)..(293): Homolog of NCBI NO: 29826242 NR Description: TGB12K interacting protein 2 [Nicotiana tabacum]
  misc_feature (1)..(293): Homolog of NCBI NO: 24637568 NR Description: ankyrin domain protein [Nicotiana tabacum]
  misc_feature (1)..(293): Homolog of NCBI NO: 13310811 NR Description: ankyrin-repeat protein HBP1 [Nicotiana tabacum]
MSSLLNDPSIREMAEQIASDPVFNQMAEQLQKSAQGAGEQGVPNLDPQAYMETMTQVMQNPQFMSMAERLGNTLMQDPAMSSMLENLTSPAHKEQLEERMARIKDDPSLKPILDEIERGGPSAMVKYWNDPEILQKIGQAMSLNFPVDAATSTVLSGPQETDEEGEDDDESIVHNTASVGDAEGLKKALDGGANKDEEDLEGRRALHFACGYGELKCAEILLEAGAAVDALDKNKNTPLHYAAGYGRKECVDLLLKHGAAVTLQNLDGKTPIEVAKLNSQGEVVKLLEQDVFL

SEQ ID NO: 68503 - DNA, 1539 bp, Triticum aestivum
  misc_feature (1)..(1539): Ceres Seq. ID no. 14303635
atctttctctctccccctctctcccacagcacatgcgcgtcgcccgccgacacccgcacccacagcagccagagcagcagcggcagcaatggagcatcggggcctgcttctcgtcctcgccgccgcgctgtgcctcgcgggcgccgccgacgccaggcacgccaagaagtcgtaccaggccgtcttcagcttcggggactcgctctccgacgccggcaacctcatcgtcgacggcatccccaaggccctcaccaccgcgcgcgcgccctacggcatgaccttcttcggccgccccaccggccgctgctccaacggccgcgtcgtcgtcgacttcctcgccgagcatttcgggctgccgctgccgccggcgtcgcaggcgcatggcaaggacttcaagaagggggccaacttcgccatcaccggcgccacggcgctggagtactccttcttcaaggcgcatggcatcgaccagcgcatttggaacaccggctccatcaacacccagatcggctggctccagaagatgaagccgtcgctttgcaagtcggagaaagagtgcaaggactacttcagcaagtccctgtttgtggtgggagagtttggggggaacgactacaacgctcctctcttctccggcgtcgccttctccgatgtgaagacctacgtgccgctggtcgccaaagccatcgccaacggcgtcgagaaattgatcgagcttggcgcgacagacctgttggtgcctggaattcttccgatcgggtgcttcccattgtacctgactctctacaacagcagcaagaagtcggactacaacgcgcgcaccgggtgcctccggagatacaaccgcctggccttccaccacaacagagagctcaagcagcagcttgaccagcttcagaagaagtacccaaagacgaaaatcatgtacggcgattacttcaaagctgcaatgcagtttgtcgtcagccccgggaaattcggtttcagcacggcagtgcaggcatgctgcggcgccggagggtcgggcgcctacaacttcaacctgaagaagaagtgcggcgaggcgggcgcgagcgtgtgctccaacccgtcggcgtacgtgagctgggacggcatccacatgaccgaggccgcctaccgcatggtcgccaacggctggctgaatggcccctatgcctctcccccgatcatgaagtgaaaatccagatggttagccctgtatgtacgtaacgttgctgctgctgctgctgatgatgatgatgatggaggggatcgacggatatgcagagcgcttcaggcgctggagatgttaagttatgatgatgggtaaaatcgctcagtctgttcgttgagagtttgtataaaccgtgccggtatagatatgtttttccagctgaaaagctctagtagtacacatgtacgtaccttgtatgacatgctacctgattcttattcatttaccaagacttgcataagaataaattattaaatattatggaagcaagaggatcagaattgtgcgtttgcgcttcctgaacc

SEQ ID NO: 68504 - protein, 398 aa, Triticum aestivum
  peptide (1)..(398): Ceres Seq. ID no. 14303636
  misc_feature (61)..(386): Pfam Name: GDSL-like Lipase/Acylhydrolase Pfam Description: GDSL-like Lipase/Acylhydrolase
  misc_feature (58)..(238): Homolog of NCBI NO: 34912612 NR Description: P0046B10.23 [Oryza sativa (japonica
  misc_feature (56)..(398): Homolog of NCBI NO: 25336243 NR Description: pnrotein F1K23.16 [imported] - Arabidopsis
  misc_feature (57)..(395): Homolog of NCBI NO: 10764858 NR Description: F1K23.17 [Arabidopsis thaliana]
  misc_feature (7)..(395): Homolog of NCBI NO: 10764858 NR Description: F1K23.17 [Arabidopsis thaliana]
  misc_feature (35)..(394): Homolog of NCBI NO: 21553708 NR Description: GDSL-motif lipase/hydrolase-like protein
  misc_feature (35)..(394): Homolog of NCBI NO: 15242538 NR Description: GDSL-motif lipase/hydrolase protein [Arabidopsis
  misc_feature (35)..(397): Homolog of NCBI NO: 34903996 NR Description: unnamed protein product [Oryza sativa (japonica
  misc_feature (44)..(397): Homolog of NCBI NO: 34903978 NR Description: unnamed protein product [Oryza sativa (japonica
  misc_feature (38)..(398): Homolog of NCBI NO: 34903958 NR Description: OSJNBa0038J17.24 [Oryza sativa (japonica
  misc_feature (36)..(397): Homolog of NCBI NO: 34903956 NR Description: OSJNBa0038J17.23 [Oryza sativa (japonica
SFSLPLSPTAHARRPPTPAPTAARAAAAAMEHRGLLLVLAAALCLAGAADARHAKKSYQAVFSFGDSLSDAGNLIVDGIPKALTTARAPYGMTFFGRPTGRCSNGRVVVDFLAEHFGLPLPPASQAHGKDFKKGANFAITGATALEYSFFKAHGIDQRIWNTGSINTQIGWLQKMKPSLCKSEKECKDYFSKSLFVVGEFGGNDYNAPLFSGVAFSDVKTYVPLVAKAIANGVEKLIELGATDLLVPGILPIGCFPLYLTLYNSSKKSDYNARTGCLRRYNRLAFHHNRELKQQLDQLQKKYPKTKIMYGDYFKAAMQFVVSPGKFGFSTAVQACCGAGGSGAYNFNLKKKCGEAGASVCSNPSAYVSWDGIHMTEAAYRMVANGWLNGPYASPPIMK

SEQ ID NO: 68505 - protein, 369 aa, Triticum aestivum
  peptide (1)..(369): Ceres Seq. ID no. 14303637
  misc_feature (32)..(357): Pfam Name: GDSL-like Lipase/Acylhydrolase Pfam Description: GDSL-like Lipase/Acylhydrolase
  misc_feature (29)..(209): Homolog of NCBI NO: 34912612 NR Description: P0046B10.23 [Oryza sativa (japonica
  misc_feature (27)..(369): Homolog of NCBI NO: 25336243 NR Description: pnrotein F1K23.16 [imported] - Arabidopsis
  misc_feature (28)..(366): Homolog of NCBI NO: 10764858 NR Description: F1K23.17 [Arabidopsis thaliana]
  misc_feature (1)..(366): Homolog of NCBI NO: 10764858 NR Description: F1K23.17 [Arabidopsis thaliana]
  misc_feature (6)..(365): Homolog of NCBI NO: 21553708 NR Description: GDSL-motif lipase/hydrolase-like protein
  misc_feature (6)..(365): Homolog of NCBI NO: 15242538 NR Description: GDSL-motif lipase/hydrolase protein [Arabidopsis
  misc_feature (6)..(368): Homolog of NCBI NO: 34903996 NR Description: unnamed protein product [Oryza sativa (japonica
  misc_feature (15)..(368): Homolog of NCBI NO: 34903978 NR Description: unnamed protein product [Oryza sativa (japonica
  misc_feature (9)..(369): Homolog of NCBI NO: 34903958 NR Description: OSJNBa0038J17.24 [Oryza sativa (japonica
  misc_feature (7)..(368): Homolog of NCBI NO: 34903956 NR Description: OSJNBa0038J17.23 [Oryza sativa (japonica
MEHRGLLLVLAAALCLAGAADARHAKKSYQAVFSFGDSLSDAGNLIVDGIPKALTTARAPYGMTFFGRPTGRCSNGRVVVDFLAEHFGLPLPPASQAHGKDFKKGANFAITGATALEYSFFKAHGIDQRIWNTGSINTQIGWLQKMKPSLCKSEKECKDYFSKSLFVVGEFGGNDYNAPLFSGVAFSDVKTYVPLVAKAIANGVEKLIELGATDLLVPGILPIGCFPLYLTLYNSSKKSDYNARTGCLRRYNRLAFHHNRELKQQLDQLQKKYPKTKIMYGDYFKAAMQFVVSPGKFGFSTAVQACCGAGGSGAYNFNLKKKCGEAGASVCSNPSAYVSWDGIHMTEAAYRMVANGWLNGPYASPPIMK

SEQ ID NO: 68506 - protein, 307 aa, Triticum aestivum
  peptide (1)..(307): Ceres Seq. ID no. 14303638
  misc_feature (1)..(295): Pfam Name: GDSL-like Lipase/Acylhydrolase Pfam Description: GDSL-like Lipase/Acylhydrolase
  misc_feature (1)..(147): Homolog of NCBI NO: 34912612 NR Description: P0046B10.23 [Oryza sativa (japonica
  misc_feature (1)..(307): Homolog of NCBI NO: 25336243 NR Description: pnrotein F1K23.16 [imported] - Arabidopsis
  misc_feature (1)..(304): Homolog of NCBI NO: 10764858 NR Description: F1K23.17 [Arabidopsis thaliana]
  misc_feature (1)..(304): Homolog of NCBI NO: 10764858 NR Description: F1K23.17 [Arabidopsis thaliana]
  misc_feature (1)..(303): Homolog of NCBI NO: 21553708 NR Description: GDSL-motif lipase/hydrolase-like protein
  misc_feature (1)..(303): Homolog of NCBI NO: 15242538 NR Description: GDSL-motif lipase/hydrolase protein [Arabidopsis
  misc_feature (1)..(306): Homolog of NCBI NO: 34903996 NR Description: unnamed protein product [Oryza sativa (japonica
  misc_feature (1)..(306): Homolog of NCBI NO: 34903978 NR Description: unnamed protein product [Oryza sativa (japonica
  misc_feature (1)..(307): Homolog of NCBI NO: 34903958 NR Description: OSJNBa0038J17.24 [Oryza sativa (japonica
  misc_feature (1)..(306): Homolog of NCBI NO: 34903956 NR Description: OSJNBa0038J17.23 [Oryza sativa (japonica
MTFFGRPTGRCSNGRVVVDFLAEHFGLPLPPASQAHGKDFKKGANFAITGATALEYSFFKAHGIDQRIWNTGSINTQIGWLQKMKPSLCKSEKECKDYFSKSLFVVGEFGGNDYNAPLFSGVAFSDVKTYVPLVAKAIANGVEKLIELGATDLLVPGILPIGCFPLYLTLYNSSKKSDYNARTGCLRRYNRLAFHHNRELKQQLDQLQKKYPKTKIMYGDYFKAAMQFVVSPGKFGFSTAVQACCGAGGSGAYNFNLKKKCGEAGASVCSNPSAYVSWDGIHMTEAAYRMVANGWLNGPYASPPIMK

SEQ ID NO: 68507 - DNA, 1267 bp, Triticum aestivum
  misc_feature (1)..(1267): Ceres Seq. ID no. 13596208
aaccatcgttcacccccaattccaccttcacctctctccaccgccggcgtccggcgaccgccgcttgccggcctaccggcgatggaccgcgcatccacttgatggatccgtcggcggcagggcctgcgccaccacgggccgccccgggcagaggggcggacccagcggagcggcgcaggcggtggtgcgggatcacagtccgcggggccctcgtgatgctcttccccatcgccgtgtcattcctcttctcctttatcttcggcatcgctggcctcctcctcggcgggctctcctccaacgcgtccgtctccatgccctccacctgccgcatcctctctaccggcctggacattcggtcatctaaggtttgcgagcttggactgttgaactataaagctaagcatgtattttacccctcgagtaatcgaagattccgctgccatgatgactattactgggcttcggtttttgaggttgaatacacagaatatttttctggtcaaacatcttatgcaatggcagaagctccaaaagaggctcttcctcacaattgccggcctgattttggtgctgtatggtcaacaacagcaaagttcaaggtcaatgaatcatacaagtgcaggtacacactggggagtaccaaagctgacatttgttcagacaagctattcaattgcactgctgagaatccttcaataattgaaatgctgaaaaggatttttgtactgttttcaaagttctgcaagtcaaaagatttcagttcgtggtggatgcttggatatgcggcagcaggggtcgtggcgggcgtgctgagttccatactcatcacaatagcagtaagaatcctgcgaggagtgttccttgctgccgccaggcgggctgtgagaaaccatagcatcagggtgtttgcttaccgtttcaagcgggcgtgccttcttgttgcgtatatatctttcgttggctggatcaccttgcagtacagcaaaatggttgggttgaaggagcttgtgctggacttcaaactcttggagaggttcttgtaaaatgtaaacgggtttcggcaatgtatgtcaaataagccgatccccttgtgtgatgtaacctagtgtaacttatcctgccttgcttcgatatgcagccgcccatgaacaggtggatgaatcatgggtagctagtagctacagtgggcatggagtaactcccatctgttgtaacctgcaatgcaacatgtatcacaatcatcgtaatgacagtttggggggcttgg

SEQ ID NO: 68508 - protein, 346 aa, Triticum aestivum
  peptide (1)..(346): Ceres Seq. ID no. 13596209
  misc_feature (94)..(330): Homolog of NCBI NO: 7459450 NR Description: hypothetical protein T18B16.110 - Arabidopsis
  misc_feature (56)..(330): Homolog of NCBI NO: 18415248 NR Description: expressed protein [Arabidopsis thaliana]
  misc_feature (56)..(330): Homolog of NCBI NO: 21553578 NR Description: unknown [Arabidopsis thaliana]
  misc_feature (34)..(346): Homolog of NCBI NO: 38345775 NR Description: OSJNBa0083N12.13 [Oryza sativa (japonica
PSFTPNSTFTSLHRRRPATAACRPTGDGPRIHLMDPSAAGPAPPRAAPGRGADPAERRRRWCGITVRGALVMLFPIAVSFLFSFIFGIAGLLLGGLSSNASVSMPSTCRILSTGLDIRSSKVCELGLLNYKAKHVFYPSSNRRFRCHDDYYWASVFEVEYTEYFSGQTSYAMAEAPKEALPHNCRPDFGAVWSTTAKFKVNESYKCRYTLGSTKADICSDKLFNCTAENPSIIEMLKRIFVLFSKFCKSKDFSSWWMLGYAAAGVVAGVLSSILITIAVRILRGVFLAAARRAVRNHSIRVFAYRFKRACLLVAYISFVGWITLQYSKMVGLKELVLDFKLLERFL

SEQ ID NO: 68509 - protein, 313 aa, Triticum aestivum
  peptide (1)..(313): Ceres Seq. ID no. 13596210
  misc_feature (61)..(297): Homolog of NCBI NO: 7459450 NR Description: hypothetical protein T18B16.110 - Arabidopsis
  misc_feature (23)..(297): Homolog of NCBI NO: 18415248 NR Description: expressed protein [Arabidopsis thaliana]
  misc_feature (23)..(297): Homolog of NCBI NO: 21553578 NR Description: unknown [Arabidopsis thaliana]
  misc_feature (1)..(313): Homolog of NCBI NO: 38345775 NR Description: OSJNBa0083N12.13 [Oryza sativa (japonica
MDPSAAGPAPPRAAPGRGADPAERRRRWCGITVRGALVMLFPIAVSFLFSFIFGIAGLLLGGLSSNASVSMPSTCRILSTGLDIRSSKVCELGLLNYKAKHVFYPSSNRRFRCHDDYYWASVFEVEYTEYFSGQTSYAMAEAPKEALPHNCRPDFGAVWSTTAKFKVNESYKCRYTLGSTKADICSDKLFNCTAENPSIIEMLKRIFVLFSKFCKSKDFSSWWMLGYAAAGVVAGVLSSILITIAVRILRGVFLAAARRAVRNHSIRVFAYRFKRACLLVAYISFVGWITLQYSKMVGLKELVLDFKLLERFL

SEQ ID NO: 68510 - protein, 275 aa, Triticum aestivum
  peptide (1)..(275): Ceres Seq. ID no. 13596211
  misc_feature (23)..(259): Homolog of NCBI NO: 7459450 NR Description: hypothetical protein T18B16.110 - Arabidopsis
  misc_feature (1)..(259): Homolog of NCBI NO: 18415248 NR Description: expressed protein [Arabidopsis thaliana]
  misc_feature (1)..(259): Homolog of NCBI NO: 21553578 NR Description: unknown [Arabidopsis thaliana]
  misc_feature (1)..(275): Homolog of NCBI NO: 38345775 NR Description: OSJNBa0083N12.13 [Oryza sativa (japonica
MLFPIAVSFLFSFIFGIAGLLLGGLSSNASVSMPSTCRILSTGLDIRSSKVCELGLLNYKAKHVFYPSSNRRFRCHDDYYWASVFEVEYTEYFSGQTSYAMAEAPKEALPHNCRPDFGAVWSTTAKFKVNESYKCRYTLGSTKADICSDKLFNCTAENPSIIEMLKRIFVLFSKFCKSKDFSSWWMLGYAAAGVVAGVLSSILITIAVRILRGVFLAAARRAVRNHSIRVFAYRFKRACLLVAYISFVGWITLQYSKMVGLKELVLDFKLLERFL

SEQ ID NO: 68511 - DNA, 1154 bp, Triticum aestivum
  misc_feature (1)..(1154): Ceres Seq. ID no. 15227004
atccacacagcgctccgctctcataccccatcacgacattcacagtcgatcaagtcacaacccatgatgcaccgtgctacgatcatcgcgctgatctgctgcctcgtggccggcggcagggcgcgcgcacagccgttcgactacccggcggcgaggctctccacgacctgggccaacacggacgccgccctgccgcaccacgtcgtctacaccgacggctccgtggcgcgggccgccctgctgcggctcaacccggcgggcctcggcccctcctacgccttcggcttcttctgcaccgccagtcaaccgcgcggcaacggccccgcggccccgtgcacggagttcctgctcggcgtcgccgtcgtctactgcaacagcggcgcgggcatgacgttcgtcacggccggcgtcccgcaggtcgtctggtcggccaaccgcggcagccccgtcagtgagggcgccaccacggagctcacgccggagggcgacctggttctcaggtcgggccccggcggagcggtcttgtggtccaccggcaccaagggccggtccgtcgccggggcgcgcatcggcagcgacggcaacctggtgctgttcgacgggcgcaacgccacggtgtggcagtcgttcgaccaccccacgaacgcgctcctcgtcgggcagtctctgaagcacggcgcgcggctcaccgccaacgcgtcgacggcggactggcgcgacggcaggctctacctcgccgtggacgacgatggactgaacgcctacgtcaacgccacgccgccgcagcgctactaccacctcagcctcagcgagaccgcatccggcgcctacgcgacgtacaccaacggcagcctcacggtgtccgcccggcccggtgcgccgccgctggccgccatccagctgcccaccgtgggcgccggcacggtgcagtacatgcggctggagcacgacggccacctccggatctacgagtggcgctcgggctgggcgccggtgtacgacgtgctcaagtctgctacgacctgatgaatcctgagcaccatacatacatacatacatacatcaaggcatatggctatgtcctagaaaaatatgacacgaataaagttctgcgacatgtatgtacaaattccattatataaaaagaatgacag

SEQ ID NO: 68512 - protein, 341 aa, Triticum aestivum
  peptide (1)..(341): Ceres Seq. ID no. 15227005
  misc_feature (137)..(242): Pfam Name: D-mannose binding lectin Pfam Description: D-mannose binding lectin
  misc_feature (141)..(323): Homolog of NCBI NO: 27463662 NR Description: secreted glycoprotein [Linum usitatissimum]
  misc_feature (134)..(269): Homolog of NCBI NO: 34921531 NR Description: Epidermis-specific secreted glycoprotein EP1
  misc_feature (71)..(335): Homolog of NCBI NO: 34903742 NR Description: unnamed protein product [Oryza sativa (japonica
  misc_feature (109)..(337): Homolog of NCBI NO: 34903744 NR Description: unnamed protein product [Oryza sativa (japonica
  misc_feature (62)..(336): Homolog of NCBI NO: 38344585 NR Description: OSJNBa0079M09.1 [Oryza sativa (japonica
  misc_feature (36)..(337): Homolog of NCBI NO: 32489779 NR Description: OSJNBb0018A10.10 [Oryza sativa (japonica
  misc_feature (17)..(337): Homolog of NCBI NO: 32489780 NR Description: OSJNBb0018A10.11 [Oryza sativa (japonica
  misc_feature (26)..(337): Homolog of NCBI NO: 32489781 NR Description: OSJNBb0018A10.12 [Oryza sativa (japonica
  misc_feature (28)..(337): Homolog of NCBI NO: 38344588 NR Description: OSJNBa0079M09.4 [Oryza sativa (japonica
  misc_feature (22)..(336): Homolog of NCBI NO: 34905752 NR Description: protein kinase-like [Oryza sativa (japonica
IHTALRSHTPSRHSQSIKSQPMMHRATIIALICCLVAGGRARAQPFDYPAARLSTTWANTDAALPHHVVYTDGSVARAALLRLNPAGLGPSYAFGFFCTASQPRGNGPAAPCTEFLLGVAVVYCNSGAGMTFVTAGVPQVVWSANRGSPVSEGATTELTPEGDLVLRSGPGGAVLWSTGTKGRSVAGARIGSDGNLVLFDGRNATVWQSFDHPTNALLVGQSLKHGARLTANASTADWRDGRLYLAVDDDGLNAYVNATPPQRYYHLSLSETASGAYATYTNGSLTVSARPGAPPLAAIQLPTVGAGTVQYMRLEHDGHLRIYEWRSGWAPVYDVLKSATT

SEQ ID NO: 68513 - protein, 320 aa, Triticum aestivum
  peptide (1)..(320): Ceres Seq. ID no. 15227006
  misc_feature (116)..(221): Pfam Name: D-mannose binding lectin Pfam Description: D-mannose binding lectin
  misc_feature (120)..(302): Homolog of NCBI NO: 27463662 NR Description: secreted glycoprotein [Linum usitatissimum]
  misc_feature (113)..(248): Homolog of NCBI NO: 34921531 NR Description: Epidermis-specific secreted glycoprotein EP1
  misc_feature (50)..(314): Homolog of NCBI NO: 34903742 NR Description: unnamed protein product [Oryza sativa (japonica
  misc_feature (88)..(316): Homolog of NCBI NO: 34903744 NR Description: unnamed protein product [Oryza sativa (japonica
  misc_feature (41)..(315): Homolog of NCBI NO: 38344585 NR Description: OSJNBa0079M09.1 [Oryza sativa (japonica
  misc_feature (15)..(316): Homolog of NCBI NO: 32489779 NR Description: OSJNBb0018A10.10 [Oryza sativa (japonica
  misc_feature (1)..(316): Homolog of NCBI NO: 32489780 NR Description: OSJNBb0018A10.11 [Oryza sativa (japonica
  misc_feature (5)..(316): Homolog of NCBI NO: 32489781 NR Description: OSJNBb0018A10.12 [Oryza sativa (japonica
  misc_feature (7)..(316): Homolog of NCBI NO: 38344588 NR Description: OSJNBa0079M09.4 [Oryza sativa (japonica
  misc_feature (1)..(315): Homolog of NCBI NO: 34905752 NR Description: protein kinase-like [Oryza sativa (japonica
MMHRATIIALICCLVAGGRARAQPFDYPAARLSTTWANTDAALPHHVVYTDGSVARAALLRLNPAGLGPSYAFGFFCTASQPRGNGPAAPCTEFLLGVAVVYCNSGAGMTFVTAGVPQVVWSANRGSPVSEGATTELTPEGDLVLRSGPGGAVLWSTGTKGRSVAGARIGSDGNLVLFDGRNATVWQSFDHPTNALLVGQSLKHGARLTANASTADWRDGRLYLAVDDDGLNAYVNATPPQRYYHLSLSETASGAYATYTNGSLTVSARPGAPPLAAIQLPTVGAGTVQYMRLEHDGHLRIYEWRSGWAPVYDVLKSATT

SEQ ID NO: 68514 - protein, 319 aa, Triticum aestivum
  peptide (1)..(319): Ceres Seq. ID no. 15227007
  misc_feature (115)..(220): Pfam Name: D-mannose binding lectin Pfam Description: D-mannose binding lectin
  misc_feature (119)..(301): Homolog of NCBI NO: 27463662 NR Description: secreted glycoprotein [Linum usitatissimum]
  misc_feature (112)..(247): Homolog of NCBI NO: 34921531 NR Description: Epidermis-specific secreted glycoprotein EP1
  misc_feature (49)..(313): Homolog of NCBI NO: 34903742 NR Description: unnamed protein product [Oryza sativa (japonica
  misc_feature (87)..(315): Homolog of NCBI NO: 34903744 NR Description: unnamed protein product [Oryza sativa (japonica
  misc_feature (40)..(314): Homolog of NCBI NO: 38344585 NR Description: OSJNBa0079M09.1 [Oryza sativa (japonica
  misc_feature (14)..(315): Homolog of NCBI NO: 32489779 NR Description: OSJNBb0018A10.10 [Oryza sativa (japonica
  misc_feature (1)..(315): Homolog of NCBI NO: 32489780 NR Description: OSJNBb0018A10.11 [Oryza sativa (japonica
  misc_feature (4)..(315): Homolog of NCBI NO: 32489781 NR Description: OSJNBb0018A10.12 [Oryza sativa (japonica
  misc_feature (6)..(315): Homolog of NCBI NO: 38344588 NR Description: OSJNBa0079M09.4 [Oryza sativa (japonica
  misc_feature (1)..(314): Homolog of NCBI NO: 34905752 NR Description: protein kinase-like [Oryza sativa (japonica
MHRATIIALICCLVAGGRARAQPFDYPAARLSTTWANTDAALPHHVVYTDGSVARAALLRLNPAGLGPSYAFGFFCTASQPRGNGPAAPCTEFLLGVAVVYCNSGAGMTFVTAGVPQVVWSANRGSPVSEGATTELTPEGDLVLRSGPGGAVLWSTGTKGRSVAGARIGSDGNLVLFDGRNATVWQSFDHPTNALLVGQSLKHGARLTANASTADWRDGRLYLAVDDDGLNAYVNATPPQRYYHLSLSETASGAYATYTNGSLTVSARPGAPPLAAIQLPTVGAGTVQYMRLEHDGHLRIYEWRSGWAPVYDVLKSATT

SEQ ID NO: 68515 - DNA, 1621 bp, Triticum aestivum
  misc_feature (1)..(1621): Ceres Seq. ID no. 13596216
gtaagattaaacaacgccggagggagcggagaggggaaacaaaacaaaagccttgccttgctcctcctccgggcgggcgattcggctccggcgccgcaaggtgcttcgcttcgcttctcgccttgctccgatccttggcctgcccgcctcctccggccgtcgccgtcgtccccagggttcgctgctcggctccaagcaagctaggtcaattgctatatcagccacacttttaagcgttgaaggtcaccactagcccattggcttgatgggcgtcgaggagcaacatgtgcagcaaccagacagtgggggaaagcctgatgccgtcaagccaccaactccggtacacggtcataaaccgagcaacccccgtatatcaacctgcagcgccgacaaggacgacggcctctctctttgccgggtgtgccactgcgtggagcctgatctgagaggcgagtctgctctgggtttcctaggcattgtaccgccttcgccagacccctcggtcgacaaggacccaagcaatgacaccaccaaaacttccaccaccaaggatgctcccaagtttctcgagttcataagccccgagggggagatcttcaagtgcgccaccgacatcgaatcaggccatttgcagcggcaagacgatgtcgtgaacctcggatgctcttgcaagaatgagctcgccctcgcgcactacgcgtgcgcgctcaagtggttcatcagccacgggtccaccgtgtgcgagatttgcggaaatgtcgctacaaacgtgaggcccgaggatttcaacatggtgctcgcctccttgaaggactacgaagctctgagggaaaggacgtctaccggggatctctcctacttgcactacagggcggacgcgttcgtcgatccggtcgcccttgccgcagtacggagacagcggctttgtgagatatcatcatggttcaaccctcacaatacacatttcgtgttttctcagaggcacaatgaagaagtgccagttagcccaagtaataattctgtagactatagtgttacggctgcaagggcagcacatgcgaggcggaagtttgggagtagtggagcttttgttgctatcgctctgggttttgttcttcttgcatggtttgttgctccacatgttggcaagagagcggctgcaatcattcttcatatgcttctgggaggcctctgctcactgactataataatctcactaagatttgttagtcttcccgaggatccagtttgggtcgatacgatgctgggcgatcctgttcgtgtcctggttcctcgtgtttggagtgtgggcctctcgaacccgcaccgcccgccgcgcgtcatgatgatatcgagtgtgccctcagtcagtcgtcgtgaggaattaggaccgcgtcgcaagagtagcgtccacgagagcgttaggtaccgcacccctgtctatattcgccgcgagctataccatggacgtactattttttctttagctggagtatgtgagatgtacaacatgtttgggcaagaaaacaaggggagttatgttactgagtgttgtggtttcagacatagctggagtggtactggtctggccagtgttgcaaaacaatacagtaatgtgtgt

SEQ ID NO: 68516 - protein, 452 aa, Triticum aestivum
  peptide (1)..(452): Ceres Seq. ID no. 15221804
  misc_feature (113)..(162): Pfam Name: Zinc finger, C3HC4 type (RING finger) Pfam Description: Zinc finger, C3HC4 type (RING finger)
  misc_feature (127)..(169): Homolog of NCBI NO: 29725746 NR Description: hypothetical protein [Arabidopsis thaliana]
  misc_feature (302)..(322): Homolog of NCBI NO: 10177059 NR Description: gb|AAD32776.1~gene_id:MBK5.26~similar to unknown
  misc_feature (40)..(295): Homolog of NCBI NO: 10177059 NR Description: gb|AAD32776.1~gene_id:MBK5.26~similar to unknown
  misc_feature (40)..(323): Homolog of NCBI NO: 30697894 NR Description: zinc finger (C3HC4-type RING finger) protein
  misc_feature (1)..(323): Homolog of NCBI NO: 16209722 NR Description: AT5g63780/MBK5_26 [Arabidopsis thaliana]
  misc_feature (1)..(323): Homolog of NCBI NO: 18415916 NR Description: zinc finger (C3HC4-type RING finger) protein
  misc_feature (33)..(353): Homolog of NCBI NO: 38567835 NR Description: OSJNBb0020J19.13 [Oryza sativa (japonica
MGVEEQHVQQPDSGGKPDAVKPPTPVHGHKPSNPRISTCSADKDDGLSLCRVCHCVEPDLRGESALGFLGIVPPSPDPSVDKDPSNDTTKTSTTKDAPKFLEFISPEGEIFKCATDIESGHLQRQDDVVNLGCSCKNELALAHYACALKWFISHGSTVCEICGNVATNVRPEDFNMVLASLKDYEALRERTSTGDLSYLHYRADAFVDPVALAAVRRQRLCEISSWFNPHNTHFVFSQRHNEEVPVSPSNNSVDYSVTAARAAHARRKFGSSGAFVAIALGFVLLAWFVAPHVGKRAAAIILHMLLGGLCSLTIIISLRFVSLPEDPVWVDTMLGDPVRVLVPRVWSVGLSNPHRPPRVMMISSVPSVSRREELGPRRKSSVHESVRYRTPVYIRRELYHGRTIFSLAGVCEMYNMFGQENKGSYVTECCGFRHSWSGTGLASVAKQYSNVC

SEQ ID NO: 68517 - protein, 277 aa, Triticum aestivum
  peptide (1)..(277): Ceres Seq. ID no. 15221805
  misc_feature (127)..(147): Homolog of NCBI NO: 10177059 NR Description: gb|AAD32776.1~gene_id:MBK5.26~similar to unknown
  misc_feature (1)..(120): Homolog of NCBI NO: 10177059 NR Description: gb|AAD32776.1~gene_id:MBK5.26~similar to unknown
  misc_feature (1)..(148): Homolog of NCBI NO: 30697894 NR Description: zinc finger (C3HC4-type RING finger) protein
  misc_feature (1)..(148): Homolog of NCBI NO: 16209722 NR Description: AT5g63780/MBK5_26 [Arabidopsis thaliana]
  misc_feature (1)..(148): Homolog of NCBI NO: 18415916 NR Description: zinc finger (C3HC4-type RING finger) protein
  misc_feature (1)..(178): Homolog of NCBI NO: 38567835 NR Description: OSJNBb0020J19.13 [Oryza sativa (japonica
MVLASLKDYEALRERTSTGDLSYLHYRADAFVDPVALAAVRRQRLCEISSWFNPHNTHFVFSQRHNEEVPVSPSNNSVDYSVTAARAAHARRKFGSSGAFVAIALGFVLLAWFVAPHVGKRAAAIILHMLLGGLCSLTIIISLRFVSLPEDPVWVDTMLGDPVRVLVPRVWSVGLSNPHRPPRVMMISSVPSVSRREELGPRRKSSVHESVRYRTPVYIRRELYHGRTIFSLAGVCEMYNMFGQENKGSYVTECCGFRHSWSGTGLASVAKQYSNVC

SEQ ID NO: 68518 - DNA, 1486 bp, Triticum aestivum
  misc_feature (1)..(1486): Ceres Seq. ID no. 12614253
agaacatcctaatcgaaaaatagttgatgcgctccccgcagttgccatcctagctgaacgcggcggacagcacgcccaacggtgccgccaccgccgccgccgtcgccttcgaagcccccgccctcgtgatggaaccctcgttcgatgacgtccccgaggtcgtcggctggatgtcgtcgatggtcgaccgcggcggccgcgcgagccaggagagccaccgcctgttcctggcgcggcgcacggcgctcgagatgctgcgggaccgcggatacagcgtgccggagtccgagctcgcccgcacgctcccggagttccgcgcgtggtgggcaccggagcccgagatcgagcgcctcaccttttccaccttcctcgcctccgaccactccgacaaggtgaaaattctattctgcggaccagaacctgtcagaatcgcaactatccagaagatatatgaccagattgaaggagagaacttgtccagacttattttgatattgcagggaaagataatgcctagagctaaagagtctgttaaggagaaattcacatttaaagtagatatttttcaggtcaatgagttactggttaacattagtaagcatgccctgaagccaaagcatgaagtgttgactgcagaagaaaaggccaggctcctgaagaagtacaatgtgcaggattcacagctccctcgcatgctagagaccgatcctgttgctcgctactatggcctcggcaagggaaccgtgcttaaagttacatatgacagtgagcttactgggaaccatgtgacataccgatgtattttctgagggctgcatgtgtttccatggatgaaaggtgtagcaagctgtttgtacaatcgtgttagctctatgctgattcattggcctgaaggtatttggaacttcaggcgtgttacaccgagcatggtctcactggattcaagcagtatccgtttactagagctagcataggttttacatacaaatcagatgtcagaaacccgattaagatgaagaaccaagaaaggaaaaaagattggctgtcaaataatcttttttcagctaacaactgtggtttggtctgcttgtcttggttaaaatttcgtcatctgccgcctttcttttgtggatgttgctgctctcaccgctgctgttatccgtggggttgctgctgctgatggtatcgccgctgctgttgtccgtggggttactgctgctgatggtaatggtatcgctgctgctgctgctgttgtttgtggggttggtctcgctgttgcttagcaggtcttcgtcctggtggcagtgctctttgcatctgcttttcattatgtggggcttgagcttgctcatgtctgatagccgtactggtttcaggaagaactcatttgctccttcctccaggcatctgattcagaacaaacaaaacagcaattgtcagagttcattctaagatcctgctactatattctaagatcgtctacttc

SEQ ID NO: 68519 - protein, 226 aa, Triticum aestivum
  peptide (1)..(226): Ceres Seq. ID no. 12614254
  misc_feature (153)..(225): Pfam Name: RNA polymerase Rpb5, C-terminal domain Pfam Description: RNA polymerase Rpb5, C-terminal domain
  misc_feature (27)..(225): Homolog of NCBI NO: 28497750 NR Description: polymerase (RNA) II (DNA directed) polypeptide E
  misc_feature (25)..(225): Homolog of NCBI NO: 38344231 NR Description: OJ991113_30.8 [Oryza sativa (japonica
  misc_feature (28)..(225): Homolog of NCBI NO: 39595790 NR Description: Hypothetical protein CBG12745 [Caenorhabditis
  misc_feature (28)..(225): Homolog of NCBI NO: 17507947 NR Description: RNA polymerase Rpb5, N-terminal domain and RNA
  misc_feature (27)..(225): Homolog of NCBI NO: 15228724 NR Description: RNA polymerase I, II and III 24.3 kDa subunit
  misc_feature (1)..(225): Homolog of NCBI NO: 15232524 NR Description: RNA polymerase 24kDa subunit -like protein
  misc_feature (25)..(226): Homolog of NCBI NO: 21617912 NR Description: putative DNA-directed RNA polymerase 23kD subunit
  misc_feature (28)..(224): Homolog of NCBI NO: 8896071 NR Description: RPB5d [Brassica napus]
  misc_feature (24)..(225): Homolog of NCBI NO: 15227327 NR Description: putative DNA-directed RNA polymerase 23kD subunit
  misc_feature (25)..(226): Homolog of NCBI NO: 15230206 NR Description: putative protein
MEPSFDDVPEVVGWMSSMVDRGGRASQESHRLFLARRTALEMLRDRGYSVPESELARTLPEFRAWWAPEPEIERLTFSTFLASDHSDKVKILFCGPEPVRIATIQKIYDQIEGENLSRLILILQGKIMPRAKESVKEKFTFKVDIFQVNELLVNISKHALKPKHEVLTAEEKARLLKKYNVQDSQLPRMLETDPVARYYGLGKGTVLKVTYDSELTGNHVTYRCIF

SEQ ID NO: 68520 - protein, 212 aa, Triticum aestivum
  peptide (1)..(212): Ceres Seq. ID no. 12614255
  misc_feature (139)..(211): Pfam Name: RNA polymerase Rpb5, C-terminal domain Pfam Description: RNA polymerase Rpb5, C-terminal domain
  misc_feature (13)..(211): Homolog of NCBI NO: 28497750 NR Description: polymerase (RNA) II (DNA directed) polypeptide E
  misc_feature (11)..(211): Homolog of NCBI NO: 38344231 NR Description: OJ991113_30.8 [Oryza sativa (japonica
  misc_feature (14)..(211): Homolog of NCBI NO: 39595790 NR Description: Hypothetical protein CBG12745 [Caenorhabditis
  misc_feature (14)..(211): Homolog of NCBI NO: 17507947 NR Description: RNA polymerase Rpb5, N-terminal domain and RNA
  misc_feature (13)..(211): Homolog of NCBI NO: 15228724 NR Description: RNA polymerase I, II and III 24.3 kDa subunit
  misc_feature (1)..(211): Homolog of NCBI NO: 15232524 NR Description: RNA polymerase 24kDa subunit -like protein
  misc_feature (11)..(212): Homolog of NCBI NO: 21617912 NR Description: putative DNA-directed RNA polymerase 23kD subunit
  misc_feature (14)..(210): Homolog of NCBI NO: 8896071 NR Description: RPB5d [Brassica napus]
  misc_feature (10)..(211): Homolog of NCBI NO: 15227327 NR Description: putative DNA-directed RNA polymerase 23kD subunit
  misc_feature (11)..(212): Homolog of NCBI NO: 15230206 NR Description: putative protein
MSSMVDRGGRASQESHRLFLARRTALEMLRDRGYSVPESELARTLPEFRAWWAPEPEIERLTFSTFLASDHSDKVKILFCGPEPVRIATIQKIYDQIEGENLSRLILILQGKIMPRAKESVKEKFTFKVDIFQVNELLVNISKHALKPKHEVLTAEEKARLLKKYNVQDSQLPRMLETDPVARYYGLGKGTVLKVTYDSELTGNHVTYRCIF

SEQ ID NO: 68521 - protein, 209 aa, Triticum aestivum
  peptide (1)..(209): Ceres Seq. ID no. 12614256
  misc_feature (136)..(208): Pfam Name: RNA polymerase Rpb5, C-terminal domain Pfam Description: RNA polymerase Rpb5, C-terminal domain
  misc_feature (10)..(208): Homolog of NCBI NO: 28497750 NR Description: polymerase (RNA) II (DNA directed) polypeptide E
  misc_feature (8)..(208): Homolog of NCBI NO: 38344231 NR Description: OJ991113_30.8 [Oryza sativa (japonica
  misc_feature (11)..(208): Homolog of NCBI NO: 39595790 NR Description: Hypothetical protein CBG12745 [Caenorhabditis
  misc_feature (11)..(208): Homolog of NCBI NO: 17507947 NR Description: RNA polymerase Rpb5, N-terminal domain and RNA
  misc_feature (10)..(208): Homolog of NCBI NO: 15228724 NR Description: RNA polymerase I, II and III 24.3 kDa subunit
  misc_feature (1)..(208): Homolog of NCBI NO: 15232524 NR Description: RNA polymerase 24kDa subunit -like protein
  misc_feature (8)..(209): Homolog of NCBI NO: 21617912 NR Description: putative DNA-directed RNA polymerase 23kD subunit
  misc_feature (11)..(207): Homolog of NCBI NO: 8896071 NR Description: RPB5d [Brassica napus]
  misc_feature (7)..(208): Homolog of NCBI NO: 15227327 NR Description: putative DNA-directed RNA polymerase 23kD subunit
  misc_feature (8)..(209): Homolog of NCBI NO: 15230206 NR Description: putative protein
MVDRGGRASQESHRLFLARRTALEMLRDRGYSVPESELARTLPEFRAWWAPEPEIERLTFSTFLASDHSDKVKILFCGPEPVRIATIQKIYDQIEGENLSRLILILQGKIMPRAKESVKEKFTFKVDIFQVNELLVNISKHALKPKHEVLTAEEKARLLKKYNVQDSQLPRMLETDPVARYYGLGKGTVLKVTYDSELTGNHVTYRCIF

SEQ ID NO: 68522 - DNA, 2151 bp, Triticum aestivum
  misc_feature (1)..(2151): Ceres Seq. ID no. 13596218
atgctcgaagcccaaatcctctcggtctctcacccactcgccagaggcagacacgacgagggcgacggcgatggcctcgccgaagctggccgccggcgacggcagctacgacttccacctccgctcgctctccgccgcgtcacgggactccgccgcggccgccgatcccgcctccgaccccaacctcctccagtctgtgcggatggtgttcgagatgtgcaaggtggccaagggggccaacgacgagatggtggcgcgggcgttccccgtgatgaacaagctcttccagcgctgcgccgccgcgcccacgctctccacggcctccaccggcgtgctgctgctgaccattctgcagttcttcctggactttggggaggcggtcttgcacgatgctgatggtagcttgaaaaccttcttccgctcttgcttaagtagggagttttcagaccctattgtcgcagaacgaacgctggaattcctgatagcgaacaagacgaagatcttgaactgcttccccaccttggttccacagttcttcccattgctgctgaagttgattgcatcaaatggtgataggttggataagaagttctcagaagtgatcccattgatgatgtcagcaggatcttttcttcctctcttcctgtcccttatggatctgccaatgttagtggtagcactggaaaaggtggaaagaagttctggaactctcatcggtagtagtttagctactatacagaagagtgctgctcctgagatgctccttgcactgatggatgaggcatatactggctcctcaatagaagatcaaagtggcaattcaggttctgatgacagtggtcgtctagaccttgcggacccaatgttccttgaccttctaaaagacgagaatgatggcattgctgcaaaacattggacatcccctacgatatcttcaacgttacaagctgcacttaacagcccacagtctgacagattaaaacagtcactgaaaatggcacctcgctttcttactgtatattttgcgacagcattgcgggacgtcaacaactcactcttgtgtgctctgattccagttgctatgtcaagatatgctgcgatgttccctgacaaggaattttctttcgaggtgaggaaaaagctgtcggatttcttattagctgcattccagcgctcccctgacatcattgcgctactaaagaagcctattactgatagacttggggaggcccatggtaatcctgcaaagatggaattggcattgcatttatgttgggccattggtgagcatggagcaggagggataaagcacaaagatgtagcacgtgaactatttgaaaatctggagttgctattatacgaaaacctggcaactagtcgtctgggattaagtcaagatccagggttcgattctatgggtgcaagctctagaaagtcatcccaagctaggctcctctgctttgtggtgactgccattgcgaagctagcaacttgccataacgagctgcttccaagagcacgtgtgtcattggctaaggtcgctcggtccaggacctcagacaggcgagtctggcagcgcgcctgtgactatttagggctcatgaatgaaccagccatttgtttgtctgtactgggaccatccactgcccaaggaaatggtcctgggattgtgaactggagcgaaggaggaaccaagatggtagctcacattccgttttaccttttagcagaacagaaaggtccaccatctcatgatttttcatatgcggacctcctccccgcagaatgagaacaccgtcatgagtagcatggatccatgcaatgattctcttgcaaacgccatgtgcacagagatcattggtgatcatggcctgctgaagatgattcaagtgccaacgccttcttttatccagttcatcttttcgatcgagaagtgctggccctttggtctgaggagttcctgtactgttgtagtttctgggatctggctggtttcaactgtgcagtttgtgggggtgtagatggtattcagaaacgctcaatgttgtatacatggaatgatttgtcagtgtatgtactgaaagggaagcagtgttgtaaattaagatatctgatggtgcacatctggaaatggaaagattgttctttgtg

SEQ ID NO: 68523 - protein, 595 aa, Triticum aestivum
  peptide (1)..(595): Ceres Seq. ID no. 15221809
  misc_feature (113)..(264): Homolog of NCBI NO: 26349931 NR Description: unnamed protein product [Mus musculus]
  misc_feature (21)..(513): Homolog of NCBI NO: 34871236 NR Description: similar to RIKEN cDNA C330006K01 [Rattus
  misc_feature (21)..(264): Homolog of NCBI NO: 27370056 NR Description: RIKEN cDNA C330006K01 [Mus musculus]
  misc_feature (21)..(228): Homolog of NCBI NO: 34785813 NR Description: Unknown (protein for IMAGE:6403029) [Mus musculus]
  misc_feature (243)..(546): Homolog of NCBI NO: 34785813 NR Description: Unknown (protein for IMAGE:6403029) [Mus musculus]
  misc_feature (253)..(593): Homolog of NCBI NO: 11994505 NR Description: gene_id:F4B12.7~unknown protein [Arabidopsis
  misc_feature (314)..(595): Homolog of NCBI NO: 39545844 NR Description: OSJNBb0060E08.15 [Oryza sativa (japonica
  misc_feature (24)..(416): Homolog of NCBI NO: 39545844 NR Description: OSJNBb0060E08.15 [Oryza sativa (japonica
  misc_feature (33)..(593): Homolog of NCBI NO: 20465414 NR Description: unknown protein [Arabidopsis thaliana]
  misc_feature (33)..(593): Homolog of NCBI NO: 22331098 NR Description: expressed protein [Arabidopsis thaliana]
CSKPKSSRSLTHSPEADTTRATAMASPKLAAGDGSYDFHLRSLSAASRDSAAAADPASDPNLLQSVRMVFEMCKVAKGANDEMVARAFPVMNKLFQRCAAAPTLSTASTGVLLLTILQFFLDFGEAVLHDADGSLKTFFRSCLSREFSDPIVAERTLEFLIANKTKILNCFPTLVPQFFPLLLKLIASNGDRLDKKFSEVIPLMMSAGSFLPLFLSLMDLPMLVVALEKVERSSGTLIGSSLATIQKSAAPEMLLALMDEAYTGSSIEDQSGNSGSDDSGRLDLADPMFLDLLKDENDGIAAKHWTSPTISSTLQAALNSPQSDRLKQSLKMAPRFLTVYFATALRDVNNSLLCALIPVAMSRYAAMFPDKEFSFEVRKKLSDFLLAAFQRSPDIIALLKKPITDRLGEAHGNPAKMELALHLCWAIGEHGAGGIKHKDVARELFENLELLLYENLATSRLGLSQDPGFDSMGASSRKSSQARLLCFVVTAIAKLATCHNELLPRARVSLAKVARSRTSDRRVWQRACDYLGLMNEPAICLSVLGPSTAQGNGPGIVNWSEGGTKMVAHIPFYLLAEQKGPPSHDFSYADLLPAE

SEQ ID NO: 68524 - protein, 572 aa, Triticum aestivum
  peptide (1)..(572): Ceres Seq. ID no. 15221810
  misc_feature (90)..(241): Homolog of NCBI NO: 26349931 NR Description: unnamed protein product [Mus musculus]
  misc_feature (1)..(490): Homolog of NCBI NO: 34871236 NR Description: similar to RIKEN cDNA C330006K01 [Rattus
  misc_feature (1)..(241): Homolog of NCBI NO: 27370056 NR Description: RIKEN cDNA C330006K01 [Mus musculus]
  misc_feature (1)..(205): Homolog of NCBI NO: 34785813 NR Description: Unknown (protein for IMAGE:6403029) [Mus musculus]
  misc_feature (220)..(523): Homolog of NCBI NO: 34785813 NR Description: Unknown (protein for IMAGE:6403029) [Mus musculus]
  misc_feature (230)..(570): Homolog of NCBI NO: 11994505 NR Description: gene_id:F4B12.7~unknown protein [Arabidopsis
  misc_feature (291)..(572): Homolog of NCBI NO: 39545844 NR Description: OSJNBb0060E08.15 [Oryza sativa (japonica
  misc_feature (1)..(393): Homolog of NCBI NO: 39545844 NR Description: OSJNBb0060E08.15 [Oryza sativa (japonica
  misc_feature (10)..(570): Homolog of NCBI NO: 20465414 NR Description: unknown protein [Arabidopsis thaliana]
  misc_feature (10)..(570): Homolog of NCBI NO: 22331098 NR Description: expressed protein [Arabidopsis thaliana]
MASPKLAAGDGSYDFHLRSLSAASRDSAAAADPASDPNLLQSVRMVFEMCKVAKGANDEMVARAFPVMNKLFQRCAAAPTLSTASTGVLLLTILQFFLDFGEAVLHDADGSLKTFFRSCLSREFSDPIVAERTLEFLIANKTKILNCFPTLVPQFFPLLLKLIASNGDRLDKKFSEVIPLMMSAGSFLPLFLSLMDLPMLVVALEKVERSSGTLIGSSLATIQKSAAPEMLLALMDEAYTGSSIEDQSGNSGSDDSGRLDLADPMFLDLLKDENDGIAAKHWTSPTISSTLQAALNSPQSDRLKQSLKMAPRFLTVYFATALRDVNNSLLCALIPVAMSRYAAMFPDKEFSFEVRKKLSDFLLAAFQRSPDIIALLKKPITDRLGEAHGNPAKMELALHLCWAIGEHGAGGIKHKDVARELFENLELLLYENLATSRLGLSQDPGFDSMGASSRKSSQARLLCFVVTAIAKLATCHNELLPRARVSLAKVARSRTSDRRVWQRACDYLGLMNEPAICLSVLGPSTAQGNGPGIVNWSEGGTKMVAHIPFYLLAEQKGPPSHDFSYADLLPAE

SEQ ID NO: 68525 - protein, 528 aa, Triticum aestivum
  peptide (1)..(528): Ceres Seq. ID no. 15221811
  misc_feature (46)..(197): Homolog of NCBI NO: 26349931 NR Description: unnamed protein product [Mus musculus]
  misc_feature (1)..(446): Homolog of NCBI NO: 34871236 NR Description: similar to RIKEN cDNA C330006K01 [Rattus
  misc_feature (1)..(197): Homolog of NCBI NO: 27370056 NR Description: RIKEN cDNA C330006K01 [Mus musculus]
  misc_feature (1)..(161): Homolog of NCBI NO: 34785813 NR Description: Unknown (protein for IMAGE:6403029) [Mus musculus]
  misc_feature (176)..(479): Homolog of NCBI NO: 34785813 NR Description: Unknown (protein for IMAGE:6403029) [Mus musculus]
  misc_feature (186)..(526): Homolog of NCBI NO: 11994505 NR Description: gene_id:F4B12.7~unknown protein [Arabidopsis
  misc_feature (247)..(528): Homolog of NCBI NO: 39545844 NR Description: OSJNBb0060E08.15 [Oryza sativa (japonica
  misc_feature (1)..(349): Homolog of NCBI NO: 39545844 NR Description: OSJNBb0060E08.15 [Oryza sativa (japonica
  misc_feature (1)..(526): Homolog of NCBI NO: 20465414 NR Description: unknown protein [Arabidopsis thaliana]
  misc_feature (1)..(526): Homolog of NCBI NO: 22331098 NR Description: expressed protein [Arabidopsis thaliana]
MVFEMCKVAKGANDEMVARAFPVMNKLFQRCAAAPTLSTASTGVLLLTILQFFLDFGEAVLHDADGSLKTFFRSCLSREFSDPIVAERTLEFLIANKTKILNCFPTLVPQFFPLLLKLIASNGDRLDKKFSEVIPLMMSAGSFLPLFLSLMDLPMLVVALEKVERSSGTLIGSSLATIQKSAAPEMLLALMDEAYTGSSIEDQSGNSGSDDSGRLDLADPMFLDLLKDENDGIAAKHWTSPTISSTLQAALNSPQSDRLKQSLKMAPRFLTVYFATALRDVNNSLLCALIPVAMSRYAAMFPDKEFSFEVRKKLSDFLLAAFQRSPDIIALLKKPITDRLGEAHGNPAKMELALHLCWAIGEHGAGGIKHKDVARELFENLELLLYENLATSRLGLSQDPGFDSMGASSRKSSQARLLCFVVTAIAKLATCHNELLPRARVSLAKVARSRTSDRRVWQRACDYLGLMNEPAICLSVLGPSTAQGNGPGIVNWSEGGTKMVAHIPFYLLAEQKGPPSHDFSYADLLPAE

SEQ ID NO: 68526 - DNA, 1720 bp, Triticum aestivum
  misc_feature (1)..(1720): Ceres Seq. ID no. 13596219
ctggtcggagaggagcagcagagatggccggagccggggaagacgacgcagctcctcctcccccttctccagatcgacagcagcccatggaagaggcggcggcggcggccaagcggagccggtcggagaaccaccatggcctcgccgacgggccgtccttccggatggaggaccttccggcggaggttcagccggttataatctcactgctcccactgaaagaggccgtgaggacgagcattgtttcaagaagttggacaacgctctggagattccactgcgacctatgttttgatgtggattctaacaccgatgacaattccgctcatcaggtcaatggcactggcaccaatgaccaatccactaatcggtataataccaaaataacacgggcaaagttcatggagactgtaaattccgttattcaacggcatagtgggataggaatcaataagttcagtatcagctgtgacctgcacaaagaggactctcatcatcttgacaagtggattcggtttgccgcttcatcaaaggcaaaaataatagattttcatcggaagatatctgattaccgagttgaagaagctccccactttcctcttgaggccttagatgctcaaggtagctcatttgtgcagtccttgtctctcgccagtgtttctataaagccacgctcaggaatatgccgctttacaatactcagaaggcttgttttgagctctgttcagatatttggagattttccaggcttgcttgcaaaatgttcaagacttgaggacttagagatcaaatggtgttctggtgtggatgacttaatcgtaccacacacactcgataaacttcaacatttgctgattgccggaatggacgtccagatggttgagtttcatgctactgatcttgctcactttgagtacaaaggccgagtaacccctatagtgcttcatggttgcttaaaactagagaaggcaacaattgcgtttgaggcctctaatgtactgccccatgcattcaatgtaattccaagcatttccccagtgaagatattaattgtgcgagcttttatatcaaaatatggacagtccctggagctgccattaagaccacagggcatgtttatgcatctgaggcatatgacttgtaaaattatcgtccttgctagagatgtaaatgactataatggagttcttcaactggcccattggttggacagtgcaccgcgactggagacattggacttgcatatgtcctatctgaggtccggtgctttcgtaagtgccgaggtggcgggagtggaagctccctgtatgcgtcgccatgatcatctcaagacggtcttcatgagtgggtttcagtgttacaagtctcagattgagctggcgtgctgtatcctgggaaatgcttctgttcttgagcagctgacagtagaagcaatatggggtgatgatgattacaggcggatctgtgaatgggcagaggtaacctcgaagcgctttggtaaggtgatcactgtcttagatgccccccttaacagtgagtaaaccaatccttttcgcatgtacacgctgtcaattaatctcgtgtagtctgcagtatgcagcattcagtgtagctgggagaatgcccctctagactgtactgactgttttggtgtctacaaatggaatctgtagggcttttgcccctcttaataaaaaacaagtaatctctggttcatcgt

SEQ ID NO: 68527 - protein, 512 aa, Triticum aestivum
  peptide (1)..(512): Ceres Seq. ID no. 13596220
  misc_feature (58)..(98): Pfam Name: F-box domain Pfam Description: F-box domain
  misc_feature (57)..(101): Homolog of NCBI NO: 38605785 NR Description: OSJNBa0044K18.28 [Oryza sativa (japonica
  misc_feature (133)..(486): Homolog of NCBI NO: 38605785 NR Description: OSJNBa0044K18.28 [Oryza sativa (japonica
  misc_feature (26)..(485): Homolog of NCBI NO: 34899896 NR Description: OJ1714_H10.31 [Oryza sativa (japonica
  misc_feature (55)..(475): Homolog of NCBI NO: 38344931 NR Description: OSJNBa0018M05.22 [Oryza sativa (japonica
  misc_feature (120)..(415): Homolog of NCBI NO: 34902734 NR Description: hypothetical protein~similar to Oryza sativa
  misc_feature (51)..(476): Homolog of NCBI NO: 34394889 NR Description: unknown protein [Oryza sativa (japonica
  misc_feature (80)..(434): Homolog of NCBI NO: 34913938 NR Description: OSJNBa0066C06.21 [Oryza sativa (japonica
  misc_feature (37)..(476): Homolog of NCBI NO: 34899940 NR Description: P0428D12.10 [Oryza sativa (japonica
  misc_feature (54)..(476): Homolog of NCBI NO: 34394100 NR Description: unknown protein [Oryza sativa (japonica
  misc_feature (58)..(505): Homolog of NCBI NO: 18481703 NR Description: hypothetical protein [Sorghum bicolor]
GRRGAAEMAGAGEDDAAPPPPSPDRQQPMEEAAAAAKRSRSENHHGLADGPSFRMEDLPAEVQPVIISLLPLKEAVRTSIVSRSWTTLWRFHCDLCFDVDSNTDDNSAHQVNGTGTNDQSTNRYNTKITRAKFMETVNSVIQRHSGIGINKFSISCDLHKEDSHHLDKWIRFAASSKAKIIDFHRKISDYRVEEAPHFPLEALDAQGSSFVQSLSLASVSIKPRSGICRFTILRRLVLSSVQIFGDFPGLLAKCSRLEDLEIKWCSGVDDLIVPHTLDKLQHLLIAGMDVQMVEFHATDLAHFEYKGRVTPIVLHGCLKLEKATIAFEASNVLPHAFNVIPSISPVKILIVRAFISKYGQSLELPLRPQGMFMHLRHMTCKIIVLARDVNDYNGVLQLAHWLDSAPRLETLDLHMSYLRSGAFVSAEVAGVEAPCMRRHDHLKTVFMSGFQCYKSQIELACCILGNASVLEQLTVEAIWGDDDYRRICEWAEVTSKRFGKVITVLDAPLNSE

SEQ ID NO: 68528 - protein, 505 aa, Triticum aestivum
  peptide (1)..(505): Ceres Seq. ID no. 13596221
  misc_feature (51)..(91): Pfam Name: F-box domain Pfam Description: F-box domain
  misc_feature (50)..(94): Homolog of NCBI NO: 38605785 NR Description: OSJNBa0044K18.28 [Oryza sativa (japonica
  misc_feature (126)..(479): Homolog of NCBI NO: 38605785 NR Description: OSJNBa0044K18.28 [Oryza sativa (japonica
  misc_feature (19)..(478): Homolog of NCBI NO: 34899896 NR Description: OJ1714_H10.31 [Oryza sativa (japonica
  misc_feature (48)..(468): Homolog of NCBI NO: 38344931 NR Description: OSJNBa0018M05.22 [Oryza sativa (japonica
  misc_feature (113)..(408): Homolog of NCBI NO: 34902734 NR Description: hypothetical protein~similar to Oryza sativa
  misc_feature (44)..(469): Homolog of NCBI NO: 34394889 NR Description: unknown protein [Oryza sativa (japonica
  misc_feature (73)..(427): Homolog of NCBI NO: 34913938 NR Description: OSJNBa0066C06.21 [Oryza sativa (japonica
  misc_feature (30)..(469): Homolog of NCBI NO: 34899940 NR Description: P0428D12.10 [Oryza sativa (japonica
  misc_feature (47)..(469): Homolog of NCBI NO: 34394100 NR Description: unknown protein [Oryza sativa (japonica
  misc_feature (51)..(498): Homolog of NCBI NO: 18481703 NR Description: hypothetical protein [Sorghum bicolor]
MAGAGEDDAAPPPPSPDRQQPMEEAAAAAKRSRSENHHGLADGPSFRMEDLPAEVQPVIISLLPLKEAVRTSIVSRSWTTLWRFHCDLCFDVDSNTDDNSAHQVNGTGTNDQSTNRYNTKITRAKFMETVNSVIQRHSGIGINKFSISCDLHKEDSHHLDKWIRFAASSKAKIIDFHRKISDYRVEEAPHFPLEALDAQGSSFVQSLSLASVSIKPRSGICRFTILRRLVLSSVQIFGDFPGLLAKCSRLEDLEIKWCSGVDDLIVPHTLDKLQHLLIAGMDVQMVEFHATDLAHFEYKGRVTPIVLHGCLKLEKATIAFEASNVLPHAFNVIPSISPVKILIVRAFISKYGQSLELPLRPQGMFMHLRHMTCKIIVLARDVNDYNGVLQLAHWLDSAPRLETLDLHMSYLRSGAFVSAEVAGVEAPCMRRHDHLKTVFMSGFQCYKSQIELACCILGNASVLEQLTVEAIWGDDDYRRICEWAEVTSKRFGKVITVLDAPLNSE

SEQ ID NO: 68529 - protein, 484 aa, Triticum aestivum
  peptide (1)..(484): Ceres Seq. ID no. 13596222
  misc_feature (30)..(70): Pfam Name: F-box domain Pfam Description: F-box domain
  misc_feature (29)..(73): Homolog of NCBI NO: 38605785 NR Description: OSJNBa0044K18.28 [Oryza sativa (japonica
  misc_feature (105)..(458): Homolog of NCBI NO: 38605785 NR Description: OSJNBa0044K18.28 [Oryza sativa (japonica
  misc_feature (1)..(457): Homolog of NCBI NO: 34899896 NR Description: OJ1714_H10.31 [Oryza sativa (japonica
  misc_feature (27)..(447): Homolog of NCBI NO: 38344931 NR Description: OSJNBa0018M05.22 [Oryza sativa (japonica
  misc_feature (92)..(387): Homolog of NCBI NO: 34902734 NR Description: hypothetical protein~similar to Oryza sativa
  misc_feature (23)..(448): Homolog of NCBI NO: 34394889 NR Description: unknown protein [Oryza sativa (japonica
  misc_feature (52)..(406): Homolog of NCBI NO: 34913938 NR Description: OSJNBa0066C06.21 [Oryza sativa (japonica
  misc_feature (9)..(448): Homolog of NCBI NO: 34899940 NR Description: P0428D12.10 [Oryza sativa (japonica
  misc_feature (26)..(448): Homolog of NCBI NO: 34394100 NR Description: unknown protein [Oryza sativa (japonica
  misc_feature (30)..(477): Homolog of NCBI NO: 18481703 NR Description: hypothetical protein [Sorghum bicolor]
MEEAAAAAKRSRSENHHGLADGPSFRMEDLPAEVQPVIISLLPLKEAVRTSIVSRSWTTLWRFHCDLCFDVDSNTDDNSAHQVNGTGTNDQSTNRYNTKITRAKFMETVNSVIQRHSGIGINKFSISCDLHKEDSHHLDKWIRFAASSKAKIIDFHRKISDYRVEEAPHFPLEALDAQGSSFVQSLSLASVSIKPRSGICRFTILRRLVLSSVQIFGDFPGLLAKCSRLEDLEIKWCSGVDDLIVPHTLDKLQHLLIAGMDVQMVEFHATDLAHFEYKGRVTPIVLHGCLKLEKATIAFEASNVLPHAFNVIPSISPVKILIVRAFISKYGQSLELPLRPQGMFMHLRHMTCKIIVLARDVNDYNGVLQLAHWLDSAPRLETLDLHMSYLRSGAFVSAEVAGVEAPCMRRHDHLKTVFMSGFQCYKSQIELACCILGNASVLEQLTVEAIWGDDDYRRICEWAEVTSKRFGKVITVLDAPLNSE

SEQ ID NO: 68530 - DNA, 1313 bp, Triticum aestivum
  misc_feature (1)..(1313): Ceres Seq. ID no. 13654549
gaaagttggcaggcacgatctctctccacccccttggactctcctctgctcctcctctccctccccacggcgccatggagcggctcatctccaggacggcggtctccccggcccagccccggatccacctgcccggcagatcccccttcctcaccacccgccgcgccgcctccgcctccgcgggtgctgggagcgccgcgccgtggacccggctgtgcgcgcagccgccgcgcctaggtgccgcggtcgccgctgcggcgcggcatgacggtgcttcggccccggcgcccgtggaggaggtggctgcggcggcggcagctgggcctccgtggaagctgctcgggagcctgctccccaaggcttctactgctgcccttgtcctgcttatgacacttactgcaagtgccttgcactctagcattccccatcctgcctatgcatcggcgcaaccagtaatcaaatctggtggactcctctcagcagagttattgagcagcggctgggctggtttcttcgcgggccgcttacataccttatccgggcctgaccatcttgtcgcattggcaccactatcaattgggagatcaagactggagagtggactagtcggtgccctttggggctgtggtcatgatgctggacaaataatttttggcctgctcttcttgctactcaaggatcgtttgcacattgaggttctccgtatatggggaacaagagttgtaggtctgacccttcttatgataggcgcgacgggcatccgggaagcttcagaggttcaagagtcggggctaattctggagggtgtagacatgaatggcagtgagcccttgcaacaggcccctgctgttgctcccaggaagaagaaagttggcttcacaacatttgccaccggagtcatccatggcctccagccagatgcgctgctgatggtcttgcccgctcttgctctgccgtcacgctttgccggcgcggcctacctcggtatgttcttggtcgggactgtattttcgatgggtagctacactgcttttgtaggttcttgtagtgaggctctaaaggataggatacctaagataacggagaagctgacctgggctgcttcccttgtagctgtatgcttggggttagctcttttagttgggcagttctttgggttcaccctatattgattcatgtcctaggttcttgttactacttggcaacattgttttgattgttatttgttatgtttacggcagttgagctcagactacgacacggttggtattcttagactgcaacttatactatgttactacatgtttttgggg

SEQ ID NO: 68531 - protein, 389 aa, Triticum aestivum
  peptide (1)..(389): Ceres Seq. ID no. 13654550
  misc_feature (169)..(345): Homolog of NCBI NO: 33861852 NR Description: marine cyanobacterial conserved hypothetical
  misc_feature (162)..(359): Homolog of NCBI NO: 33240819 NR Description: Hydrogenase accessory protein or high-affinity
  misc_feature (162)..(345): Homolog of NCBI NO: 33866162 NR Description: cyanobacterial conserved hypothetical protein
  misc_feature (117)..(389): Homolog of NCBI NO: 7486794 NR Description: hypothetical protein M4E13.135 - Arabidopsis
  misc_feature (30)..(389): Homolog of NCBI NO: 18418571 NR Description: expressed protein [Arabidopsis thaliana]
  misc_feature (119)..(389): Homolog of NCBI NO: 15724154 NR Description: At2g16800/T24I21.21 [Arabidopsis thaliana]
  misc_feature (119)..(389): Homolog of NCBI NO: 21592431 NR Description: unknown [Arabidopsis thaliana]
  misc_feature (119)..(389): Homolog of NCBI NO: 18398217 NR Description: expressed protein [Arabidopsis thaliana]
  misc_feature (24)..(389): Homolog of NCBI NO: 34897966 NR Description: hypothetical protein~similar to Arabidopsis
  misc_feature (25)..(389): Homolog of NCBI NO: 21397272 NR Description: Hypothetical protein [Oryza sativa (japonica
KLAGTISLHPLGLSSAPPLPPHGAMERLISRTAVSPAQPRIHLPGRSPFLTTRRAASASAGAGSAAPWTRLCAQPPRLGAAVAAAARHDGASAPAPVEEVAAAAAAGPPWKLLGSLLPKASTAALVLLMTLTASALHSSIPHPAYASAQPVIKSGGLLSAELLSSGWAGFFAGRLHTLSGPDHLVALAPLSIGRSRLESGLVGALWGCGHDAGQIIFGLLFLLLKDRLHIEVLRIWGTRVVGLTLLMIGATGIREASEVQESGLILEGVDMNGSEPLQQAPAVAPRKKKVGFTTFATGVIHGLQPDALLMVLPALALPSRFAGAAYLGMFLVGTVFSMGSYTAFVGSCSEALKDRIPKITEKLTWAASLVAVCLGLALLVGQFFGFTLY

SEQ ID NO: 68532 - protein, 365 aa, Triticum aestivum
  peptide (1)..(365): Ceres Seq. ID no. 13654551
  misc_feature (145)..(321): Homolog of NCBI NO: 33861852 NR Description: marine cyanobacterial conserved hypothetical
  misc_feature (138)..(335): Homolog of NCBI NO: 33240819 NR Description: Hydrogenase accessory protein or high-affinity
  misc_feature (138)..(321): Homolog of NCBI NO: 33866162 NR Description: cyanobacterial conserved hypothetical protein
  misc_feature (93)..(365): Homolog of NCBI NO: 7486794 NR Description: hypothetical protein M4E13.135 - Arabidopsis
  misc_feature (6)..(365): Homolog of NCBI NO: 18418571 NR Description: expressed protein [Arabidopsis thaliana]
  misc_feature (95)..(365): Homolog of NCBI NO: 15724154 NR Description: At2g16800/T24I21.21 [Arabidopsis thaliana]
  misc_feature (95)..(365): Homolog of NCBI NO: 21592431 NR Description: unknown [Arabidopsis thaliana]
  misc_feature (95)..(365): Homolog of NCBI NO: 18398217 NR Description: expressed protein [Arabidopsis thaliana]
  misc_feature (1)..(365): Homolog of NCBI NO: 34897966 NR Description: hypothetical protein~similar to Arabidopsis
  misc_feature (1)..(365): Homolog of NCBI NO: 21397272 NR Description: Hypothetical protein [Oryza sativa (japonica
MERLISRTAVSPAQPRIHLPGRSPFLTTRRAASASAGAGSAAPWTRLCAQPPRLGAAVAAAARHDGASAPAPVEEVAAAAAAGPPWKLLGSLLPKASTAALVLLMTLTASALHSSIPHPAYASAQPVIKSGGLLSAELLSSGWAGFFAGRLHTLSGPDHLVALAPLSIGRSRLESGLVGALWGCGHDAGQIIFGLLFLLLKDRLHIEVLRIWGTRVVGLTLLMIGATGIREASEVQESGLILEGVDMNGSEPLQQAPAVAPRKKKVGFTTFATGVIHGLQPDALLMVLPALALPSRFAGAAYLGMFLVGTVFSMGSYTAFVGSCSEALKDRIPKITEKLTWAASLVAVCLGLALLVGQFFGFTLY

SEQ ID NO: 68533 - protein, 261 aa, Triticum aestivum
  peptide (1)..(261): Ceres Seq. ID no. 13654552
  misc_feature (41)..(217): Homolog of NCBI NO: 33861852 NR Description: marine cyanobacterial conserved hypothetical
  misc_feature (34)..(231): Homolog of NCBI NO: 33240819 NR Description: Hydrogenase accessory protein or high-affinity
  misc_feature (34)..(217): Homolog of NCBI NO: 33866162 NR Description: cyanobacterial conserved hypothetical protein
  misc_feature (1)..(261): Homolog of NCBI NO: 7486794 NR Description: hypothetical protein M4E13.135 - Arabidopsis
  misc_feature (1)..(261): Homolog of NCBI NO: 18418571 NR Description: expressed protein [Arabidopsis thaliana]
  misc_feature (1)..(261): Homolog of NCBI NO: 15724154 NR Description: At2g16800/T24I21.21 [Arabidopsis thaliana]
  misc_feature (1)..(261): Homolog of NCBI NO: 21592431 NR Description: unknown [Arabidopsis thaliana]
  misc_feature (1)..(261): Homolog of NCBI NO: 18398217 NR Description: expressed protein [Arabidopsis thaliana]
  misc_feature (1)..(261): Homolog of NCBI NO: 34897966 NR Description: hypothetical protein~similar to Arabidopsis
  misc_feature (1)..(261): Homolog of NCBI NO: 21397272 NR Description: Hypothetical protein [Oryza sativa (japonica
MTLTASALHSSIPHPAYASAQPVIKSGGLLSAELLSSGWAGFFAGRLHTLSGPDHLVALAPLSIGRSRLESGLVGALWGCGHDAGQIIFGLLFLLLKDRLHIEVLRIWGTRVVGLTLLMIGATGIREASEVQESGLILEGVDMNGSEPLQQAPAVAPRKKKVGFTTFATGVIHGLQPDALLMVLPALALPSRFAGAAYLGMFLVGTVFSMGSYTAFVGSCSEALKDRIPKITEKLTWAASLVAVCLGLALLVGQFFGFTLY

SEQ ID NO: 68534 - DNA, 1904 bp, Triticum aestivum
  misc_feature (1)..(1904): Ceres Seq. ID no. 13654409
acgcataaccgccgtgccgtgtttctggggatcgacatcgcacgcacgcacctggcacctccctccccgaatccatccatcccaccgctcttttagcagctgcccccgttgcttgcgtccaactcaaccccactcctccgcctcccccctctcccatctgctgccgctgctctgctctgctctgctcgcccctacccgcgatcgccgcggccagcccgccatggacgaggagtacgacgtgatcgtgctgggcacggggctcaaggagtgcatcctcagcggcctcctctccgtcgacggcctcaaggttttgcacatggatagaaatgactactatggaggagattccacctccctcaacttgaaccagctctggaagaagttcaggggggaagaaaaaccaccggcgcatttaggtgcgagcagagactacaatgtagacatggttccaaagtttatgatggcgaacggaactttggttcgtactctcattcacactgatgtaacgaagtatctgtctttcaaagctgttgatggaagctttgtcttcagcaaagggaagattcacaaggttcctgccactgacatggaggctctaaaatcccctttaatgggcatatttgagaaacgtagagcaaggaacttcttcatttatgtccaagattacaatgatgctgatccaagaacacatcaaggattggaccttacaaggatgacaactagagaattgatcgcgaaacacggattgagtgatgatactatagatttcattggccatgcgcttgctcttcacagggacgatcgctacctaagcgagccagcaattgatactgttaaaagaatgaaactctattctgagtctcttgcacggttccaaggaggctcaccttatatttacccattgtatgggttgggtgagctgccacaggcttttgcacgtctaagtgctgtttatggtggcacttatatgttaaataagccagagtgcaaggttgaatttgatatggaggggaaagtgtgtggtgttacatcagaaggtgaaactgccaagtgcaagaaggttgtctgtgatccttcttacttggccaacaaggtaaggaagattggaaaagttgcacgagcaattgctattatgagccacccaattccaaatgcaaatgattcccactcgattcagattattttaccacaaaagcaacttgggcgcaagtcagacatgtatgtcttctgttgctcgtacacccacaatgtcgcaccaaaagggaagttcattgcatttgtgtctgcagaagcagagactgataacccacagtccgaactaaagcctggaatcgatctacttggtccagtagatgaattgttttttgatatgtatgacagatatgaacccgtcaatgaaccttctcttgataattgctttgtctcatcgagttatgatgccactactcactttgagacaactgtcacagatgttcttaatatgtacacactgattactggaaagactgttgatcttagcgttgatctcagcgctgccagcgctgcagaagagtactagatctcatcaaaccaagcattttcttcaagactatactaaatggaggaacaccaccggaatcctactgcaggatggtcatgtgtgacatgagctgcatactgcgtagggggttcaggtgcgtagggggttcaggtccacgcctgccagcagcactatgcgaaattattatatgtggaatggtgctgatttccttcgttaacttccatattgatccactgggttgtaaacgttattctatcgtaacgatggctttagcatgttcatgttcgtcttgttgatgtattctacagttatacatattggtgtcttggatgtattttccttccgagtaaggtcaatgtggttt

SEQ ID NO: 68535 - protein, 518 aa, Triticum aestivum
  peptide (1)..(518): Ceres Seq. ID no. 15219649
  misc_feature (74)..(511): Pfam Name: GDP dissociation inhibitor Pfam Description: GDP dissociation inhibitor
  misc_feature (74)..(517): Homolog of NCBI NO: 33146460 NR Description: putative GDP dissociation inhibitor
  misc_feature (74)..(517): Homolog of NCBI NO: 21592535 NR Description: GDP dissociation inhibitor [Arabidopsis thaliana]
  misc_feature (74)..(517): Homolog of NCBI NO: 15232210 NR Description: Rab GDP dissociation inhibitor [Arabidopsis
  misc_feature (74)..(517): Homolog of NCBI NO: 17473582 NR Description: GDP dissociation inhibitor [Arabidopsis thaliana]
  misc_feature (74)..(517): Homolog of NCBI NO: 1550740 NR Description: GDP-associated inhibitor [Arabidopsis thaliana]
  misc_feature (74)..(517): Homolog of NCBI NO: 15224814 NR Description: GDP dissociation inhibitor [Arabidopsis thaliana]
  misc_feature (74)..(517): Homolog of NCBI NO: 3175990 NR Description: GDP dissociation inhibitor [Cicer arietinum]
  misc_feature (74)..(517): Homolog of NCBI NO: 7489133 NR Description: GDP dissociation inhibitor - common tobacco
  misc_feature (74)..(518): Homolog of NCBI NO: 7489479 NR Description: GDP dissociation inhibitor protein - rice
  misc_feature (74)..(518): Homolog of NCBI NO: 7489478 NR Description: GDP dissociation inhibitor protein - rice
RITAVPCFWGSTSHARTWHLPPRIHPSHRSFSSCPRCLRPTQPHSSASPLSHLLPLLCSALLAPTRDRRGQPAMDEEYDVIVLGTGLKECILSGLLSVDGLKVLHMDRNDYYGGDSTSLNLNQLWKKFRGEEKPPAHLGASRDYNVDMVPKFMMANGTLVRTLIHTDVTKYLSFKAVDGSFVFSKGKIHKVPATDMEALKSPLMGIFEKRRARNFFIYVQDYNDADPRTHQGLDLTRMTTRELIAKHGLSDDTIDFIGHALALHRDDRYLSEPAIDTVKRMKLYSESLARFQGGSPYIYPLYGLGELPQAFARLSAVYGGTYMLNKPECKVEFDMEGKVCGVTSEGETAKCKKVVCDPSYLANKVRKIGKVARAIAIMSHPIPNANDSHSIQIILPQKQLGRKSDMYVFCCSYTHNVAPKGKFIAFVSAEAETDNPQSELKPGIDLLGPVDELFFDMYDRYEPVNEPSLDNCFVSSSYDATTHFETTVTDVLNMYTLITGKTVDLSVDLSAASAAEEY

SEQ ID NO: 68536 - protein, 445 aa, Triticum aestivum
  peptide (1)..(445): Ceres Seq. ID no. 15219650
  misc_feature (1)..(438): Pfam Name: GDP dissociation inhibitor Pfam Description: GDP dissociation inhibitor
  misc_feature (1)..(444): Homolog of NCBI NO: 33146460 NR Description: putative GDP dissociation inhibitor
  misc_feature (1)..(444): Homolog of NCBI NO: 21592535 NR Description: GDP dissociation inhibitor [Arabidopsis thaliana]
  misc_feature (1)..(444): Homolog of NCBI NO: 15232210 NR Description: Rab GDP dissociation inhibitor [Arabidopsis
  misc_feature (1)..(444): Homolog of NCBI NO: 17473582 NR Description: GDP dissociation inhibitor [Arabidopsis thaliana]
  misc_feature (1)..(444): Homolog of NCBI NO: 1550740 NR Description: GDP-associated inhibitor [Arabidopsis thaliana]
  misc_feature (1)..(444): Homolog of NCBI NO: 15224814 NR Description: GDP dissociation inhibitor [Arabidopsis thaliana]
  misc_feature (1)..(444): Homolog of NCBI NO: 3175990 NR Description: GDP dissociation inhibitor [Cicer arietinum]
  misc_feature (1)..(444): Homolog of NCBI NO: 7489133 NR Description: GDP dissociation inhibitor - common tobacco
  misc_feature (1)..(445): Homolog of NCBI NO: 7489479 NR Description: GDP dissociation inhibitor protein - rice
  misc_feature (1)..(445): Homolog of NCBI NO: 7489478 NR Description: GDP dissociation inhibitor protein - rice
MDEEYDVIVLGTGLKECILSGLLSVDGLKVLHMDRNDYYGGDSTSLNLNQLWKKFRGEEKPPAHLGASRDYNVDMVPKFMMANGTLVRTLIHTDVTKYLSFKAVDGSFVFSKGKIHKVPATDMEALKSPLMGIFEKRRARNFFIYVQDYNDADPRTHQGLDLTRMTTRELIAKHGLSDDTIDFIGHALALHRDDRYLSEPAIDTVKRMKLYSESLARFQGGSPYIYPLYGLGELPQAFARLSAVYGGTYMLNKPECKVEFDMEGKVCGVTSEGETAKCKKVVCDPSYLANKVRKIGKVARAIAIMSHPIPNANDSHSIQIILPQKQLGRKSDMYVFCCSYTHNVAPKGKFIAFVSAEAETDNPQSELKPGIDLLGPVDELFFDMYDRYEPVNEPSLDNCFVSSSYDATTHFETTVTDVLNMYTLITGKTVDLSVDLSAASAAEEY

SEQ ID NO: 68537 - protein, 413 aa, Triticum aestivum
  peptide (1)..(413): Ceres Seq. ID no. 15219651
  misc_feature (1)..(406): Pfam Name: GDP dissociation inhibitor Pfam Description: GDP dissociation inhibitor
  misc_feature (1)..(412): Homolog of NCBI NO: 33146460 NR Description: putative GDP dissociation inhibitor
  misc_feature (1)..(412): Homolog of NCBI NO: 21592535 NR Description: GDP dissociation inhibitor [Arabidopsis thaliana]
  misc_feature (1)..(412): Homolog of NCBI NO: 15232210 NR Description: Rab GDP dissociation inhibitor [Arabidopsis
  misc_feature (1)..(412): Homolog of NCBI NO: 17473582 NR Description: GDP dissociation inhibitor [Arabidopsis thaliana]
  misc_feature (1)..(412): Homolog of NCBI NO: 1550740 NR Description: GDP-associated inhibitor [Arabidopsis thaliana]
  misc_feature (1)..(412): Homolog of NCBI NO: 15224814 NR Description: GDP dissociation inhibitor [Arabidopsis thaliana]
  misc_feature (1)..(412): Homolog of NCBI NO: 3175990 NR Description: GDP dissociation inhibitor [Cicer arietinum]
  misc_feature (1)..(412): Homolog of NCBI NO: 7489133 NR Description: GDP dissociation inhibitor - common tobacco
  misc_feature (1)..(413): Homolog of NCBI NO: 7489479 NR Description: GDP dissociation inhibitor protein - rice
  misc_feature (1)..(413): Homolog of NCBI NO: 7489478 NR Description: GDP dissociation inhibitor protein - rice
MDRNDYYGGDSTSLNLNQLWKKFRGEEKPPAHLGASRDYNVDMVPKFMMANGTLVRTLIHTDVTKYLSFKAVDGSFVFSKGKIHKVPATDMEALKSPLMGIFEKRRARNFFIYVQDYNDADPRTHQGLDLTRMTTRELIAKHGLSDDTIDFIGHALALHRDDRYLSEPAIDTVKRMKLYSESLARFQGGSPYIYPLYGLGELPQAFARLSAVYGGTYMLNKPECKVEFDMEGKVCGVTSEGETAKCKKVVCDPSYLANKVRKIGKVARAIAIMSHPIPNANDSHSIQIILPQKQLGRKSDMYVFCCSYTHNVAPKGKFIAFVSAEAETDNPQSELKPGIDLLGPVDELFFDMYDRYEPVNEPSLDNCFVSSSYDATTHFETTVTDVLNMYTLITGKTVDLSVDLSAASAAEEY

SEQ ID NO: 68538 - DNA, 1133 bp, Triticum aestivum
  misc_feature (1)..(1133): Ceres Seq. ID no. 14316043
cagatcaaacacctagggtttggttcgtgagagagaagagagggtgcgatgaagcttgcggggctcaagtcggtggacggagctcacgaggactcgatctgggcggccgcgtgggtgcccgctgctgaccaccgccccacggcgctgctcctcaccggctccatcgacgagaccgtccgcgcctggcaacccgacgacctcgccgccgcgtcccccccggcgggagggcacgcgctcggagtgatatccctcgcggcgcatcctgccggggtcatagccgccgcggtctccatcgacagccacgtccgcgtcttcgacgtcgactccggcgcatccgtcgccacgctcgatgccgcgccctccgaggtctggggcgtccagttccaccccaagggtgttgctctggctgcagctggtggtggcagtggatcagtaaaactctgggacacggagaagtggcaacctattgccagccttcctgttccgcgtccagagggagcccgcgctgataaaacaggcagcggcaagtttgttctttcagtggcctggagtccagatggcaagctcttagcatgtggatccatggatggcacgattgcggtgtatgatgcggtccgcatgaagttcctccaccacctggaggggcaccacatgccagtgaggtccatggtgttctcgccggtggacccccacgtgctcttgaccggatgtgacgactcccacatccacatctacgatgccaaggagaagggcctgatcggggccatgtcgggtcatgcgagctgggtgctgagcatcgacgtgagcccggatggcatggcggtggcgacaggctccagcgaccgcaccgtccggctctgggacatcaatgcgagggcgtcagttcagaccatgagcaaccactcagaccaggtctgggccgttgcattccggccgccgggaggggaaggagtccgtgctggccggctcgccagcgcttcggatgacaagagcatctccctgtacgattactcctagttttacagatttggcgagctgtgatacagccctctgttattgccgtctgttgtaccatgacctgtaccactgtacgatgctgactaaagccgacacttgcaagttgagcgggtttt

SEQ ID NO: 68539 - protein, 322 aa, Triticum aestivum
  peptide (1)..(322): Ceres Seq. ID no. 14316044
  misc_feature (277)..(320): Pfam Name: WD domain, G-beta repeat Pfam Description: WD domain, G-beta repeat
  misc_feature (34)..(320): Homolog of NCBI NO: 13173173 NR Description: unknown protein i8 [Aedes aegypti]
  misc_feature (29)..(319): Homolog of NCBI NO: 21356075 NR Description: CG3909-PA [Drosophila melanogaster]
  misc_feature (12)..(288): Homolog of NCBI NO: 26345856 NR Description: unnamed protein product [Mus musculus]
  misc_feature (12)..(320): Homolog of NCBI NO: 33150742 NR Description: G protein beta subunit-like protein [Homo sapiens]
  misc_feature (12)..(320): Homolog of NCBI NO: 12849020 NR Description: unnamed protein product [Mus musculus]
  misc_feature (12)..(320): Homolog of NCBI NO: 13277350 NR Description: meiotic recombination protein REC14 [Mus
  misc_feature (12)..(320): Homolog of NCBI NO: 13376840 NR Description: recombination protein REC14 [Homo sapiens]
  misc_feature (12)..(320): Homolog of NCBI NO: 37590940 NR Description: Unknown (protein for MGC:75826) [Silurana
  misc_feature (12)..(320): Homolog of NCBI NO: 38541742 NR Description: Unknown (protein for MGC:77675) [Danio rerio]
  misc_feature (1)..(322): Homolog of NCBI NO: 15233721 NR Description: transducin / WD-40 repeat protein family
MKLAGLKSVDGAHEDSIWAAAWVPAADHRPTALLLTGSIDETVRAWQPDDLAAASPPAGGHALGVISLAAHPAGVIAAAVSIDSHVRVFDVDSGASVATLDAAPSEVWGVQFHPKGVALAAAGGGSGSVKLWDTEKWQPIASLPVPRPEGARADKTGSGKFVLSVAWSPDGKLLACGSMDGTIAVYDAVRMKFLHHLEGHHMPVRSMVFSPVDPHVLLTGCDDSHIHIYDAKEKGLIGAMSGHASWVLSIDVSPDGMAVATGSSDRTVRLWDINARASVQTMSNHSDQVWAVAFRPPGGEGVRAGRLASASDDKSISLYDYS

SEQ ID NO: 68540 - DNA, 1449 bp, Triticum aestivum
  misc_feature (1)..(1449): Ceres Seq. ID no. 13654490
taaaaatccaaatcgccgcctcccaccaccaatccgtccctcacatggctgcgctccactcggcggcggggccgcgtagtccgtctgcgtagcgatcggaacgtagtgtttcggtggtgcgcgccgggttgccttatcggagttcgtgggtgttgactatcagggcgagcggatggacgccgacggtcgcctccggcgcgcgctcgccgccttcgggggcggagacgtgtgggacctcgtcgatgccgcgctcgccgcggccgcgccagccgacctccgcgcgcgtcgtgacgggatcgtggagcggctctacgccggggcccgctgccgcaattgcgatgcccccgagagtccaccgcagccgccgcgtcagccggccgaggccgcttctccggcctggcaggaggaggaggaggaggaggaggaggtggccgacgtggatggcctcggcctggaggaggagaccgacgagggcggcggcttggagagcaagatcctggcgatcaaggatttcttggaggaccccgaccagtcggaggaggagctcgtgagcctgctgcagaacctggcagacatggacatcacctacaaggctctccaggagacggacatcggccgacatgtgaatggcctgcgcaagcacccttcgggtgacgtccggcagttagtgaagctgctcgtcaggaaatggaaggagatagtggacggctgggtgcggctccacaactttggtggtgacggtggaaattcgatcctannngatggtgactctcgtgagaggactcaaggcaaaaggctaccaaaatgcccgggtttcagacttcaagtatacgcccagcccaccacagaggcacagtggtttgagttcagagcggtctaggaataacaatgggttcgagtcgacactggagaggcatagagcaagcccagctcctacgtatcatacgaagcagaacaatggcaataactattcaactacttcgtcatctgctccagctagggcgatgagggagcagaaggataatcatttggacgagaagctcgattcagccagaaagaggcttcaagaaaattaccaggaagcacaaaatgcgaaaaaacagaggacaatgcaagtgctggatatccacgacatacccaagccgaaaaataaaaacaccttcatccgcaagcctggtggaggtggcctccctggccgacatcggtgacctggtgaacatgcaaattcttagccgcggcaaggttcaaaatgaaaaataaattgagcacgaaaggtttatgtttgttctttttttagttacactctggtccgctgaaatattgtccagcacaaccaagtcaagatataatactagtactactgataaaaggaccaaggttatatatttgagaatttgtgctgtagcttgttttttttaagaggtctcttgaatgtacctggaagtattc

SEQ ID NO: 68541 - protein, 235 aa, Triticum aestivum
  peptide (1)..(235): Ceres Seq. ID no. 15219660
  misc_feature (119)..(178): Homolog of NCBI NO: 37531730 NR Description: putative transcription elongation factor
  misc_feature (97)..(181): Homolog of NCBI NO: 15228385 NR Description: hypothetical protein [Arabidopsis thaliana]
  misc_feature (82)..(178): Homolog of NCBI NO: 37531732 NR Description: putative transcription elongation factor
  misc_feature (135)..(181): Homolog of NCBI NO: 22326614 NR Description: expressed protein [Arabidopsis thaliana]
  misc_feature (98)..(165): Homolog of NCBI NO: 38567964 NR Description: OSJNBa0093F12.5 [Oryza sativa (japonica
  misc_feature (94)..(181): Homolog of NCBI NO: 9759255 NR Description: contains similarity to unknown
  misc_feature (15)..(181): Homolog of NCBI NO: 34904746 NR Description: contains ESTs
  misc_feature (51)..(189): Homolog of NCBI NO: 9758963 NR Description: gb|AAF19567.1~gene_id:MYH9.6~similar to unknown
  misc_feature (51)..(200): Homolog of NCBI NO: 18416107 NR Description: expressed protein [Arabidopsis thaliana]
  misc_feature (51)..(200): Homolog of NCBI NO: 16648730 NR Description: AT5g09850/MYH9_6 [Arabidopsis thaliana]
  misc_feature (196)..(196): Xaa is any aa, unknown or other
MDADGRLRRALAAFGGGDVWDLVDAALAAAAPADLRARRDGIVERLYAGARCRNCDAPESPPQPPRQPAEAASPAWQEEEEEEEEVADVDGLGLEEETDEGGGLESKILAIKDFLEDPDQSEEELVSLLQNLADMDITYKALQETDIGRHVNGLRKHPSGDVRQLVKLLVRKWKEIVDGWVRLHNFGGDGGNSILXDGDSRERTQGKRLPKCPGFRLQVYAQPTTEAQWFEFRAV

SEQ ID NO: 68542 - protein, 148 aa, Triticum aestivum
  peptide (1)..(148): Ceres Seq. ID no. 15219661
  misc_feature (54)..(137): Homolog of NCBI NO: 37531730 NR Description: putative transcription elongation factor
  misc_feature (91)..(138): Homolog of NCBI NO: 15228385 NR Description: hypothetical protein [Arabidopsis thaliana]
  misc_feature (5)..(131): Homolog of NCBI NO: 37531732 NR Description: putative transcription elongation factor
  misc_feature (9)..(139): Homolog of NCBI NO: 22326614 NR Description: expressed protein [Arabidopsis thaliana]
  misc_feature (9)..(139): Homolog of NCBI NO: 9759255 NR Description: contains similarity to unknown
  misc_feature (25)..(132): Homolog of NCBI NO: 34904746 NR Description: contains ESTs
  misc_feature (17)..(147): Homolog of NCBI NO: 9758963 NR Description: gb|AAF19567.1~gene_id:MYH9.6~similar to unknown
  misc_feature (17)..(147): Homolog of NCBI NO: 18416107 NR Description: expressed protein [Arabidopsis thaliana]
  misc_feature (17)..(147): Homolog of NCBI NO: 16648730 NR Description: AT5g09850/MYH9_6 [Arabidopsis thaliana]
MVTLVRGLKAKGYQNARVSDFKYTPSPPQRHSGLSSERSRNNNGFESTLERHRASPAPTYHTKQNNGNNYSTTSSSAPARAMREQKDNHLDEKLDSARKRLQENYQEAQNAKKQRTMQVLDIHDIPKPKNKNTFIRKPGGGGLPGRHR

SEQ ID NO: 68543 - DNA, 1367 bp, Triticum aestivum
  misc_feature (1)..(1367): Ceres Seq. ID no. 13598340
cctaatcgaaaaattcaccaaacaatccttgaaatcgacccaagccgctctccctgtcaggtgagccgcgccgccagtctccggcgaccccgagccccaacaatcccatctccggccacaggagctccagggttcctctctccatctggtcctccgctacgccccgaatcgatggagattagggccccgccgacgagcctcaggctcgcgacgccgccttcaaccgccagcttccgcccggtcgccctccggacctccttcctcagcggcagcgtttctcttcgagctgtgcaagtacgtcaatcaaatgtcaacagatttaagtgcaacgccatacggagtaacctcttcgatagactaactagggttgtcaggtcctatgcaaatgcaattctgagttcatttgaagaccctgagaagatcctagatcaagcggtcttggagatgaatgatgatttaataaagatgcggcaagccactgcacaggtcttggcatctcaaaagaggcttgagaacaagtacaaagctgccgaacaagctgatgctgattggtatcggagggctcaacttgctcttcaaaagggtgaagaggatcttgctcgtgaagcccttaaacggcgtaaatcatatgctgaaaatgcaagctcgttaaaggcccagcttgatcagcagaagagtgtcgtcgaaaatcttgtttcaaataccaggcttcttgagagcaagatagcagaggccaagcagaaaaaggataccctaaaagcctgtgctcaatcagcaaagaccgcaacaaaagtgagtgaaatgctggggaatgtgaatacaagtggtgccttgtcagcgtttgagaagatggaggagaaagttatgactatggaatcccaagctgaggcacttggtcaattaggagctgatgatctagaaggaaagtttgcaatgcttgagactacatcggttgacgatgatcttgcacaaatgagaaaagaactgtccgggagatctttgaagggcgaactccctccgggcagagccgcagccagcaaatcaggtagccccttccgagacacagagattgagaaggagctaaatgagctgcggaagaaggccaaagagtattagattttatttacaggccatgtccgtgtcccggggcttgatgaaacctcctacccgaagaaccccagaagttatataggcttgcagatttcagcaatgtgcatctgaaacctccggtgtacttttttttgggggtaaaggtatatgggtgcgtgaagagttctcttgcaattttcctgtgtatgtcattgtactttgtacagttaatcttgtcaccataatgcaaatcattacacccccttttgagcttagct

SEQ ID NO: 68544 - protein, 371 aa, Triticum aestivum
  peptide (1)..(371): Ceres Seq. ID no. 13598341
  misc_feature (115)..(331): Pfam Name: PspA/IM30 family Pfam Description: PspA/IM30 family
  misc_feature (116)..(329): Homolog of NCBI NO: 23126176 NR Description: hypothetical protein [Nostoc punctiforme]
  misc_feature (116)..(366): Homolog of NCBI NO: 22297827 NR Description: ORF_ID:tlr0283~lipid transfer protein M30 homolog
  misc_feature (117)..(366): Homolog of NCBI NO: 33863628 NR Description: similar to chloroplast membrane-associated 30 kD
  misc_feature (116)..(367): Homolog of NCBI NO: 17229834 NR Description: similar to chloroplast membrane-associated 30 kD
  misc_feature (116)..(367): Homolog of NCBI NO: 23040390 NR Description: hypothetical protein [Trichodesmium erythraeum
  misc_feature (116)..(367): Homolog of NCBI NO: 23126177 NR Description: hypothetical protein [Nostoc punctiforme]
  misc_feature (117)..(366): Homolog of NCBI NO: 33866411 NR Description: similar to chloroplast membrane-associated 30 kD
  misc_feature (51)..(371): Homolog of NCBI NO: 18408237 NR Description: expressed protein [Arabidopsis thaliana]
  misc_feature (64)..(370): Homolog of NCBI NO: 729842 NR Description: Membrane-associated 30 kDa protein, chloroplast
  misc_feature (58)..(371): Homolog of NCBI NO: 34907594 NR Description: putative chloroplast membrane-associated 30 kD
PNRKIHQTILEIDPSRSPCQVSRAASLRRPRAPTIPSPATGAPGFLSPSGPPLRPESMEIRAPPTSLRLATPPSTASFRPVALRTSFLSGSVSLRAVQVRQSNVNRFKCNAIRSNLFDRLTRVVRSYANAILSSFEDPEKILDQAVLEMNDDLIKMRQATAQVLASQKRLENKYKAAEQADADWYRRAQLALQKGEEDLAREALKRRKSYAENASSLKAQLDQQKSVVENLVSNTRLLESKIAEAKQKKDTLKACAQSAKTATKVSEMLGNVNTSGALSAFEKMEEKVMTMESQAEALGQLGADDLEGKFAMLETTSVDDDLAQMRKELSGRSLKGELPPGRAAASKSGSPFRDTEIEKELNELRKKAKEY

SEQ ID NO: 68545 - protein, 314 aa, Triticum aestivum
  peptide (1)..(314): Ceres Seq. ID no. 13598342
  misc_feature (58)..(274): Pfam Name: PspA/IM30 family Pfam Description: PspA/IM30 family
  misc_feature (59)..(272): Homolog of NCBI NO: 23126176 NR Description: hypothetical protein [Nostoc punctiforme]
  misc_feature (59)..(309): Homolog of NCBI NO: 22297827 NR Description: ORF_ID:tlr0283~lipid transfer protein M30 homolog
  misc_feature (60)..(309): Homolog of NCBI NO: 33863628 NR Description: similar to chloroplast membrane-associated 30 kD
  misc_feature (59)..(310): Homolog of NCBI NO: 17229834 NR Description: similar to chloroplast membrane-associated 30 kD
  misc_feature (59)..(310): Homolog of NCBI NO: 23040390 NR Description: hypothetical protein [Trichodesmium erythraeum
  misc_feature (59)..(310): Homolog of NCBI NO: 23126177 NR Description: hypothetical protein [Nostoc punctiforme]
  misc_feature (60)..(309): Homolog of NCBI NO: 33866411 NR Description: similar to chloroplast membrane-associated 30 kD
  misc_feature (1)..(314): Homolog of NCBI NO: 18408237 NR Description: expressed protein [Arabidopsis thaliana]
  misc_feature (7)..(313): Homolog of NCBI NO: 729842 NR Description: Membrane-associated 30 kDa protein, chloroplast
  misc_feature (1)..(314): Homolog of NCBI NO: 34907594 NR Description: putative chloroplast membrane-associated 30 kD
MEIRAPPTSLRLATPPSTASFRPVALRTSFLSGSVSLRAVQVRQSNVNRFKCNAIRSNLFDRLTRVVRSYANAILSSFEDPEKILDQAVLEMNDDLIKMRQATAQVLASQKRLENKYKAAEQADADWYRRAQLALQKGEEDLAREALKRRKSYAENASSLKAQLDQQKSVVENLVSNTRLLESKIAEAKQKKDTLKACAQSAKTATKVSEMLGNVNTSGALSAFEKMEEKVMTMESQAEALGQLGADDLEGKFAMLETTSVDDDLAQMRKELSGRSLKGELPPGRAAASKSGSPFRDTEIEKELNELRKKAKEY

SEQ ID NO: 68546 - protein, 223 aa, Triticum aestivum
  peptide (1)..(223): Ceres Seq. ID no. 13598343
  misc_feature (1)..(183): Pfam Name: PspA/IM30 family Pfam Description: PspA/IM30 family
  misc_feature (1)..(181): Homolog of NCBI NO: 23126176 NR Description: hypothetical protein [Nostoc punctiforme]
  misc_feature (1)..(218): Homolog of NCBI NO: 22297827 NR Description: ORF_ID:tlr0283~lipid transfer protein M30 homolog
  misc_feature (1)..(218): Homolog of NCBI NO: 33863628 NR Description: similar to chloroplast membrane-associated 30 kD
  misc_feature (1)..(219): Homolog of NCBI NO: 17229834 NR Description: similar to chloroplast membrane-associated 30 kD
  misc_feature (1)..(219): Homolog of NCBI NO: 23040390 NR Description: hypothetical protein [Trichodesmium erythraeum
  misc_feature (1)..(219): Homolog of NCBI NO: 23126177 NR Description: hypothetical protein [Nostoc punctiforme]
  misc_feature (1)..(218): Homolog of NCBI NO: 33866411 NR Description: similar to chloroplast membrane-associated 30 kD
  misc_feature (1)..(223): Homolog of NCBI NO: 18408237 NR Description: expressed protein [Arabidopsis thaliana]
  misc_feature (1)..(222): Homolog of NCBI NO: 729842 NR Description: Membrane-associated 30 kDa protein, chloroplast
  misc_feature (1)..(223): Homolog of NCBI NO: 34907594 NR Description: putative chloroplast membrane-associated 30 kD
MNDDLIKMRQATAQVLASQKRLENKYKAAEQADADWYRRAQLALQKGEEDLAREALKRRKSYAENASSLKAQLDQQKSVVENLVSNTRLLESKIAEAKQKKDTLKACAQSAKTATKVSEMLGNVNTSGALSAFEKMEEKVMTMESQAEALGQLGADDLEGKFAMLETTSVDDDLAQMRKELSGRSLKGELPPGRAAASKSGSPFRDTEIEKELNELRKKAKEY

SEQ ID NO: 68547 - DNA, 1660 bp, Triticum aestivum
  misc_feature (1)..(1660): Ceres Seq. ID no. 14302321
gttccatttcatttctgtttcggaggaaaggtccagaagcgccgccgccgccgcagcagcgacacgctccctacggcatggcgccggcgtacctggcgaccatacccgcgctccggcgcgcggcgcggcgggccccggcggcgctgttctcgtcggggatcgtcgccggcgacaagcccgttctggtgcgcgatttcgtgaggtcggcgctctacgaccccaaccacggctacttctccaagcggtcggggcccgtcggcgtgctcgactccgccatccgcttccacaagctcgacgggaggaatgcgtacatgaagcatcttgataagctgtataagatgcatgatatctcttggtttactccagtggagctttttaagccatggtatgcctatgcaatagctgcgtcaatccttcgcacggctaatctttcagtcccattgaagatatatgaaatcggaggtggatccgggacatgtgcaaagtgcgtacttgattacatgatgttaaatgccccgccaaaagtctacaataatatgaaatacatctcagtagagattagctcctcccttgctgaaaagcagttggaaactgtcggtgaagtgcagagccatttgtcaaagttcacagtggagcatcgtgatgcaactgacgtagctggatggggcagcaaggatcctcaaccatgctgggtgctaatgcttgaggtacttgacaatctacctcatgaccttgtctattcaccagatcaggtctctccatggatggaggtgtggattgaaaaagtaaatggcagttcacaagtctgtgaggtctacaaaccattgcaagacccattagtttcctgctgcagtgagattgttggcatgaatgaagagaatccatctttgagagaaaaactatcattcgctgcaaaaggactcatctcaaaagtattcccgaagcctcggagagcttggttaccaaccggatgcttgaaactactggatactttgcatcaagctttgccaagtatgtcccttattgcttcagacttcagttatcttcctgatgttagcatacctggcgatagagctccattggtttcttcaaagaaggatgggaaaactttggatcatcccaactatcttgatgcacggggcgatgcagatatcttcttcccaaccgatttcttgctgttggagcagatcgaccaccactgctctggtttctcgaaagaccagatgaatcgtggtgcatttaaacctgtgaagagtaggagaacaatcatacttgattcggctgcctttatggaggagtttgggttgccactgaagacgaggaccaaagatggatacaatccacttcttgatgatttcaggaacacaaagttctatctcagtgtgcctacccacaacaagtagtagtccagcatgcctgcgtcgcttcttctgtttgccatgaggcgctgcattagacgccagtgaatacctaatatgcaactcagtaatcaatttgtcagagcaggttatttatgttttttttcctgtagaagaccgaaattcttaggttggtcaaatttgaggccacagttcaacttcaggcatgctgccgccttttctatgtttgattgatggcacggaagtgaataataccatttgaggccacagttcaattcact

SEQ ID NO: 68548 - protein, 466 aa, Triticum aestivum
  peptide (1)..(466): Ceres Seq. ID no. 14302322
  misc_feature (54)..(118): Pfam Name: Uncharacterized ACR, COG1565 Pfam Description: Uncharacterized ACR, COG1565
  misc_feature (60)..(281): Homolog of NCBI NO: 32422641 NR Description: hypothetical protein [Neurospora crassa]
  misc_feature (60)..(402): Homolog of NCBI NO: 40744669 NR Description: hypothetical protein AN1512.2 [Aspergillus
  misc_feature (47)..(221): Homolog of NCBI NO: 25406821 NR Description: protein F13M7.11 [imported] - Arabidopsis
  misc_feature (225)..(465): Homolog of NCBI NO: 25406821 NR Description: protein F13M7.11 [imported] - Arabidopsis
  misc_feature (47)..(465): Homolog of NCBI NO: 18390452 NR Description: expressed protein [Arabidopsis thaliana]
  misc_feature (26)..(118): Homolog of NCBI NO: 34906872 NR Description: P0470A12.14 [Oryza sativa (japonica
  misc_feature (99)..(466): Homolog of NCBI NO: 34906872 NR Description: P0470A12.14 [Oryza sativa (japonica
SISFLFRRKGPEAPPPPQQRHAPYGMAPAYLATIPALRRAARRAPAALFSSGIVAGDKPVLVRDFVRSALYDPNHGYFSKRSGPVGVLDSAIRFHKLDGRNAYMKHLDKLYKMHDISWFTPVELFKPWYAYAIAASILRTANLSVPLKIYEIGGGSGTCAKCVLDYMMLNAPPKVYNNMKYISVEISSSLAEKQLETVGEVQSHLSKFTVEHRDATDVAGWGSKDPQPCWVLMLEVLDNLPHDLVYSPDQVSPWMEVWIEKVNGSSQVCEVYKPLQDPLVSCCSEIVGMNEENPSLREKLSFAAKGLISKVFPKPRRAWLPTGCLKLLDTLHQALPSMSLIASDFSYLPDVSIPGDRAPLVSSKKDGKTLDHPNYLDARGDADIFFPTDFLLLEQIDHHCSGFSKDQMNRGAFKPVKSRRTIILDSAAFMEEFGLPLKTRTKDGYNPLLDDFRNTKFYLSVPTHNK

SEQ ID NO: 68549 - protein, 441 aa, Triticum aestivum
  peptide (1)..(441): Ceres Seq. ID no. 14302323
  misc_feature (29)..(93): Pfam Name: Uncharacterized ACR, COG1565 Pfam Description: Uncharacterized ACR, COG1565
  misc_feature (35)..(256): Homolog of NCBI NO: 32422641 NR Description: hypothetical protein [Neurospora crassa]
  misc_feature (35)..(377): Homolog of NCBI NO: 40744669 NR Description: hypothetical protein AN1512.2 [Aspergillus
  misc_feature (22)..(196): Homolog of NCBI NO: 25406821 NR Description: protein F13M7.11 [imported] - Arabidopsis
  misc_feature (200)..(440): Homolog of NCBI NO: 25406821 NR Description: protein F13M7.11 [imported] - Arabidopsis
  misc_feature (22)..(440): Homolog of NCBI NO: 18390452 NR Description: expressed protein [Arabidopsis thaliana]
  misc_feature (1)..(93): Homolog of NCBI NO: 34906872 NR Description: P0470A12.14 [Oryza sativa (japonica
  misc_feature (74)..(441): Homolog of NCBI NO: 34906872 NR Description: P0470A12.14 [Oryza sativa (japonica
MAPAYLATIPALRRAARRAPAALFSSGIVAGDKPVLVRDFVRSALYDPNHGYFSKRSGPVGVLDSAIRFHKLDGRNAYMKHLDKLYKMHDISWFTPVELFKPWYAYAIAASILRTANLSVPLKIYEIGGGSGTCAKCVLDYMMLNAPPKVYNNMKYISVEISSSLAEKQLETVGEVQSHLSKFTVEHRDATDVAGWGSKDPQPCWVLMLEVLDNLPHDLVYSPDQVSPWMEVWIEKVNGSSQVCEVYKPLQDPLVSCCSEIVGMNEENPSLREKLSFAAKGLISKVFPKPRRAWLPTGCLKLLDTLHQALPSMSLIASDFSYLPDVSIPGDRAPLVSSKKDGKTLDHPNYLDARGDADIFFPTDFLLLEQIDHHCSGFSKDQMNRGAFKPVKSRRTIILDSAAFMEEFGLPLKTRTKDGYNPLLDDFRNTKFYLSVPTHNK

SEQ ID NO: 68550 - protein, 363 aa, Triticum aestivum
  peptide (1)..(363): Ceres Seq. ID no. 14302324
  misc_feature (1)..(294): Pfam Name: Uncharacterized ACR, COG1565 Pfam Description: Uncharacterized ACR, COG1565
  misc_feature (1)..(178): Homolog of NCBI NO: 32422641 NR Description: hypothetical protein [Neurospora crassa]
  misc_feature (1)..(299): Homolog of NCBI NO: 40744669 NR Description: hypothetical protein AN1512.2 [Aspergillus
  misc_feature (1)..(118): Homolog of NCBI NO: 25406821 NR Description: protein F13M7.11 [imported] - Arabidopsis
  misc_feature (122)..(362): Homolog of NCBI NO: 25406821 NR Description: protein F13M7.11 [imported] - Arabidopsis
  misc_feature (1)..(362): Homolog of NCBI NO: 18390452 NR Description: expressed protein [Arabidopsis thaliana]
  misc_feature (1)..(15): Homolog of NCBI NO: 34906872 NR Description: P0470A12.14 [Oryza sativa (japonica
  misc_feature (1)..(363): Homolog of NCBI NO: 34906872 NR Description: P0470A12.14 [Oryza sativa (japonica
MKHLDKLYKMHDISWFTPVELFKPWYAYAIAASILRTANLSVPLKIYEIGGGSGTCAKCVLDYMMLNAPPKVYNNMKYISVEISSSLAEKQLETVGEVQSHLSKFTVEHRDATDVAGWGSKDPQPCWVLMLEVLDNLPHDLVYSPDQVSPWMEVWIEKVNGSSQVCEVYKPLQDPLVSCCSEIVGMNEENPSLREKLSFAAKGLISKVFPKPRRAWLPTGCLKLLDTLHQALPSMSLIASDFSYLPDVSIPGDRAPLVSSKKDGKTLDHPNYLDARGDADIFFPTDFLLLEQIDHHCSGFSKDQMNRGAFKPVKSRRTIILDSAAFMEEFGLPLKTRTKDGYNPLLDDFRNTKFYLSVPTHNK

SEQ ID NO: 68551 - DNA, 1634 bp, Triticum aestivum
  misc_feature (1)..(1634): Ceres Seq. ID no. 13654273
atgtttcgtgaatacagtgaccaaactgaaccctagagccaagtttagttactgtagatgtaattttctccgatgctccagatacgcctgagcaggatcggctcgtcggactccggggccgcggcctctggcgcggcggctggggcgtccggtggcgccccggcgaagtccgccgccgcggcggctggcggtgccccggagtcggtgactgtcgcttgccccgaccacctggtcatcgcagacctcgccgtggcgaagagcctcggcgccgtcacaaactccgccatcgctgcgacgcgcgccatcggccgccgctcccgccggcccctcggcgagcgcgtccacatctgctcccgctgcgagttccccatcgccattaatggccgcctcatttcttgcgaacatgcattctgtttagcctgtgcaagaagtgattccagctgctatctttgtgatgagcgcattcagaagattcagactgtgaaaatgatggaagggatttttatctgcgctgcacctatgtgcctcaagtctttccttaagaaagcggaatttatgactcatgtacctgaagctcatgcaaatctcctccaaactaacacggagaaggaagaacgtaatgaaccagatgctcctaacatctcccgtgcttctggaggagatgctcaaaggcaatctcaaatgcctgagatatctaccgcacgtgctcctccaaggcggggtgtttcacccacttcaagttctcacatgcaagagcgtgaagaccgatctcggtatcaccagtccagggagagggagcacaccccactaaggccccctatgctaagcaaaccaccatcattccatggtcgccactatccaccaggtgatactcggtccgaaaacaacacacctcaaggatttgaccgttcttacagctgggcccatgatggtacacctggtgcaactccacttcgccaagaacctgaccatggtactcaagacaagcagcaagtgatgcctaattcacctttcatgttctctccaatgcatcctcatcagcaaaacttcatgatgcatatgaatatgaatcagcctttaatccccagctcatcattcagctaccctgtccaacaagatgggaatccgcagtacttcagtgctcctttccagatgcaactgcaagatgccggatcagatcaaggttcagcgtcggtgcctgaggggcttcagcgcccatggggcatggggttgatgggcaatccatctcagggaggtggcggcatggccttcatgccaactggtttcgggatgatgccagacagctcgatgaatccaggcatgcaaggtagggattttcaaggccaagctgatcgtggcgacggaaggggcatccaagaacagttacctatggtgatgcaaatgcagatgtcgctccccccacctccccctacacaacccccgtccgctggacagcagtctttcaacagaacttgatgagttttttgcgtgccaattttatggctgctgccaaaatcgtgctgtactgcgttgggaaattgcaattttgccaccttggcatgtaactgatgagcactcgatggcagcctatgttgtgctaaaaacgatgcaatttaatctgagttgtcatatgc

SEQ ID NO: 68552 - protein, 467 aa, Triticum aestivum
  peptide (1)..(467): Ceres Seq. ID no. 13654274
  misc_feature (90)..(457): Homolog of NCBI NO: 22749189 NR Description: hypothetical protein FLJ25735 [Homo sapiens]
  misc_feature (86)..(358): Homolog of NCBI NO: 34864203 NR Description: similar to Casitas B-lineage lymphoma-like 1
  misc_feature (86)..(358): Homolog of NCBI NO: 19527264 NR Description: E-cadherin binding protein E7 [Mus musculus]
  misc_feature (86)..(358): Homolog of NCBI NO: 9622093 NR Description: E-cadherin binding protein E7 [Mus musculus]
  misc_feature (86)..(358): Homolog of NCBI NO: 34785057 NR Description: E-cadherin binding protein E7 [Homo sapiens]
  misc_feature (86)..(358): Homolog of NCBI NO: 13376204 NR Description: E-cadherin binding protein E7 [Homo sapiens]
  misc_feature (309)..(467): Homolog of NCBI NO: 37535662 NR Description: hypothetical protein [Oryza sativa (japonica
  misc_feature (29)..(265): Homolog of NCBI NO: 21536615 NR Description: unknown [Arabidopsis thaliana]
  misc_feature (29)..(265): Homolog of NCBI NO: 15240902 NR Description: expressed protein [Arabidopsis thaliana]
  misc_feature (1)..(424): Homolog of NCBI NO: 37535662 NR Description: hypothetical protein [Oryza sativa (japonica
MLQIRLSRIGSSDSGAAASGAAAGASGGAPAKSAAAAAGGAPESVTVACPDHLVIADLAVAKSLGAVTNSAIAATRAIGRRSRRPLGERVHICSRCEFPIAINGRLISCEHAFCLACARSDSSCYLCDERIQKIQTVKMMEGIFICAAPMCLKSFLKKAEFMTHVPEAHANLLQTNTEKEERNEPDAPNISRASGGDAQRQSQMPEISTARAPPRRGVSPTSSSHMQEREDRSRYHQSREREHTPLRPPMLSKPPSFHGRHYPPGDTRSENNTPQGFDRSYSWAHDGTPGATPLRQEPDHGTQDKQQVMPNSPFMFSPMHPHQQNFMMHMNMNQPLIPSSSFSYPVQQDGNPQYFSAPFQMQLQDAGSDQGSASVPEGLQRPWGMGLMGNPSQGGGGMAFMPTGFGMMPDSSMNPGMQGRDFQGQADRGDGRGIQEQLPMVMQMQMSLPPPPPTQPPSAGQQSFNRT

SEQ ID NO: 68553 - protein, 329 aa, Triticum aestivum
  peptide (1)..(329): Ceres Seq. ID no. 13654275
  misc_feature (1)..(319): Homolog of NCBI NO: 22749189 NR Description: hypothetical protein FLJ25735 [Homo sapiens]
  misc_feature (1)..(220): Homolog of NCBI NO: 34864203 NR Description: similar to Casitas B-lineage lymphoma-like 1
  misc_feature (1)..(220): Homolog of NCBI NO: 19527264 NR Description: E-cadherin binding protein E7 [Mus musculus]
  misc_feature (1)..(220): Homolog of NCBI NO: 9622093 NR Description: E-cadherin binding protein E7 [Mus musculus]
  misc_feature (1)..(220): Homolog of NCBI NO: 34785057 NR Description: E-cadherin binding protein E7 [Homo sapiens]
  misc_feature (1)..(220): Homolog of NCBI NO: 13376204 NR Description: E-cadherin binding protein E7 [Homo sapiens]
  misc_feature (171)..(329): Homolog of NCBI NO: 37535662 NR Description: hypothetical protein [Oryza sativa (japonica
  misc_feature (1)..(127): Homolog of NCBI NO: 21536615 NR Description: unknown [Arabidopsis thaliana]
  misc_feature (1)..(127): Homolog of NCBI NO: 15240902 NR Description: expressed protein [Arabidopsis thaliana]
  misc_feature (1)..(286): Homolog of NCBI NO: 37535662 NR Description: hypothetical protein [Oryza sativa (japonica
MMEGIFICAAPMCLKSFLKKAEFMTHVPEAHANLLQTNTEKEERNEPDAPNISRASGGDAQRQSQMPEISTARAPPRRGVSPTSSSHMQEREDRSRYHQSREREHTPLRPPMLSKPPSFHGRHYPPGDTRSENNTPQGFDRSYSWAHDGTPGATPLRQEPDHGTQDKQQVMPNSPFMFSPMHPHQQNFMMHMNMNQPLIPSSSFSYPVQQDGNPQYFSAPFQMQLQDAGSDQGSASVPEGLQRPWGMGLMGNPSQGGGGMAFMPTGFGMMPDSSMNPGMQGRDFQGQADRGDGRGIQEQLPMVMQMQMSLPPPPPTQPPSAGQQSFNRT

SEQ ID NO: 68554 - protein, 328 aa, Triticum aestivum
  peptide (1)..(328): Ceres Seq. ID no. 13654276
  misc_feature (1)..(318): Homolog of NCBI NO: 22749189 NR Description: hypothetical protein FLJ25735 [Homo sapiens]
  misc_feature (1)..(219): Homolog of NCBI NO: 34864203 NR Description: similar to Casitas B-lineage lymphoma-like 1
  misc_feature (1)..(219): Homolog of NCBI NO: 19527264 NR Description: E-cadherin binding protein E7 [Mus musculus]
  misc_feature (1)..(219): Homolog of NCBI NO: 9622093 NR Description: E-cadherin binding protein E7 [Mus musculus]
  misc_feature (1)..(219): Homolog of NCBI NO: 34785057 NR Description: E-cadherin binding protein E7 [Homo sapiens]
  misc_feature (1)..(219): Homolog of NCBI NO: 13376204 NR Description: E-cadherin binding protein E7 [Homo sapiens]
  misc_feature (170)..(328): Homolog of NCBI NO: 37535662 NR Description: hypothetical protein [Oryza sativa (japonica
  misc_feature (1)..(126): Homolog of NCBI NO: 21536615 NR Description: unknown [Arabidopsis thaliana]
  misc_feature (1)..(126): Homolog of NCBI NO: 15240902 NR Description: expressed protein [Arabidopsis thaliana]
  misc_feature (1)..(285): Homolog of NCBI NO: 37535662 NR Description: hypothetical protein [Oryza sativa (japonica
MEGIFICAAPMCLKSFLKKAEFMTHVPEAHANLLQTNTEKEERNEPDAPNISRASGGDAQRQSQMPEISTARAPPRRGVSPTSSSHMQEREDRSRYHQSREREHTPLRPPMLSKPPSFHGRHYPPGDTRSENNTPQGFDRSYSWAHDGTPGATPLRQEPDHGTQDKQQVMPNSPFMFSPMHPHQQNFMMHMNMNQPLIPSSSFSYPVQQDGNPQYFSAPFQMQLQDAGSDQGSASVPEGLQRPWGMGLMGNPSQGGGGMAFMPTGFGMMPDSSMNPGMQGRDFQGQADRGDGRGIQEQLPMVMQMQMSLPPPPPTQPPSAGQQSFNRT

SEQ ID NO: 68555 - DNA, 834 bp, Triticum aestivum
  misc_feature (1)..(834): Ceres Seq. ID no. 12584190
acaccacaccattgccactctcgtcctcctccagtccggcctccgctgtattggactgcaccggcgccggtgccggccgggctgcagaccggtcgactccttcgccttgcccggcctcctcgcagacacggctttggagattcaaagaatttacgttactagacaattcatgcatatatgaagtcctacttgtaggtgagcctagcagtgctattcttatgtgcagtatggcacggacaactgcagatcaggcaatggcgacacgtaagttggtcgtaaaggtcgtcggtgctcacggcctggcacacagcaagaggggtttacccagtgcatttgttgtgctttcgtttgattctcagcagttccgcacgagtgtcaaggagaataatgagaacccggtatggaacgacaccttctgcttcaacgtgttggatcgacccaagattcatgagctagttcttcaagtttgtgtgtatgacaccaatacgtctgttcaaggcgaaatgtctttgattggaaaagtcaaagtaaatggggcctcattccggccctgtgacaaaggaccatcaaattatccgctgaggcttgggaatgttaaacatacatggcgcatacgtgacagaagaggatcttcagagatagttcagaggtagtttaactaggatatgatatctattcggtcgtaaccaagtctatctcttgcttttctttctcctcaagttgtatcccgattctctcttatcttctcaaccaactcatgtatgcgcctcagggttattgcacccctgctatataacacgtagcacgtcgcccaagatagggtaagacgtttcc

SEQ ID NO: 68556 - protein, 216 aa, Triticum aestivum
  peptide (1)..(216): Ceres Seq. ID no. 12584191
  misc_feature (90)..(174): Pfam Name: C2 domain Pfam Description: C2 domain
  misc_feature (88)..(209): Homolog of NCBI NO: 25406370 NR Description: hypothetical protein F25A4.30 [imported] -
  misc_feature (88)..(209): Homolog of NCBI NO: 15221349 NR Description: hypothetical protein; protein id: At1g74720.1
  misc_feature (88)..(209): Homolog of NCBI NO: 12324804 NR Description: putative phosphoribosylanthranilate transferase,
  misc_feature (79)..(180): Homolog of NCBI NO: 15219665 NR Description: putative phosphoribosylanthranilate transferase
  misc_feature (85)..(198): Homolog of NCBI NO: 22328187 NR Description: putative phosphoribosylanthranilate transferase
  misc_feature (85)..(193): Homolog of NCBI NO: 28973638 NR Description: unknown protein [Arabidopsis thaliana]
  misc_feature (85)..(216): Homolog of NCBI NO: 22831331 NR Description: contains ESTs
  misc_feature (85)..(193): Homolog of NCBI NO: 15234247 NR Description: putative protein; protein id: At4g11620.1
  misc_feature (85)..(193): Homolog of NCBI NO: 32488702 NR Description: OSJNBa0088H09.3 [Oryza sativa (japonica
TTPLPLSSSSSPASAVLDCTGAGAGRAADRSTPSPCPASSQTRLWRFKEFTLLDNSCIYEVLLVGEPSSAILMCSMARTTADQAMATRKLVVKVVGAHGLAHSKRGLPSAFVVLSFDSQQFRTSVKENNENPVWNDTFCFNVLDRPKIHELVLQVCVYDTNTSVQGEMSLIGKVKVNGASFRPCDKGPSNYPLRLGNVKHTWRIRDRRGSSEIVQR

SEQ ID NO: 68557 - protein, 144 aa, Triticum aestivum
  peptide (1)..(144): Ceres Seq. ID no. 12584192
  misc_feature (18)..(102): Pfam Name: C2 domain Pfam Description: C2 domain
  misc_feature (16)..(137): Homolog of NCBI NO: 25406370 NR Description: hypothetical protein F25A4.30 [imported] -
  misc_feature (16)..(137): Homolog of NCBI NO: 15221349 NR Description: hypothetical protein; protein id: At1g74720.1
  misc_feature (16)..(137): Homolog of NCBI NO: 12324804 NR Description: putative phosphoribosylanthranilate transferase,
  misc_feature (7)..(108): Homolog of NCBI NO: 15219665 NR Description: putative phosphoribosylanthranilate transferase
  misc_feature (13)..(126): Homolog of NCBI NO: 22328187 NR Description: putative phosphoribosylanthranilate transferase
  misc_feature (13)..(121): Homolog of NCBI NO: 28973638 NR Description: unknown protein [Arabidopsis thaliana]
  misc_feature (13)..(144): Homolog of NCBI NO: 22831331 NR Description: contains ESTs
  misc_feature (13)..(121): Homolog of NCBI NO: 15234247 NR Description: putative protein; protein id: At4g11620.1
  misc_feature (13)..(121): Homolog of NCBI NO: 32488702 NR Description: OSJNBa0088H09.3 [Oryza sativa (japonica
MCSMARTTADQAMATRKLVVKVVGAHGLAHSKRGLPSAFVVLSFDSQQFRTSVKENNENPVWNDTFCFNVLDRPKIHELVLQVCVYDTNTSVQGEMSLIGKVKVNGASFRPCDKGPSNYPLRLGNVKHTWRIRDRRGSSEIVQR

SEQ ID NO: 68558 - protein, 141 aa, Triticum aestivum
  peptide (1)..(141): Ceres Seq. ID no. 12584193
  misc_feature (15)..(99): Pfam Name: C2 domain Pfam Description: C2 domain
  misc_feature (13)..(134): Homolog of NCBI NO: 25406370 NR Description: hypothetical protein F25A4.30 [imported] -
  misc_feature (13)..(134): Homolog of NCBI NO: 15221349 NR Description: hypothetical protein; protein id: At1g74720.1
  misc_feature (13)..(134): Homolog of NCBI NO: 12324804 NR Description: putative phosphoribosylanthranilate transferase,
  misc_feature (4)..(105): Homolog of NCBI NO: 15219665 NR Description: putative phosphoribosylanthranilate transferase
  misc_feature (10)..(123): Homolog of NCBI NO: 22328187 NR Description: putative phosphoribosylanthranilate transferase
  misc_feature (10)..(118): Homolog of NCBI NO: 28973638 NR Description: unknown protein [Arabidopsis thaliana]
  misc_feature (10)..(141): Homolog of NCBI NO: 22831331 NR Description: contains ESTs
  misc_feature (10)..(118): Homolog of NCBI NO: 15234247 NR Description: putative protein; protein id: At4g11620.1
  misc_feature (10)..(118): Homolog of NCBI NO: 32488702 NR Description: OSJNBa0088H09.3 [Oryza sativa (japonica
MARTTADQAMATRKLVVKVVGAHGLAHSKRGLPSAFVVLSFDSQQFRTSVKENNENPVWNDTFCFNVLDRPKIHELVLQVCVYDTNTSVQGEMSLIGKVKVNGASFRPCDKGPSNYPLRLGNVKHTWRIRDRRGSSEIVQR

SEQ ID NO: 68559 - DNA, 532 bp, Triticum aestivum
  misc_feature (1)..(532): Ceres Seq. ID no. 13596434
agcaagcagctgatccgagttaaccattagccaaaagtaatcttgcttttccatttcccgagagagctcagttcgtgtctgcactccagtccagtgtttgtttgagcagcagccatggcctccaaccaggacaaggcaagctaccgcgccggcgaggccaaggcccacaccgaggagaaggccggacaggtgaccggcgcggccaaggacgaggcgtgcgacgccaaggaccgggcgtcgggcgcggcggggcaagcgacggggaaggggcagggcgccgtggaggccacgaagcagaaggccggcgaggcggggcagaagacgtccgagacggcgcaggccggcaaggaccgggccgccgagggcaaggaccggaccggcagctacctcggccacgcgaccgaggggaccaagcagaaggcctccgaggcgacggggtacacgcaggacagggcttccgacgcggcgcagtacaccaaggactccgccgtcgccggcaaggacaagaccggcagcgtcctcagccaggccc

SEQ ID NO: 68560 - protein, 139 aa, Triticum aestivum
  peptide (1)..(139): Ceres Seq. ID no. 13596435
  misc_feature (79)..(138): Pfam Name: Late embryogenesis abundant protein Pfam Description: Late embryogenesis abundant protein
  misc_feature (1)..(138): Homolog of NCBI NO: 25989705 NR Description: LEA1 protein [Triticum aestivum]
  misc_feature (1)..(125): Homolog of NCBI NO: 7387829 NR Description: Late embryogenesis abundant protein, group 3
  misc_feature (34)..(138): Homolog of NCBI NO: 33342178 NR Description: ABA inducible protein [Triticum aestivum]
  misc_feature (1)..(138): Homolog of NCBI NO: 126081 NR Description: ABA-inducible protein PHV A1
  misc_feature (1)..(138): Homolog of NCBI NO: 25989707 NR Description: LEA3 protein [Triticum aestivum]
  misc_feature (1)..(138): Homolog of NCBI NO: 25989709 NR Description: LEA2 protein [Triticum aestivum]
  misc_feature (1)..(138): Homolog of NCBI NO: 4929080 NR Description: ABA-inducible protein WRAB1 [Triticum aestivum]
  misc_feature (1)..(138): Homolog of NCBI NO: 7489569 NR Description: protein LEA type 1 - rice
  misc_feature (1)..(138): Homolog of NCBI NO: 4105441 NR Description: group 3 LEA protein [Oryza sativa]
  misc_feature (1)..(138): Homolog of NCBI NO: 7489493 NR Description: LEA protein - rice
MASNQDKASYRAGEAKAHTEEKAGQVTGAAKDEACDAKDRASGAAGQATGKGQGAVEATKQKAGEAGQKTSETAQAGKDRAAEGKDRTGSYLGHATEGTKQKASEATGYTQDRASDAAQYTKDSAVAGKDKTGSVLSQA

SEQ ID NO: 68561 - DNA, 1421 bp, Triticum aestivum
  misc_feature (1)..(1421): Ceres Seq. ID no. 13596394
attcccaggcacatcccatttccaatcccccacccttcctctctctctcccccgcccctagccgtcgccggagagagagagggacgcggccgcgggagaagaaggagggaagatgatgatgacacgggcctccatgggggccatggagggcgcggcgctggacgaggtggtgcggcgattggtcgagggcggccgcggcgggcggcaggtgcagctgtccgaggcggagatccggcagctctgcgtcgacgccaagcgggttttcctgtcccagccgaacctcctccgcatccaggcccccgtcaagatctgcggtgatatccatggtcagtttgttgatcttctgaggttgtttgatttgggtggttatcctccaacctcaacctatgtattcctcggagactacgtagatagaggcaaacagagcttggaaactatatgcttactgctggcctacaaaataaggtaccctgacaaggttttcctgttaaggggtaaccatgaagatgcaaaaatcaacagagtttatggtttctatgatgaatgcaagaggaggttcaatgttcgactgtggaagatattctctgattgcttcaactgcctgcctattgcagcactcattgacgacaagatactgtgcatgcatggtggcctttcacctgaactgactaacctggaccaaataaaggatattgagaggccggctgagattcctgattatggtctcctgtgtgatttgctttggtctgatcctagccctgacggagaagggtggggggagagtgacagaggtgtttcatgtacgtttggtgcagatatgcttatagagttcttggagaaaaatgatcttgatcttatctgccgagcccatcaggtggtagaagatggttatgagttcttcgcacagcggagattagtcaccatcttctcagctccaaattactgcggggaattcgataatgtaggtgctctgttgagcatagatgaaaatctaatgtgctcatttcaaatcttgaagccaaatgaaacaggcacatcgcgggtaaaaagacaaattccaaataagccagcaaccgggggaagtgcctgatctgatcaacatccattccttcaatattagcatcgtcggctcgaagggggtgatctgatctattgtttggatccaccatggcatggcaatattcatccaccagccaattgtcttgcttaaccaccctttgccgagcatttgtaaatgtccattggctctgcactcgttttctctgtacagaattaggccggatttaacagcaccacctattctggttgttcttcctggttgcgcggcatctgtttttgtaagttacttttgtggtacatttttgcctgtggatgttgatagcttctgtttgtgagcatctattatttgccttatgtttgtc

SEQ ID NO: 68562 - protein, 325 aa, Triticum aestivum
  peptide (1)..(325): Ceres Seq. ID no. 13596395
  misc_feature (62)..(257): Pfam Name: Calcineurin-like phosphoesterase Pfam Description: Calcineurin-like phosphoesterase
  misc_feature (10)..(305): Homolog of NCBI NO: 15227080 NR Description: phosphoprotein phosphatase-type 1 catalytic
  misc_feature (3)..(305): Homolog of NCBI NO: 5917726 NR Description: serine/threonine protein phosphatase 1; PP1
  misc_feature (11)..(318): Homolog of NCBI NO: 21593410 NR Description: TOPP8 serine/threonine protein phosphatase type
  misc_feature (2)..(316): Homolog of NCBI NO: 3153205 NR Description: serine/threonine protein phosphatase type one
  misc_feature (2)..(318): Homolog of NCBI NO: 30690815 NR Description: serine/threonine protein phosphatase type
  misc_feature (11)..(322): Homolog of NCBI NO: 1346765 NR Description: SERINE/THREONINE PROTEIN PHOSPHATASE PP1
  misc_feature (2)..(316): Homolog of NCBI NO: 30690812 NR Description: serine/threonine protein phosphatase type
  misc_feature (2)..(316): Homolog of NCBI NO: 15230010 NR Description: serine/threonine protein phosphatase (PP1)
  misc_feature (2)..(323): Homolog of NCBI NO: 29290586 NR Description: serine threonine protein phosphatase [Phaseolus
  misc_feature (8)..(324): Homolog of NCBI NO: 34895162 NR Description: putative serine/threonine protein phosphatase
MMMTRASMGAMEGAALDEVVRRLVEGGRGGRQVQLSEAEIRQLCVDAKRVFLSQPNLLRIQAPVKICGDIHGQFVDLLRLFDLGGYPPTSTYVFLGDYVDRGKQSLETICLLLAYKIRYPDKVFLLRGNHEDAKINRVYGFYDECKRRFNVRLWKIFSDCFNCLPIAALIDDKILCMHGGLSPELTNLDQIKDIERPAEIPDYGLLCDLLWSDPSPDGEGWGESDRGVSCTFGADMLIEFLEKNDLDLICRAHQVVEDGYEFFAQRRLVTIFSAPNYCGEFDNVGALLSIDENLMCSFQILKPNETGTSRVKRQIPNKPATGGSA

SEQ ID NO: 68563 - protein, 324 aa, Triticum aestivum
  peptide (1)..(324): Ceres Seq. ID no. 13596396
  misc_feature (61)..(256): Pfam Name: Calcineurin-like phosphoesterase Pfam Description: Calcineurin-like phosphoesterase
  misc_feature (9)..(304): Homolog of NCBI NO: 15227080 NR Description: phosphoprotein phosphatase-type 1 catalytic
  misc_feature (2)..(304): Homolog of NCBI NO: 5917726 NR Description: serine/threonine protein phosphatase 1; PP1
  misc_feature (10)..(317): Homolog of NCBI NO: 21593410 NR Description: TOPP8 serine/threonine protein phosphatase type
  misc_feature (1)..(315): Homolog of NCBI NO: 3153205 NR Description: serine/threonine protein phosphatase type one
  misc_feature (1)..(317): Homolog of NCBI NO: 30690815 NR Description: serine/threonine protein phosphatase type
  misc_feature (10)..(321): Homolog of NCBI NO: 1346765 NR Description: SERINE/THREONINE PROTEIN PHOSPHATASE PP1
  misc_feature (1)..(315): Homolog of NCBI NO: 30690812 NR Description: serine/threonine protein phosphatase type
  misc_feature (1)..(315): Homolog of NCBI NO: 15230010 NR Description: serine/threonine protein phosphatase (PP1)
  misc_feature (1)..(322): Homolog of NCBI NO: 29290586 NR Description: serine threonine protein phosphatase [Phaseolus
  misc_feature (7)..(323): Homolog of NCBI NO: 34895162 NR Description: putative serine/threonine protein phosphatase
MMTRASMGAMEGAALDEVVRRLVEGGRGGRQVQLSEAEIRQLCVDAKRVFLSQPNLLRIQAPVKICGDIHGQFVDLLRLFDLGGYPPTSTYVFLGDYVDRGKQSLETICLLLAYKIRYPDKVFLLRGNHEDAKINRVYGFYDECKRRFNVRLWKIFSDCFNCLPIAALIDDKILCMHGGLSPELTNLDQIKDIERPAEIPDYGLLCDLLWSDPSPDGEGWGESDRGVSCTFGADMLIEFLEKNDLDLICRAHQVVEDGYEFFAQRRLVTIFSAPNYCGEFDNVGALLSIDENLMCSFQILKPNETGTSRVKRQIPNKPATGGSA

SEQ ID NO: 68564 - protein, 323 aa, Triticum aestivum
  peptide (1)..(323): Ceres Seq. ID no. 13596397
  misc_feature (60)..(255): Pfam Name: Calcineurin-like phosphoesterase Pfam Description: Calcineurin-like phosphoesterase
  misc_feature (8)..(303): Homolog of NCBI NO: 15227080 NR Description: phosphoprotein phosphatase-type 1 catalytic
  misc_feature (1)..(303): Homolog of NCBI NO: 5917726 NR Description: serine/threonine protein phosphatase 1; PP1
  misc_feature (9)..(316): Homolog of NCBI NO: 21593410 NR Description: TOPP8 serine/threonine protein phosphatase type
  misc_feature (1)..(314): Homolog of NCBI NO: 3153205 NR Description: serine/threonine protein phosphatase type one
  misc_feature (1)..(316): Homolog of NCBI NO: 30690815 NR Description: serine/threonine protein phosphatase type
  misc_feature (9)..(320): Homolog of NCBI NO: 1346765 NR Description: SERINE/THREONINE PROTEIN PHOSPHATASE PP1
  misc_feature (1)..(314): Homolog of NCBI NO: 30690812 NR Description: serine/threonine protein phosphatase type
  misc_feature (1)..(314): Homolog of NCBI NO: 15230010 NR Description: serine/threonine protein phosphatase (PP1)
  misc_feature (1)..(321): Homolog of NCBI NO: 29290586 NR Description: serine threonine protein phosphatase [Phaseolus
  misc_feature (6)..(322): Homolog of NCBI NO: 34895162 NR Description: putative serine/threonine protein phosphatase
MTRASMGAMEGAALDEVVRRLVEGGRGGRQVQLSEAEIRQLCVDAKRVFLSQPNLLRIQAPVKICGDIHGQFVDLLRLFDLGGYPPTSTYVFLGDYVDRGKQSLETICLLLAYKIRYPDKVFLLRGNHEDAKINRVYGFYDECKRRFNVRLWKIFSDCFNCLPIAALIDDKILCMHGGLSPELTNLDQIKDIERPAEIPDYGLLCDLLWSDPSPDGEGWGESDRGVSCTFGADMLIEFLEKNDLDLICRAHQVVEDGYEFFAQRRLVTIFSAPNYCGEFDNVGALLSIDENLMCSFQILKPNETGTSRVKRQIPNKPATGGSA

SEQ ID NO: 68565 - DNA, 1728 bp, Triticum aestivum
  misc_feature (1)..(1728): Ceres Seq. ID no. 12614670
atcaagtacacagttcactatcatctagcctttcttcccccatctctctcgagaaacaaagcaatggttcttggactgctggtgagttccccagccacggtgctatggagcctcctgggcctggcgcttctctggcaggtcaagcggctggttgactacacgtggtggcggccacggcggctccagcgggcgctgcgtgcgcagggcctccgcgggacgccgtaccgcttccccgtcggcgacctcggcgactacgggcggcagggcaaagaggcgtcgtccagggcgctgccgctgcggtgccatgacatacgcgcccacgtcgcgccgtacctctgcaacaccgtccgggagcacggcaagacgtgcgtctcctggttcggccccgtccccaaggtgaccatcgccgaccccggcgtcacccgggaggtgatgtccaacaagttcggccacttcgagaagctccagttcccgacgctgaccaggctcctcgctggcggcgtcgcggtctatgagggtgagaagtgggtcaagcacaggaggatccttaacccggcgttccatatcgagaagctcaagttcatgatgccagcattctctgcatgctgtgaagagcttgtgagcagatggactcagtcccttggttctgacggttggtgtgaggtggatgtctgcccagagtttcaaaccctcaccggagatgtcatctcacgaaccgcgttcggcagcagctacctcgaaggtagacggattttcgagctgcaatctgtgcaagccgaccgcattgtggctgaagttaagaagatcttcattcctggttatatgtccttgcctaccaagaagaacagactgatgcgtcagactaataacgagattgaacccattctacgaggtctaattgaaaaaagaatgcaatccatgcaacaaggagaaagcaccaaggatgatttactcggcttaatgcttgagtcaaacatgaggggaacagatgacaagggtcaacccatcctaggaatgacaattgaagaagtgatagaggaatgcaaattgttctattttgcagggtccgagacaacatctgtattgctcacctggacaatgatcgtactggccatgcaccccgagtggcaagaccgtgcaagggaggaggtccttggcctatttgagaagaagaagcccgagtatgacggctttagcaaactcaaaaccgtgaccatgattctttacgaggttctccgtctttatccgccggccgttgcattcatgcgaaaaacatacaaggagatagagattgaaagcatcacctaccctgccggtgtgatcatcgagcttcctgtgctgcttatccaccatgacccagacatatggggaagcgatgtgcatgagttcaagccagaaaggtttgctgatgggatcgccaaggcatccaaggatcctggtgccttcctcccatttggttggggtccacggatctgcatcggtcagaattttgctctgcttgaggccaagatggctttgtgcatgatccttcaacatttcgaattcgaccttggcccgacgtattctcatatgctgcataaccagaaaatgttgcgccccatgcatggtgcacaaattaagctcagggcaatatgacggtcagtattatagcagtgtgcatgatgtcattttattacatagtgtttagtggttggccatgtaataagctttcatacctacaaatgtttg

SEQ ID NO: 68566 - protein, 544 aa, Triticum aestivum
  peptide (1)..(544): Ceres Seq. ID no. 12614671
  misc_feature (117)..(533): Homolog of NCBI NO: 4151927 NR Description: cytochrome P450 [Sus scrofa]
  misc_feature (119)..(513): Homolog of NCBI NO: 3372841 NR Description: cytochrome P450 [Homarus americanus]
  misc_feature (116)..(243): Homolog of NCBI NO: 37589372 NR Description: Unknown (protein for MGC:68990) [Xenopus laevis]
  misc_feature (323)..(543): Homolog of NCBI NO: 37589372 NR Description: Unknown (protein for MGC:68990) [Xenopus laevis]
  misc_feature (39)..(544): Homolog of NCBI NO: 14719280 NR Description: cytochrome P450 [Zea mays]
  misc_feature (108)..(544): Homolog of NCBI NO: 21842136 NR Description: cytochrome P450 monooxygenase CYP72A27 [Zea mays
  misc_feature (29)..(544): Homolog of NCBI NO: 21805634 NR Description: cytochrome P450 monooxygenase CYP72A26 [Zea mays
  misc_feature (22)..(544): Homolog of NCBI NO: 34912896 NR Description: putative cytochrome P450 [Oryza sativa (japonica
  misc_feature (22)..(544): Homolog of NCBI NO: 19909879 NR Description: cytochrome P450 [Oryza sativa]
  misc_feature (22)..(544): Homolog of NCBI NO: 34912894 NR Description: putative cytochrome P450 [Oryza sativa (japonica
IKYTVHYHLAFLPPSLSRNKAMVLGLLVSSPATVLWSLLGLALLWQVKRLVDYTWWRPRRLQRALRAQGLRGTPYRFPVGDLGDYGRQGKEASSRALPLRCHDIRAHVAPYLCNTVREHGKTCVSWFGPVPKVTIADPGVTREVMSNKFGHFEKLQFPTLTRLLAGGVAVYEGEKWVKHRRILNPAFHIEKLKFMMPAFSACCEELVSRWTQSLGSDGWCEVDVCPEFQTLTGDVISRTAFGSSYLEGRRIFELQSVQADRIVAEVKKIFIPGYMSLPTKKNRLMRQTNNEIEPILRGLIEKRMQSMQQGESTKDDLLGLMLESNMRGTDDKGQPILGMTIEEVIEECKLFYFAGSETTSVLLTWTMIVLAMHPEWQDRAREEVLGLFEKKKPEYDGFSKLKTVTMILYEVLRLYPPAVAFMRKTYKEIEIESITYPAGVIIELPVLLIHHDPDIWGSDVHEFKPERFADGIAKASKDPGAFLPFGWGPRICIGQNFALLEAKMALCMILQHFEFDLGPTYSHMLHNQKMLRPMHGAQIKLRAI

SEQ ID NO: 68567 - protein, 523 aa, Triticum aestivum
  peptide (1)..(523): Ceres Seq. ID no. 12614672
  misc_feature (96)..(512): Homolog of NCBI NO: 4151927 NR Description: cytochrome P450 [Sus scrofa]
  misc_feature (98)..(492): Homolog of NCBI NO: 3372841 NR Description: cytochrome P450 [Homarus americanus]
  misc_feature (95)..(222): Homolog of NCBI NO: 37589372 NR Description: Unknown (protein for MGC:68990) [Xenopus laevis]
  misc_feature (302)..(522): Homolog of NCBI NO: 37589372 NR Description: Unknown (protein for MGC:68990) [Xenopus laevis]
  misc_feature (18)..(523): Homolog of NCBI NO: 14719280 NR Description: cytochrome P450 [Zea mays]
  misc_feature (87)..(523): Homolog of NCBI NO: 21842136 NR Description: cytochrome P450 monooxygenase CYP72A27 [Zea mays
  misc_feature (8)..(523): Homolog of NCBI NO: 21805634 NR Description: cytochrome P450 monooxygenase CYP72A26 [Zea mays
  misc_feature (1)..(523): Homolog of NCBI NO: 34912896 NR Description: putative cytochrome P450 [Oryza sativa (japonica
  misc_feature (1)..(523): Homolog of NCBI NO: 19909879 NR Description: cytochrome P450 [Oryza sativa]
  misc_feature (1)..(523): Homolog of NCBI NO: 34912894 NR Description: putative cytochrome P450 [Oryza sativa (japonica
MVLGLLVSSPATVLWSLLGLALLWQVKRLVDYTWWRPRRLQRALRAQGLRGTPYRFPVGDLGDYGRQGKEASSRALPLRCHDIRAHVAPYLCNTVREHGKTCVSWFGPVPKVTIADPGVTREVMSNKFGHFEKLQFPTLTRLLAGGVAVYEGEKWVKHRRILNPAFHIEKLKFMMPAFSACCEELVSRWTQSLGSDGWCEVDVCPEFQTLTGDVISRTAFGSSYLEGRRIFELQSVQADRIVAEVKKIFIPGYMSLPTKKNRLMRQTNNEIEPILRGLIEKRMQSMQQGESTKDDLLGLMLESNMRGTDDKGQPILGMTIEEVIEECKLFYFAGSETTSVLLTWTMIVLAMHPEWQDRAREEVLGLFEKKKPEYDGFSKLKTVTMILYEVLRLYPPAVAFMRKTYKEIEIESITYPAGVIIELPVLLIHHDPDIWGSDVHEFKPERFADGIAKASKDPGAFLPFGWGPRICIGQNFALLEAKMALCMILQHFEFDLGPTYSHMLHNQKMLRPMHGAQIKLRAI

SEQ ID NO: 68568 - protein, 400 aa, Triticum aestivum
  peptide (1)..(400): Ceres Seq. ID no. 12614673
  misc_feature (1)..(389): Homolog of NCBI NO: 4151927 NR Description: cytochrome P450 [Sus scrofa]
  misc_feature (1)..(369): Homolog of NCBI NO: 3372841 NR Description: cytochrome P450 [Homarus americanus]
  misc_feature (1)..(99): Homolog of NCBI NO: 37589372 NR Description: Unknown (protein for MGC:68990) [Xenopus laevis]
  misc_feature (179)..(399): Homolog of NCBI NO: 37589372 NR Description: Unknown (protein for MGC:68990) [Xenopus laevis]
  misc_feature (1)..(400): Homolog of NCBI NO: 14719280 NR Description: cytochrome P450 [Zea mays]
  misc_feature (1)..(400): Homolog of NCBI NO: 21842136 NR Description: cytochrome P450 monooxygenase CYP72A27 [Zea mays
  misc_feature (1)..(400): Homolog of NCBI NO: 21805634 NR Description: cytochrome P450 monooxygenase CYP72A26 [Zea mays
  misc_feature (1)..(400): Homolog of NCBI NO: 34912896 NR Description: putative cytochrome P450 [Oryza sativa (japonica
  misc_feature (1)..(400): Homolog of NCBI NO: 19909879 NR Description: cytochrome P450 [Oryza sativa]
  misc_feature (1)..(400): Homolog of NCBI NO: 34912894 NR Description: putative cytochrome P450 [Oryza sativa (japonica
MSNKFGHFEKLQFPTLTRLLAGGVAVYEGEKWVKHRRILNPAFHIEKLKFMMPAFSACCEELVSRWTQSLGSDGWCEVDVCPEFQTLTGDVISRTAFGSSYLEGRRIFELQSVQADRIVAEVKKIFIPGYMSLPTKKNRLMRQTNNEIEPILRGLIEKRMQSMQQGESTKDDLLGLMLESNMRGTDDKGQPILGMTIEEVIEECKLFYFAGSETTSVLLTWTMIVLAMHPEWQDRAREEVLGLFEKKKPEYDGFSKLKTVTMILYEVLRLYPPAVAFMRKTYKEIEIESITYPAGVIIELPVLLIHHDPDIWGSDVHEFKPERFADGIAKASKDPGAFLPFGWGPRICIGQNFALLEAKMALCMILQHFEFDLGPTYSHMLHNQKMLRPMHGAQIKLRAI

SEQ ID NO: 68569 - DNA, 1354 bp, Triticum aestivum
  misc_feature (1)..(1354): Ceres Seq. ID no. 13654574
agaatcatcattcctttcatttcatttcattgtgcaccaccaacccaacccagagactcctcagagtaatcgagccggccatcttgcttcgttccatggcgtctctgcttctcaagggcgtgcacaagcgtctgggcctgcccactatctccatctcctgctcctccgccgacgccaccaacatcatcgcctccaccggcaccggcgccgtcgttggcagcagcggccgggccatcgaccgccactcgccgcggctccgcgacccacaccgctcctccacctccaagccgcccagaccaagcaccagcaccaaagactcggtgtcctcagaggaccccaagcagcagcagcagcagcacggcagcaagaagaagaagaagagcaccacggctggtgctgctgcagatgggagaaggtcttcggagaagaggctggtcagcccggccacctcctccaggttcctcctcaactcctcccgcctgcagtccgacgacctcgacgtcctcgcgctgcccccgcctccgccgccgtccttcatcgacgcgttgcccgtcggcgaagggaagccgaagccgccgtccttcatcgacgcgttcccggccgacgcctccctgccggttccctctgccaaggacgcgccgccgtcgactgtgcaccaagcagagtcctcgtcgtcagggacgtcctcctctgcttcgtcgtcgtcggagatcacggccgtccaagacccggagcagcacaaggcggcggcgctggtgcggtcgtcctcgacggcggcggcgaggacgacgcaggtggtggtgctgcgcgtgtcgctgcactgcaaggggtgcgcgggcaaggtgaagaagcacatcgccaagatggagggggtgacgtcgttcgacatcgacatcccgagcaagaaggtgacggtggtcggcgacgtgacgccgctgggggtgctcaccagcgtctccaaggtgaagcccgcgcagttctggccgtcgcagccgtgccccccgcatgcctccgcttccttctgaacgcgccaacctgtgatctccgctctctctgaatcacaagaagatacggggtcgtagctggtcgagtggtcttccatggtggaccactcgcgcgctgcgcgcaggcgatcgaagtgcgtagtagaacgtcgagaaagatgggcagatgccacgcacgtagtacctccatatttctttccttttttttcttgaaagaaacggtattgaagctcctccatatctcaatgcctgtattctgaattgagatatactcatcctacagtttctgtagtacaaaatggagtaataatcagggccgtacaaaatggagtaatactcatcctacagtt

SEQ ID NO: 68570 - protein, 351 aa, Triticum aestivum
  peptide (1)..(351): Ceres Seq. ID no. 13654575
ESSFLSFHFIVHHQPNPETPQSNRAGHLASFHGVSASQGRAQASGPAHYLHLLLLRRRHQHHRLHRHRRRRWQQRPGHRPPLAAAPRPTPLLHLQAAQTKHQHQRLGVLRGPQAAAAAARQQEEEEEHHGWCCCRWEKVFGEEAGQPGHLLQVPPQLLPPAVRRPRRPRAAPASAAVLHRRVARRRREAEAAVLHRRVPGRRLPAGSLCQGRAAVDCAPSRVLVVRDVLLCFVVVGDHGRPRPGAAQGGGAGAVVLDGGGEDDAGGGAARVAALQGVRGQGEEAHRQDGGGDVVRHRHPEQEGDGGRRRDAAGGAHQRLQGEARAVLAVAAVPPACLRFLLNAPTCDLRSL

SEQ ID NO: 68571 - protein, 340 aa, Triticum aestivum
  peptide (1)..(340): Ceres Seq. ID no. 13654576
  misc_feature (217)..(331): Homolog of NCBI NO: 29124116 NR Description: unknown protein [Oryza sativa (japonica
  misc_feature (192)..(340): Homolog of NCBI NO: 34906086 NR Description: P0459B04.21 [Oryza sativa (japonica
  misc_feature (53)..(131): Homolog of NCBI NO: 30687119 NR Description: expressed protein [Arabidopsis thaliana]
  misc_feature (215)..(333): Homolog of NCBI NO: 30687119 NR Description: expressed protein [Arabidopsis thaliana]
  misc_feature (53)..(131): Homolog of NCBI NO: 23092567 NR Description: hypothetical protein [Arabidopsis thaliana]
  misc_feature (215)..(336): Homolog of NCBI NO: 23092567 NR Description: hypothetical protein [Arabidopsis thaliana]
  misc_feature (64)..(173): Homolog of NCBI NO: 11358213 NR Description: hypothetical protein T22P11.190 - Arabidopsis
  misc_feature (190)..(328): Homolog of NCBI NO: 11358213 NR Description: hypothetical protein T22P11.190 - Arabidopsis
  misc_feature (53)..(173): Homolog of NCBI NO: 18413973 NR Description: heavy metal binding protein - related
  misc_feature (190)..(328): Homolog of NCBI NO: 18413973 NR Description: heavy metal binding protein - related
NHHSFHFISLCTTNPTQRLLRVIEPAILLRSMASLLLKGVHKRLGLPTISISCSSADATNIIASTGTGAVVGSSGRAIDRHSPRLRDPHRSSTSKPPRPSTSTKDSVSSEDPKQQQQQHGSKKKKKSTTAGAAADGRRSSEKRLVSPATSSRFLLNSSRLQSDDLDVLALPPPPPPSFIDALPVGEGKPKPPSFIDAFPADASLPVPSAKDAPPSTVHQAESSSSGTSSSASSSSEITAVQDPEQHKAAALVRSSSTAAARTTQVVVLRVSLHCKGCAGKVKKHIAKMEGVTSFDIDIPSKKVTVVGDVTPLGVLTSVSKVKPAQFWPSQPCPPHASASF

SEQ ID NO: 68572 - protein, 309 aa, Triticum aestivum
  peptide (1)..(309): Ceres Seq. ID no. 13654577
  misc_feature (186)..(300): Homolog of NCBI NO: 29124116 NR Description: unknown protein [Oryza sativa (japonica
  misc_feature (161)..(309): Homolog of NCBI NO: 34906086 NR Description: P0459B04.21 [Oryza sativa (japonica
  misc_feature (22)..(100): Homolog of NCBI NO: 30687119 NR Description: expressed protein [Arabidopsis thaliana]
  misc_feature (184)..(302): Homolog of NCBI NO: 30687119 NR Description: expressed protein [Arabidopsis thaliana]
  misc_feature (22)..(100): Homolog of NCBI NO: 23092567 NR Description: hypothetical protein [Arabidopsis thaliana]
  misc_feature (184)..(305): Homolog of NCBI NO: 23092567 NR Description: hypothetical protein [Arabidopsis thaliana]
  misc_feature (33)..(142): Homolog of NCBI NO: 11358213 NR Description: hypothetical protein T22P11.190 - Arabidopsis
  misc_feature (159)..(297): Homolog of NCBI NO: 11358213 NR Description: hypothetical protein T22P11.190 - Arabidopsis
  misc_feature (22)..(142): Homolog of NCBI NO: 18413973 NR Description: heavy metal binding protein - related
  misc_feature (159)..(297): Homolog of NCBI NO: 18413973 NR Description: heavy metal binding protein - related
MASLLLKGVHKRLGLPTISISCSSADATNIIASTGTGAVVGSSGRAIDRHSPRLRDPHRSSTSKPPRPSTSTKDSVSSEDPKQQQQQHGSKKKKKSTTAGAAADGRRSSEKRLVSPATSSRFLLNSSRLQSDDLDVLALPPPPPPSFIDALPVGEGKPKPPSFIDAFPADASLPVPSAKDAPPSTVHQAESSSSGTSSSASSSSEITAVQDPEQHKAAALVRSSSTAAARTTQVVVLRVSLHCKGCAGKVKKHIAKMEGVTSFDIDIPSKKVTVVGDVTPLGVLTSVSKVKPAQFWPSQPCPPHASASF

SEQ ID NO: 68573 - DNA, 1999 bp, Triticum aestivum
  misc_feature (1)..(1999): Ceres Seq. ID no. 13596100
acctagaacatcctaatcgaaaacacaagtttgttccgggaggccaccgtcgcggtctagttggtcgcgcaccctatatataccgagccgcccgccgaggccaactcacgcttccggctccggcgcctcggtccaactcacaccaaaggcgatcgacacgcgagtacgtctcgagatccatggagtctgcgccggcggcggccttcatggagcgggagcgcctcacggcggaggtgacattctccggggacgcgcaggcggcggcctcgtccgagggcgccgagcggctgcccaccagcatcatcatcaagatccggcgccgcctcccggacttcgcccgctccgtcaacctcaagtacgtcaggctcgggctccgccacggcggcagcctcacgtcctacctgcccatgctgtgcgtgccggtgctcgccgcggccgcctactccttcgtccgcctcgacgtcatctacctctccatcgacctgctcagctgcgtcgcctggctcggcaccgccatgctgctgctcaccgtctactacttcaagcggcctcgcccggtctacctcgtcgagttcgcgtgctacaagccggaggaccagaacaagatcaccaaggaggccttcctcgacatgaccgagagcaccggctgcttcaatgacgagacgctcgcgttccagaccaagatcaccacccgctccgcgctcggcgacgagacgtacctgccccccggcgtccaggcgcgcccgccgaggctcaacatggccgaggcgcggctggaggccgaggcggtcatgttcggctgcctggacgctctgttcgagtccaccgggatcgacccgcgccgcgacgtgcgcatcctcatcgtcaactgcagcctcttcaacccgacgccgtcgctggcgtccatgatcatccaccattacaagatgcgggaggacgtcaagtcgttcaacctgggcggcatggggtgcagcgccggcctcatcgccatcgacctcgccaaggacatgctccaggccaaccccaacgcgtacgcggtcgtcctcagcaccgagaacatcaccctcaactggtacttcgggaacgaccgctccatgctgctctccaactgcatcttccgcatgggcggcgcggcggctctgctctcgaaccggcgcgcggacgccgggcgcgccaagtaccgcctcctgcacacggtccggacgcacaagggcgccacggacgagtgcttcaagtgcgtgtaccagcgcgaggacgacgtgggcaaggtgggcgtgtcgctggcgcgggagctcatgacggtggccggcgacgcgctcaagaccaacatcaccacgctggggccgctggtgctgcccctgagcgagcagctcaagttcctcaagtcgctgatgatgcgccgggtgttccgcgccaagggcgtgcggccctacatccccaacttccggcgagccttcgagcacttctgcgtgcacgccggcgggcgggcggtgctggaggaggtgcagcgcagcctgagcctggaggacaaggacatggagccgagcaggtgcgcgctgcaccggttcggcaacaccagcagcagctcgctgtggtacgagctggcctacgccgaggccaagggccgggtgaagcgcggcaaccgcgtgtggcagatcggcttcgggtccgggttcaagtgcaacagcgcggtgtggcgcgcgctccgcgacgtgccggccgtgtcgcccccggggccggaggagaaggcctgcaacccgtgggcggactgcgtcgccaagtacccgcccaaggcctacgtctgacgatacattactacgccgccgccgcatgactccacacgaagattacatgattcttttctcctatactttttctgcatttcgtttcccgtaggtggctgtacctcaggttccatgggcgagcagtgccgttgttttcagcttttgtacttcaagtgtgaattataaacgacaaatatatacgacgaggtttcatt

SEQ ID NO: 68574 - protein, 600 aa, Triticum aestivum
  peptide (1)..(600): Ceres Seq. ID no. 13596101
  misc_feature (423)..(569): Pfam Name: Chalcone and stilbene synthases, C-terminal domain Pfam Description: Chalcone and stilbene synthases, C-terminal
  misc_feature (108)..(595): Homolog of NCBI NO: 15239981 NR Description: beta-ketoacyl-CoA synthase, putative [Arabidopsis
  misc_feature (108)..(595): Homolog of NCBI NO: 14334714 NR Description: putative beta-ketoacyl-CoA synthase [Arabidopsis
  misc_feature (106)..(595): Homolog of NCBI NO: 18377979 NR Description: putative beta-ketoacyl-CoA synthase [Arabidopsis
  misc_feature (110)..(595): Homolog of NCBI NO: 9714501 NR Description: putative fatty acid elongase [Zea mays]
  misc_feature (106)..(595): Homolog of NCBI NO: 15219676 NR Description: beta-ketoacyl-CoA synthase, putative [Arabidopsis
  misc_feature (99)..(595): Homolog of NCBI NO: 29417540 NR Description: beta-ketoacyl-CoA-synthase [Marchantia polymorpha]
  misc_feature (69)..(597): Homolog of NCBI NO: 22329274 NR Description: fatty acid elongase 3-ketoacyl-CoA synthase 1
  misc_feature (69)..(597): Homolog of NCBI NO: 4091810 NR Description: fatty acid elongase 3-ketoacyl-CoA synthase 1
  misc_feature (87)..(582): Homolog of NCBI NO: 37531254 NR Description: putative senescence-associated protein 15
  misc_feature (69)..(597): Homolog of NCBI NO: 3551960 NR Description: senescence-associated protein 15 [Hemerocallis
LEHPNRKHKFVPGGHRRGLVGRAPYIYRAARRGQLTLPAPAPRSNSHQRRSTREYVSRSMESAPAAAFMERERLTAEVTFSGDAQAAASSEGAERLPTSIIIKIRRRLPDFARSVNLKYVRLGLRHGGSLTSYLPMLCVPVLAAAAYSFVRLDVIYLSIDLLSCVAWLGTAMLLLTVYYFKRPRPVYLVEFACYKPEDQNKITKEAFLDMTESTGCFNDETLAFQTKITTRSALGDETYLPPGVQARPPRLNMAEARLEAEAVMFGCLDALFESTGIDPRRDVRILIVNCSLFNPTPSLASMIIHHYKMREDVKSFNLGGMGCSAGLIAIDLAKDMLQANPNAYAVVLSTENITLNWYFGNDRSMLLSNCIFRMGGAAALLSNRRADAGRAKYRLLHTVRTHKGATDECFKCVYQREDDVGKVGVSLARELMTVAGDALKTNITTLGPLVLPLSEQLKFLKSLMMRRVFRAKGVRPYIPNFRRAFEHFCVHAGGRAVLEEVQRSLSLEDKDMEPSRCALHRFGNTSSSSLWYELAYAEAKGRVKRGNRVWQIGFGSGFKCNSAVWRALRDVPAVSPPGPEEKACNPWADCVAKYPPKAYV

SEQ ID NO: 68575 - protein, 541 aa, Triticum aestivum
  peptide (1)..(541): Ceres Seq. ID no. 13596102
  misc_feature (364)..(510): Pfam Name: Chalcone and stilbene synthases, C-terminal domain Pfam Description: Chalcone and stilbene synthases, C-terminal
  misc_feature (49)..(536): Homolog of NCBI NO: 15239981 NR Description: beta-ketoacyl-CoA synthase, putative [Arabidopsis
  misc_feature (49)..(536): Homolog of NCBI NO: 14334714 NR Description: putative beta-ketoacyl-CoA synthase [Arabidopsis
  misc_feature (47)..(536): Homolog of NCBI NO: 18377979 NR Description: putative beta-ketoacyl-CoA synthase [Arabidopsis
  misc_feature (51)..(536): Homolog of NCBI NO: 9714501 NR Description: putative fatty acid elongase [Zea mays]
  misc_feature (47)..(536): Homolog of NCBI NO: 15219676 NR Description: beta-ketoacyl-CoA synthase, putative [Arabidopsis
  misc_feature (40)..(536): Homolog of NCBI NO: 29417540 NR Description: beta-ketoacyl-CoA-synthase [Marchantia polymorpha]
  misc_feature (10)..(538): Homolog of NCBI NO: 22329274 NR Description: fatty acid elongase 3-ketoacyl-CoA synthase 1
  misc_feature (10)..(538): Homolog of NCBI NO: 4091810 NR Description: fatty acid elongase 3-ketoacyl-CoA synthase 1
  misc_feature (28)..(523): Homolog of NCBI NO: 37531254 NR Description: putative senescence-associated protein 15
  misc_feature (10)..(538): Homolog of NCBI NO: 3551960 NR Description: senescence-associated protein 15 [Hemerocallis
MESAPAAAFMERERLTAEVTFSGDAQAAASSEGAERLPTSIIIKIRRRLPDFARSVNLKYVRLGLRHGGSLTSYLPMLCVPVLAAAAYSFVRLDVIYLSIDLLSCVAWLGTAMLLLTVYYFKRPRPVYLVEFACYKPEDQNKITKEAFLDMTESTGCFNDETLAFQTKITTRSALGDETYLPPGVQARPPRLNMAEARLEAEAVMFGCLDALFESTGIDPRRDVRILIVNCSLFNPTPSLASMIIHHYKMREDVKSFNLGGMGCSAGLIAIDLAKDMLQANPNAYAVVLSTENITLNWYFGNDRSMLLSNCIFRMGGAAALLSNRRADAGRAKYRLLHTVRTHKGATDECFKCVYQREDDVGKVGVSLARELMTVAGDALKTNITTLGPLVLPLSEQLKFLKSLMMRRVFRAKGVRPYIPNFRRAFEHFCVHAGGRAVLEEVQRSLSLEDKDMEPSRCALHRFGNTSSSSLWYELAYAEAKGRVKRGNRVWQIGFGSGFKCNSAVWRALRDVPAVSPPGPEEKACNPWADCVAKYPPKAYV

SEQ ID NO: 68576 - protein, 532 aa, Triticum aestivum
  peptide (1)..(532): Ceres Seq. ID no. 13596103
  misc_feature (355)..(501): Pfam Name: Chalcone and stilbene synthases, C-terminal domain Pfam Description: Chalcone and stilbene synthases, C-terminal
  misc_feature (40)..(527): Homolog of NCBI NO: 15239981 NR Description: beta-ketoacyl-CoA synthase, putative [Arabidopsis
  misc_feature (40)..(527): Homolog of NCBI NO: 14334714 NR Description: putative beta-ketoacyl-CoA synthase [Arabidopsis
  misc_feature (38)..(527): Homolog of NCBI NO: 18377979 NR Description: putative beta-ketoacyl-CoA synthase [Arabidopsis
  misc_feature (42)..(527): Homolog of NCBI NO: 9714501 NR Description: putative fatty acid elongase [Zea mays]
  misc_feature (38)..(527): Homolog of NCBI NO: 15219676 NR Description: beta-ketoacyl-CoA synthase, putative [Arabidopsis
  misc_feature (31)..(527): Homolog of NCBI NO: 29417540 NR Description: beta-ketoacyl-CoA-synthase [Marchantia polymorpha]
  misc_feature (1)..(529): Homolog of NCBI NO: 22329274 NR Description: fatty acid elongase 3-ketoacyl-CoA synthase 1
  misc_feature (1)..(529): Homolog of NCBI NO: 4091810 NR Description: fatty acid elongase 3-ketoacyl-CoA synthase 1
  misc_feature (19)..(514): Homolog of NCBI NO: 37531254 NR Description: putative senescence-associated protein 15
  misc_feature (1)..(529): Homolog of NCBI NO: 3551960 NR Description: senescence-associated protein 15 [Hemerocallis
MERERLTAEVTFSGDAQAAASSEGAERLPTSIIIKIRRRLPDFARSVNLKYVRLGLRHGGSLTSYLPMLCVPVLAAAAYSFVRLDVIYLSIDLLSCVAWLGTAMLLLTVYYFKRPRPVYLVEFACYKPEDQNKITKEAFLDMTESTGCFNDETLAFQTKITTRSALGDETYLPPGVQARPPRLNMAEARLEAEAVMFGCLDALFESTGIDPRRDVRILIVNCSLFNPTPSLASMIIHHYKMREDVKSFNLGGMGCSAGLIAIDLAKDMLQANPNAYAVVLSTENITLNWYFGNDRSMLLSNCIFRMGGAAALLSNRRADAGRAKYRLLHTVRTHKGATDECFKCVYQREDDVGKVGVSLARELMTVAGDALKTNITTLGPLVLPLSEQLKFLKSLMMRRVFRAKGVRPYIPNFRRAFEHFCVHAGGRAVLEEVQRSLSLEDKDMEPSRCALHRFGNTSSSSLWYELAYAEAKGRVKRGNRVWQIGFGSGFKCNSAVWRALRDVPAVSPPGPEEKACNPWADCVAKYPPKAYV

SEQ ID NO: 68577 - DNA, 928 bp, Triticum aestivum
  misc_feature (1)..(928): Ceres Seq. ID no. 13591302
acacacacacgcctcacactctctcatcagatcagccacagagtcacacaagcactagcttcagctagccagcctcagccactccgggcattttcttgcatccacgacggcaatggccaccgctgatgtccagaacccgacggccgcgctgacggaggaggcgcccacggtggagacgccggtggccgccgaggaggccccgaagacggaggaggtccccgcgccggcggaggccgaggtcgaggcgtctgcccccgtcgaggttgaggcgaccaaggaggaggcgccgggcgccgctgagacggaggaggccaaggagaccgagccagcagctgcggccgagccggaggccgaggcgcccaaagagccagaggcgccagccgtggtcgagacagagaccaaggaggccgtggcagaggccgagccggcggtggtcgaggaggtgaaggaggaggccgcgcctgctgccgagccagaagcaccggccgtcgccgaggaagcaccggctgcagcggaggaggcccccgcggccgtggcagaggagccggccgccgcggtggccagcgtcagcgtgtgaggcgcgcacagagacagaggaggggctggctgggtcagcgtccacggcggcggccgtgtgctcctacgtggcacggccagtcagccagtggagtggagttctactttttactaggtgtggagtgggagtgctatgcgcggggtcgcgtgacgcgggctaaataaaagtgttgtcggggccagtcgacgcccagtgtcggtcagcggcagcgagcgagcgagcgacgcagtgcggtgccactctcgccggcccccgtggctggctgcgtctgcttagctgcagctttgtagtggtgtgtgtcacagtgtcagttccacctatgatcgatcggtatcctatccggtttgtgtc

SEQ ID NO: 68578 - protein, 154 aa, Triticum aestivum
  peptide (1)..(154): Ceres Seq. ID no. 13591303
  misc_feature (1)..(148): Pfam Name: Brain acid soluble protein 1 (BASP1 protein) Pfam Description: Brain acid soluble protein 1 (BASP1 protein)
  misc_feature (15)..(145): Homolog of NCBI NO: 23001116 NR Description: hypothetical protein [Magnetococcus sp. MC-1]
  misc_feature (12)..(150): Homolog of NCBI NO: 22999045 NR Description: hypothetical protein [Magnetococcus sp. MC-1]
  misc_feature (10)..(150): Homolog of NCBI NO: 22999045 NR Description: hypothetical protein [Magnetococcus sp. MC-1]
  misc_feature (1)..(154): Homolog of NCBI NO: 731172 NR Description: SKIN SECRETORY PROTEIN XP2 PRECURSOR (APEG
  misc_feature (1)..(154): Homolog of NCBI NO: 71400 NR Description: dermal gland protein APEG precursor - African
  misc_feature (1)..(148): Homolog of NCBI NO: 117761 NR Description: Cytochrome c1 precursor
  misc_feature (4)..(151): Homolog of NCBI NO: 23109537 NR Description: hypothetical protein [Novosphingobium
  misc_feature (1)..(153): Homolog of NCBI NO: 17537803 NR Description: Putative protein, nematode specific
  misc_feature (1)..(147): Homolog of NCBI NO: 117761 NR Description: Cytochrome c1 precursor
  misc_feature (1)..(152): Homolog of NCBI NO: 40287520 NR Description: induced stolon tip protein [Capsicum annuum]
MATADVQNPTAALTEEAPTVETPVAAEEAPKTEEVPAPAEAEVEASAPVEVEATKEEAPGAAETEEAKETEPAAAAEPEAEAPKEPEAPAVVETETKEAVAEAEPAVVEEVKEEAAPAAEPEAPAVAEEAPAAAEEAPAAVAEEPAAAVASVSV

SEQ ID NO: 68579 - DNA, 1407 bp, Triticum aestivum
  misc_feature (1)..(1407): Ceres Seq. ID no. 12613979
attgactcttttgcccctgcctctgaaactcaacgatttgggagttctccaccctcgccgccgccgccgcctgcatcccgggggagagcgagggtctgggtatggacgtggggtcctgcaacctcggcggcaacgccgacgcggtggagttctgcccgcaccgccccttccgccacatcctggcggccgccacgtacacgctgcaggagcaggcgggggaggagcagcagcagcaggaccgcgcgggcaccgtgtcgctcttctccgtcgacgctggcgctgaggacgagccccgacgtctccggctgctccacacggtggagaccgccggcgtcttcgacatgaagtggagccccacggcgccgctgctcgcgcaggccgacgcccacggccgcctcgtgctccggcgcctcgagcatgaagacggctcggacgaaggtgttgttctcacagacgtggttgctggaaacatttcttcatcaatgtgcttgtatgtcgactggaaccaaaatgccgattccctggccgttgcattatcagatggttcactgtctgtggttcccatgagagaggaccgcctggaggtatcagaacaatggactgctcatcagtatgaagtttggacatgttatttcgatcgtgcaagaccacacttgttgtacagtggatcggacgactgctcttacggttgctgggatttgcgggaaagcctatcgaatgctgtgtttcggaataagaagactcatactatgggtgtgtgttgcattgctcagaacccattggaggggaatatgctactcactggaagctatgatgaatttctcagagttcgggacatgagatcaatgatgaaacctgtgaacgagaagtccctgaatttaggaggtggtgtatggaggttgaaatatcatcctaatattgcagatgtagtattggctgcatgcatgcacaacggttttgccattgttaaagcaggggctggagatgctaccataatggaaacatattgcaagcatgagtccttagcatatggtgcagattggcagactagtgaagcagcggaacataacacaaattcttcagttattgctacttgttcattttatgaccgccttctccgtgtgtggcaaccagagaacctagtcaaccacccaacctctaaggcgtaaaacatcattatgcccagttgaagcatcaatatggcatggaccaacctattccctgaatgaaccaaattgatttcattcaggtagctctttgaatttatgttaatttatttcaaatggtgagcttatagtagtatgatgtctaatttatagctaggcattcacagtaatcagtatttgttgtaagcttccacaaaactttgaagttatctgttcatgttatttgagcacaaactgtttt

SEQ ID NO: 68580 - protein, 355 aa, Triticum aestivum
  peptide (1)..(355): Ceres Seq. ID no. 12613980
  misc_feature (84)..(343): Homolog of NCBI NO: 19075894 NR Description: hypothetical protein [Schizosaccharomyces pombe]
  misc_feature (35)..(314): Homolog of NCBI NO: 24308452 NR Description: hypothetical protein BC017335 [Homo sapiens]
  misc_feature (12)..(314): Homolog of NCBI NO: 21313066 NR Description: RIKEN cDNA 2810443J12 [Mus musculus]
  misc_feature (12)..(315): Homolog of NCBI NO: 31206245 NR Description: ENSANGP00000016926 [Anopheles gambiae]
  misc_feature (11)..(341): Homolog of NCBI NO: 18858115 NR Description: CG3184-PA [Drosophila melanogaster]
  misc_feature (322)..(345): Homolog of NCBI NO: 34853114 NR Description: similar to RIKEN cDNA 2810443J12 [Rattus
  misc_feature (12)..(314): Homolog of NCBI NO: 34853114 NR Description: similar to RIKEN cDNA 2810443J12 [Rattus
  misc_feature (1)..(273): Homolog of NCBI NO: 26450621 NR Description: unknown protein [Arabidopsis thaliana]
  misc_feature (1)..(344): Homolog of NCBI NO: 15242588 NR Description: unknown protein; protein id: At5g63010.1
  misc_feature (1)..(349): Homolog of NCBI NO: 32489522 NR Description: OSJNBa0043L24.13 [Oryza sativa (japonica
MDVGSCNLGGNADAVEFCPHRPFRHILAAATYTLQEQAGEEQQQQDRAGTVSLFSVDAGAEDEPRRLRLLHTVETAGVFDMKWSPTAPLLAQADAHGRLVLRRLEHEDGSDEGVVLTDVVAGNISSSMCLYVDWNQNADSLAVALSDGSLSVVPMREDRLEVSEQWTAHQYEVWTCYFDRARPHLLYSGSDDCSYGCWDLRESLSNAVFRNKKTHTMGVCCIAQNPLEGNMLLTGSYDEFLRVRDMRSMMKPVNEKSLNLGGGVWRLKYHPNIADVVLAACMHNGFAIVKAGAGDATIMETYCKHESLAYGADWQTSEAAEHNTNSSVIATCSFYDRLLRVWQPENLVNHPTSKA

SEQ ID NO: 68581 - protein, 275 aa, Triticum aestivum
  peptide (1)..(275): Ceres Seq. ID no. 12613981
  misc_feature (4)..(263): Homolog of NCBI NO: 19075894 NR Description: hypothetical protein [Schizosaccharomyces pombe]
  misc_feature (1)..(234): Homolog of NCBI NO: 24308452 NR Description: hypothetical protein BC017335 [Homo sapiens]
  misc_feature (1)..(234): Homolog of NCBI NO: 21313066 NR Description: RIKEN cDNA 2810443J12 [Mus musculus]
  misc_feature (1)..(235): Homolog of NCBI NO: 31206245 NR Description: ENSANGP00000016926 [Anopheles gambiae]
  misc_feature (1)..(261): Homolog of NCBI NO: 18858115 NR Description: CG3184-PA [Drosophila melanogaster]
  misc_feature (242)..(265): Homolog of NCBI NO: 34853114 NR Description: similar to RIKEN cDNA 2810443J12 [Rattus
  misc_feature (1)..(234): Homolog of NCBI NO: 34853114 NR Description: similar to RIKEN cDNA 2810443J12 [Rattus
  misc_feature (1)..(193): Homolog of NCBI NO: 26450621 NR Description: unknown protein [Arabidopsis thaliana]
  misc_feature (1)..(264): Homolog of NCBI NO: 15242588 NR Description: unknown protein; protein id: At5g63010.1
  misc_feature (1)..(269): Homolog of NCBI NO: 32489522 NR Description: OSJNBa0043L24.13 [Oryza sativa (japonica
MKWSPTAPLLAQADAHGRLVLRRLEHEDGSDEGVVLTDVVAGNISSSMCLYVDWNQNADSLAVALSDGSLSVVPMREDRLEVSEQWTAHQYEVWTCYFDRARPHLLYSGSDDCSYGCWDLRESLSNAVFRNKKTHTMGVCCIAQNPLEGNMLLTGSYDEFLRVRDMRSMMKPVNEKSLNLGGGVWRLKYHPNIADVVLAACMHNGFAIVKAGAGDATIMETYCKHESLAYGADWQTSEAAEHNTNSSVIATCSFYDRLLRVWQPENLVNHPTSKA

SEQ ID NO: 68582 - protein, 228 aa, Triticum aestivum
  peptide (1)..(228): Ceres Seq. ID no. 12613982
  misc_feature (1)..(216): Homolog of NCBI NO: 19075894 NR Description: hypothetical protein [Schizosaccharomyces pombe]
  misc_feature (1)..(187): Homolog of NCBI NO: 24308452 NR Description: hypothetical protein BC017335 [Homo sapiens]
  misc_feature (1)..(187): Homolog of NCBI NO: 21313066 NR Description: RIKEN cDNA 2810443J12 [Mus musculus]
  misc_feature (1)..(188): Homolog of NCBI NO: 31206245 NR Description: ENSANGP00000016926 [Anopheles gambiae]
  misc_feature (1)..(214): Homolog of NCBI NO: 18858115 NR Description: CG3184-PA [Drosophila melanogaster]
  misc_feature (195)..(218): Homolog of NCBI NO: 34853114 NR Description: similar to RIKEN cDNA 2810443J12 [Rattus
  misc_feature (1)..(187): Homolog of NCBI NO: 34853114 NR Description: similar to RIKEN cDNA 2810443J12 [Rattus
  misc_feature (1)..(146): Homolog of NCBI NO: 26450621 NR Description: unknown protein [Arabidopsis thaliana]
  misc_feature (1)..(217): Homolog of NCBI NO: 15242588 NR Description: unknown protein; protein id: At5g63010.1
  misc_feature (1)..(222): Homolog of NCBI NO: 32489522 NR Description: OSJNBa0043L24.13 [Oryza sativa (japonica
MCLYVDWNQNADSLAVALSDGSLSVVPMREDRLEVSEQWTAHQYEVWTCYFDRARPHLLYSGSDDCSYGCWDLRESLSNAVFRNKKTHTMGVCCIAQNPLEGNMLLTGSYDEFLRVRDMRSMMKPVNEKSLNLGGGVWRLKYHPNIADVVLAACMHNGFAIVKAGAGDATIMETYCKHESLAYGADWQTSEAAEHNTNSSVIATCSFYDRLLRVWQPENLVNHPTSKA

SEQ ID NO: 68583 - DNA, 1043 bp, Triticum aestivum
  misc_feature (1)..(1043): Ceres Seq. ID no. 13654578
atctctctccccttcccgtccccgcttgctcctcctgctcctgccgatcgctcatggattccaagccccaagccccgccgtcggagggcgcggcgtacccgcgcatgtccccggaggacctcgcgccgccgccgccgccggtcgtggcgcccgcgggctccaacccctacgtgctgtcctcgccctcctccggaccgcccgccaagagcaccaaggagaatctgagggagatgttcggctcggtggggaagaggttcagcgaggccgcgcgcaagaccgagggcatcgccggcgacgtctggcagcacttgaaaactgggcctagcattacggatgctgcaatggggaggatcgctcaggtatccaaggtcatatcggaagggggatacgacaagatattccagcagacgtttgagtgcttgcctgacgagaagctcaagaaggcgtacgcgtgctacctctcgacctctcatggtccgataatgggcgtcttatacgtctccaccgccaagcttgcattctgtagtgacagccccgtggcatatgtcactgaggataatcagaccgcgtcagccatttacaagatagttgtacctgtacctcacctgagatcagtcactcctaccgcaagtcaacagaaccctgcggagaggtacatccaggtcgtttctgtcgataaccatgacttctggttcatgggcttcgtgaactatgacagcgctgtgaagtgtctccaggatgctgctcgtggtggcgcctagacatcacttccccgtcgcatgtatccgttgtgatggcccatgttgatgtctatagaccattcttgtgtattttggttcaaatttctggcttaaataagcagtgcattcatgtatcagtattcagtagtgtggatacttttctggcccaagtgtgttgtaaatatcagaggaatcttaagctttgtttgctgccctcattcttgcactgcaaattatgtgtattatgagccaaagatgctcctgccagtgccttgataacttgaggttagtgcatgcttcaac

SEQ ID NO: 68584 - protein, 252 aa, Triticum aestivum
  peptide (1)..(252): Ceres Seq. ID no. 13654579
  misc_feature (54)..(247): Homolog of NCBI NO: 15234255 NR Description: ABA-repsonsiveprotein -related [Arabidopsis
  misc_feature (55)..(240): Homolog of NCBI NO: 15240044 NR Description: GRAM domain-containing protein [Arabidopsis
  misc_feature (28)..(247): Homolog of NCBI NO: 29788871 NR Description: putative ABA-responsive protein
  misc_feature (51)..(252): Homolog of NCBI NO: 26452129 NR Description: unknown protein [Arabidopsis thaliana]
  misc_feature (51)..(252): Homolog of NCBI NO: 21592789 NR Description: unknown [Arabidopsis thaliana]
  misc_feature (51)..(252): Homolog of NCBI NO: 18399985 NR Description: GRAM domain-containing protein [Arabidopsis
  misc_feature (114)..(252): Homolog of NCBI NO: 33146631 NR Description: putative FH protein interacting protein FIP1
  misc_feature (10)..(249): Homolog of NCBI NO: 15217869 NR Description: GRAM domain-containing protein [Arabidopsis
  misc_feature (24)..(247): Homolog of NCBI NO: 34902414 NR Description: Putative FH protein interacting protein FIP1
  misc_feature (1)..(252): Homolog of NCBI NO: 34906818 NR Description: contains EST C91668(E31216)~similar to FH protein
LSPLPVPACSSCSCRSLMDSKPQAPPSEGAAYPRMSPEDLAPPPPPVVAPAGSNPYVLSSPSSGPPAKSTKENLREMFGSVGKRFSEAARKTEGIAGDVWQHLKTGPSITDAAMGRIAQVSKVISEGGYDKIFQQTFECLPDEKLKKAYACYLSTSHGPIMGVLYVSTAKLAFCSDSPVAYVTEDNQTASAIYKIVVPVPHLRSVTPTASQQNPAERYIQVVSVDNHDFWFMGFVNYDSAVKCLQDAARGGA

SEQ ID NO: 68585 - protein, 235 aa, Triticum aestivum
  peptide (1)..(235): Ceres Seq. ID no. 13654580
  misc_feature (37)..(230): Homolog of NCBI NO: 15234255 NR Description: ABA-repsonsiveprotein -related [Arabidopsis
  misc_feature (38)..(223): Homolog of NCBI NO: 15240044 NR Description: GRAM domain-containing protein [Arabidopsis
  misc_feature (11)..(230): Homolog of NCBI NO: 29788871 NR Description: putative ABA-responsive protein
  misc_feature (34)..(235): Homolog of NCBI NO: 26452129 NR Description: unknown protein [Arabidopsis thaliana]
  misc_feature (34)..(235): Homolog of NCBI NO: 21592789 NR Description: unknown [Arabidopsis thaliana]
  misc_feature (34)..(235): Homolog of NCBI NO: 18399985 NR Description: GRAM domain-containing protein [Arabidopsis
  misc_feature (97)..(235): Homolog of NCBI NO: 33146631 NR Description: putative FH protein interacting protein FIP1
  misc_feature (1)..(232): Homolog of NCBI NO: 15217869 NR Description: GRAM domain-containing protein [Arabidopsis
  misc_feature (7)..(230): Homolog of NCBI NO: 34902414 NR Description: Putative FH protein interacting protein FIP1
  misc_feature (1)..(235): Homolog of NCBI NO: 34906818 NR Description: contains EST C91668(E31216)~similar to FH protein
MDSKPQAPPSEGAAYPRMSPEDLAPPPPPVVAPAGSNPYVLSSPSSGPPAKSTKENLREMFGSVGKRFSEAARKTEGIAGDVWQHLKTGPSITDAAMGRIAQVSKVISEGGYDKIFQQTFECLPDEKLKKAYACYLSTSHGPIMGVLYVSTAKLAFCSDSPVAYVTEDNQTASAIYKIVVPVPHLRSVTPTASQQNPAERYIQVVSVDNHDFWFMGFVNYDSAVKCLQDAARGGA

SEQ ID NO: 68586 - protein, 218 aa, Triticum aestivum
  peptide (1)..(218): Ceres Seq. ID no. 13654581
  misc_feature (20)..(213): Homolog of NCBI NO: 15234255 NR Description: ABA-repsonsiveprotein -related [Arabidopsis
  misc_feature (21)..(206): Homolog of NCBI NO: 15240044 NR Description: GRAM domain-containing protein [Arabidopsis
  misc_feature (1)..(213): Homolog of NCBI NO: 29788871 NR Description: putative ABA-responsive protein
  misc_feature (17)..(218): Homolog of NCBI NO: 26452129 NR Description: unknown protein [Arabidopsis thaliana]
  misc_feature (17)..(218): Homolog of NCBI NO: 21592789 NR Description: unknown [Arabidopsis thaliana]
  misc_feature (17)..(218): Homolog of NCBI NO: 18399985 NR Description: GRAM domain-containing protein [Arabidopsis
  misc_feature (80)..(218): Homolog of NCBI NO: 33146631 NR Description: putative FH protein interacting protein FIP1
  misc_feature (1)..(215): Homolog of NCBI NO: 15217869 NR Description: GRAM domain-containing protein [Arabidopsis
  misc_feature (1)..(213): Homolog of NCBI NO: 34902414 NR Description: Putative FH protein interacting protein FIP1
  misc_feature (1)..(218): Homolog of NCBI NO: 34906818 NR Description: contains EST C91668(E31216)~similar to FH protein
MSPEDLAPPPPPVVAPAGSNPYVLSSPSSGPPAKSTKENLREMFGSVGKRFSEAARKTEGIAGDVWQHLKTGPSITDAAMGRIAQVSKVISEGGYDKIFQQTFECLPDEKLKKAYACYLSTSHGPIMGVLYVSTAKLAFCSDSPVAYVTEDNQTASAIYKIVVPVPHLRSVTPTASQQNPAERYIQVVSVDNHDFWFMGFVNYDSAVKCLQDAARGGA

SEQ ID NO: 68587 - DNA, 1360 bp, Triticum aestivum
  misc_feature (1)..(1360): Ceres Seq. ID no. 12614739
aaccgccgtccgccggccgattcgactcctcccgcgaagcgccgtccatcttcgccgcccgtgccatgtcgcgccccgccggcaatccctcgtacgccgccgagctcggcgctgccaagaaggccgtcgccctcgccgcccgcctatgccagacggtgcagcaggaaattgtgcaatcagacatccaatccaaggcggataagactcctgtgaccgtagctgattatggatctcaagtactggtaagtgttgtgttaaatatggaagtaacttctggttccttttctatggtggccgaggaggactcagaagacttgagaaaggatggcgctgaagaaattctggagcgcattactgatcttgtaaacaaaactctcgctgaggatggttcatacaaccttttattatctaaggaagctatcctctctgcaattgataccgggaagtccgagggaggtccatctggccgacattgggttctagatccaattgatgggactaaaggattcgtgagaggaggccaatatgccattgcactggcactgcttgatgaaggcagggttgtcttgggtgcgttgggatgtccaaatcttccttttacatcagtaagtaacctcagtggtagctcaacaggagatcaaactggggccctcttttcagcggcaatcggttgtggtgctgaagtacagtcgttagatggctctccaccacaaaagattagtttttgtaccatcgacaatccagccaatgcctcgttctttgaatcctatgaaggagcgcactcgatgcgtgattttactggctgtgtagtggagaaacttggtgtccaagctcctccagtcagaatagatagccaagcaaaatatggtgctctggcccgtggggatggtgccatttactggcgttttccgcacgagggttacagggaaacgatatgggatcatgcagccggctcaattgtcgtcacagaagctggaggtgtagttaaagatgcctcaggaaacgatctcgatttctcgaaaggcagatttcttgatcgtgacacaggcatcattgctacaaataaacagttgatgccatcagtcctgaagtgtgtccaggaggcaatcaaggagaaaaaacaggcctcttccccattgtagaaggttcttgaaccttccctgttgtggaagttggattggtccaaaataatgatcgctatgctactccttattcatttgttcacactgtttatgtgtaactggccttttattggaaataaatacaacccttgttatacaatatctgtacatatccaaggagtggctgataggcagccatgacctgaaagaaactgaataaagatagaaatttcctgcgg

SEQ ID NO: 68588 - protein, 379 aa, Triticum aestivum
  peptide (1)..(379): Ceres Seq. ID no. 12614740
  misc_feature (31)..(372): Homolog of NCBI NO: 32405550 NR Description: hypothetical protein [Neurospora crassa]
  misc_feature (30)..(374): Homolog of NCBI NO: 8777312 NR Description: 3'(2'),5'-bisphosphate nucleotidase [Arabidopsis
  misc_feature (31)..(372): Homolog of NCBI NO: 15242383 NR Description: 3'(2'),5'-bisphosphate nucleotidase-like protein
  misc_feature (30)..(374): Homolog of NCBI NO: 21618152 NR Description: 3(2),5-bisphosphate nucleotidase [Arabidopsis
  misc_feature (30)..(374): Homolog of NCBI NO: 18424775 NR Description: 3(2),5-bisphosphate nucleotidase
  misc_feature (31)..(372): Homolog of NCBI NO: 34395640 NR Description: Probable SAL4 phosphatase (3'(2'),5'-bisphosphate
  misc_feature (30)..(372): Homolog of NCBI NO: 15237589 NR Description: 3(2),5-bisphosphate nucleotidase (emb|CAB05889.1)
  misc_feature (30)..(377): Homolog of NCBI NO: 15237567 NR Description: 3(2),5-bisphosphate nucleotidase
  misc_feature (26)..(379): Homolog of NCBI NO: 14268820 NR Description: diphosphonucleotide phosphatase 1 [Zea mays]
  misc_feature (22)..(379): Homolog of NCBI NO: 3913517 NR Description: 3'(2'),5'-BISPHOSPHATE NUCLEOTIDASE
PPSAGRFDSSREAPSIFAARAMSRPAGNPSYAAELGAAKKAVALAARLCQTVQQEIVQSDIQSKADKTPVTVADYGSQVLVSVVLNMEVTSGSFSMVAEEDSEDLRKDGAEEILERITDLVNKTLAEDGSYNLLLSKEAILSAIDTGKSEGGPSGRHWVLDPIDGTKGFVRGGQYAIALALLDEGRVVLGALGCPNLPFTSVSNLSGSSTGDQTGALFSAAIGCGAEVQSLDGSPPQKISFCTIDNPANASFFESYEGAHSMRDFTGCVVEKLGVQAPPVRIDSQAKYGALARGDGAIYWRFPHEGYRETIWDHAAGSIVVTEAGGVVKDASGNDLDFSKGRFLDRDTGIIATNKQLMPSVLKCVQEAIKEKKQASSPL

SEQ ID NO: 68589 - protein, 358 aa, Triticum aestivum
  peptide (1)..(358): Ceres Seq. ID no. 12614741
  misc_feature (10)..(351): Homolog of NCBI NO: 32405550 NR Description: hypothetical protein [Neurospora crassa]
  misc_feature (9)..(353): Homolog of NCBI NO: 8777312 NR Description: 3'(2'),5'-bisphosphate nucleotidase [Arabidopsis
  misc_feature (10)..(351): Homolog of NCBI NO: 15242383 NR Description: 3'(2'),5'-bisphosphate nucleotidase-like protein
  misc_feature (9)..(353): Homolog of NCBI NO: 21618152 NR Description: 3(2),5-bisphosphate nucleotidase [Arabidopsis
  misc_feature (9)..(353): Homolog of NCBI NO: 18424775 NR Description: 3(2),5-bisphosphate nucleotidase
  misc_feature (10)..(351): Homolog of NCBI NO: 34395640 NR Description: Probable SAL4 phosphatase (3'(2'),5'-bisphosphate
  misc_feature (9)..(351): Homolog of NCBI NO: 15237589 NR Description: 3(2),5-bisphosphate nucleotidase (emb|CAB05889.1)
  misc_feature (9)..(356): Homolog of NCBI NO: 15237567 NR Description: 3(2),5-bisphosphate nucleotidase
  misc_feature (5)..(358): Homolog of NCBI NO: 14268820 NR Description: diphosphonucleotide phosphatase 1 [Zea mays]
  misc_feature (1)..(358): Homolog of NCBI NO: 3913517 NR Description: 3'(2'),5'-BISPHOSPHATE NUCLEOTIDASE
MSRPAGNPSYAAELGAAKKAVALAARLCQTVQQEIVQSDIQSKADKTPVTVADYGSQVLVSVVLNMEVTSGSFSMVAEEDSEDLRKDGAEEILERITDLVNKTLAEDGSYNLLLSKEAILSAIDTGKSEGGPSGRHWVLDPIDGTKGFVRGGQYAIALALLDEGRVVLGALGCPNLPFTSVSNLSGSSTGDQTGALFSAAIGCGAEVQSLDGSPPQKISFCTIDNPANASFFESYEGAHSMRDFTGCVVEKLGVQAPPVRIDSQAKYGALARGDGAIYWRFPHEGYRETIWDHAAGSIVVTEAGGVVKDASGNDLDFSKGRFLDRDTGIIATNKQLMPSVLKCVQEAIKEKKQASSPL

SEQ ID NO: 68590 - protein, 293 aa, Triticum aestivum
  peptide (1)..(293): Ceres Seq. ID no. 12614742
  misc_feature (1)..(286): Homolog of NCBI NO: 32405550 NR Description: hypothetical protein [Neurospora crassa]
  misc_feature (1)..(288): Homolog of NCBI NO: 8777312 NR Description: 3'(2'),5'-bisphosphate nucleotidase [Arabidopsis
  misc_feature (1)..(286): Homolog of NCBI NO: 15242383 NR Description: 3'(2'),5'-bisphosphate nucleotidase-like protein
  misc_feature (1)..(288): Homolog of NCBI NO: 21618152 NR Description: 3(2),5-bisphosphate nucleotidase [Arabidopsis
  misc_feature (1)..(288): Homolog of NCBI NO: 18424775 NR Description: 3(2),5-bisphosphate nucleotidase
  misc_feature (1)..(286): Homolog of NCBI NO: 34395640 NR Description: Probable SAL4 phosphatase (3'(2'),5'-bisphosphate
  misc_feature (1)..(286): Homolog of NCBI NO: 15237589 NR Description: 3(2),5-bisphosphate nucleotidase (emb|CAB05889.1)
  misc_feature (1)..(291): Homolog of NCBI NO: 15237567 NR Description: 3(2),5-bisphosphate nucleotidase
  misc_feature (1)..(293): Homolog of NCBI NO: 14268820 NR Description: diphosphonucleotide phosphatase 1 [Zea mays]
  misc_feature (1)..(293): Homolog of NCBI NO: 3913517 NR Description: 3'(2'),5'-BISPHOSPHATE NUCLEOTIDASE
MEVTSGSFSMVAEEDSEDLRKDGAEEILERITDLVNKTLAEDGSYNLLLSKEAILSAIDTGKSEGGPSGRHWVLDPIDGTKGFVRGGQYAIALALLDEGRVVLGALGCPNLPFTSVSNLSGSSTGDQTGALFSAAIGCGAEVQSLDGSPPQKISFCTIDNPANASFFESYEGAHSMRDFTGCVVEKLGVQAPPVRIDSQAKYGALARGDGAIYWRFPHEGYRETIWDHAAGSIVVTEAGGVVKDASGNDLDFSKGRFLDRDTGIIATNKQLMPSVLKCVQEAIKEKKQASSPL

SEQ ID NO: 68591 - DNA, 1235 bp, Triticum aestivum
  misc_feature (1)..(1235): Ceres Seq. ID no. 13596108
  misc_feature: Pfam Name: Mito_carr Pfam Description: Mitochondrial carrier protein
tcctcttcctctcaggcgcccacctcctcccctgcctgcggctcaagcttccgttcccctccaggcctcgcgcgcagaggcagggcggcggcgttcagttgtcttctcggcggcgggcgggcaggcatgggcgccagcgggggcggggaagacaagcccttcaatttcctccagatcctctgcgagggcgtcatagccggaggagctgccggggtcgtggttgaaacggctctgtaccccatcgacaccatcaagaccaggcttcaggctgctcgagctggaagtcaaatccaatggaaaggcctgtattccggactaggtggaaatcttgtcggtgttctcccggcttctgctctgtttgtgggaatatatgagccaactaaacggaagctactggacatgtttcctgaaaatttgagtgctgttgctcatcttactgcaggtgctgttggagggttgggtgcttctctcattcgtgttcccacagaggtggtcaaacaaaggatgcaaactggtcaattcaggactgcgcctgatgctgttcgtctcatagttgccaaggaaggatttagaggtctttttgctggttatggttcatttttacttcgagatcttccgtttgatgccattcaattctgcatatatgagcaacttcgaattggttacaagcttatggcaaagagggagctgaaggatccagagaatgcactaattggtgcttttgccggtgcgattactggcgctataacgacccccctcgatgttctgaagacaaggttgatgattcaggggcaaacgaagcaatactccggaatcgtaagctgtgctaagacgatcttgagagaggaaggcccaggggcattcttgaagggcatcgagccgcgagttctgtggatcggcatcggtgggtccatcttcttcggcgtgctggagaagaccaagtcggtgctcgctgagcggagcagccgcaaggctgcgctggcggagaaggacgagtgaaccaaccgaccaaaccaactgtgcatcctatgctgactcactctacaccattacccgttccttaaacctgaagttttgctccaagtttatgtggtgggctttgcatttctcgttccagaactataaggcatacaatcagtttcaagagtctgttttgacgtcggcgatggttatgatcctttatgagtccctgtaaacattactctcctttaataaagtttagcagattgttcttc

SEQ ID NO: 68592 - protein, 332 aa, Triticum aestivum
  peptide (1)..(332): Ceres Seq. ID no. 15221774
  misc_feature: Pfam Name: Mito_carr Pfam Description: Mitochondrial carrier protein
  misc_feature (64)..(284): Homolog of NCBI NO: 34857703 NR Description: similar to RIKEN cDNA 4930433D19 [Rattus
  misc_feature (62)..(308): Homolog of NCBI NO: 19115553 NR Description: agpet8 protein. [Schizosaccharomyces pombe]
  misc_feature (52)..(322): Homolog of NCBI NO: 24650120 NR Description: CG4743-PA [Drosophila melanogaster]
  misc_feature (64)..(319): Homolog of NCBI NO: 6324325 NR Description: Member of family of mitochondrial carrier
  misc_feature (64)..(319): Homolog of NCBI NO: 27754081 NR Description: RIKEN cDNA 4930433D19 [Mus musculus]
  misc_feature (64)..(316): Homolog of NCBI NO: 3171731 NR Description: AgPET8 [Eremothecium gossypii]
  misc_feature (50)..(293): Homolog of NCBI NO: 7486053 NR Description: hypothetical protein F23K16.90 - Arabidopsis
  misc_feature (50)..(323): Homolog of NCBI NO: 18399114 NR Description: mitochondrial carrier protein family [Arabidopsis
  misc_feature (50)..(320): Homolog of NCBI NO: 18420458 NR Description: mitochondrial carrier protein family [Arabidopsis
  misc_feature (48)..(327): Homolog of NCBI NO: 34394981 NR Description: mitochondrial aspartate-glutamate carrier
SSSSQAPTSSPACGSSFRSPPGLARRGRAAAFSCLLGGGRAGMGASGGGEDKPFNFLQILCEGVIAGGAAGVVVETALYPIDTIKTRLQAARAGSQIQWKGLYSGLGGNLVGVLPASALFVGIYEPTKRKLLDMFPENLSAVAHLTAGAVGGLGASLIRVPTEVVKQRMQTGQFRTAPDAVRLIVAKEGFRGLFAGYGSFLLRDLPFDAIQFCIYEQLRIGYKLMAKRELKDPENALIGAFAGAITGAITTPLDVLKTRLMIQGQTKQYSGIVSCAKTILREEGPGAFLKGIEPRVLWIGIGGSIFFGVLEKTKSVLAERSSRKAALAEKDE

SEQ ID NO: 68593 - protein, 290 aa, Triticum aestivum
  peptide (1)..(290): Ceres Seq. ID no. 15221775
  misc_feature: Pfam Name: Mito_carr Pfam Description: Mitochondrial carrier protein
  misc_feature (22)..(242): Homolog of NCBI NO: 34857703 NR Description: similar to RIKEN cDNA 4930433D19 [Rattus
  misc_feature (20)..(266): Homolog of NCBI NO: 19115553 NR Description: agpet8 protein. [Schizosaccharomyces pombe]
  misc_feature (10)..(280): Homolog of NCBI NO: 24650120 NR Description: CG4743-PA [Drosophila melanogaster]
  misc_feature (22)..(277): Homolog of NCBI NO: 6324325 NR Description: Member of family of mitochondrial carrier
  misc_feature (22)..(277): Homolog of NCBI NO: 27754081 NR Description: RIKEN cDNA 4930433D19 [Mus musculus]
  misc_feature (22)..(274): Homolog of NCBI NO: 3171731 NR Description: AgPET8 [Eremothecium gossypii]
  misc_feature (8)..(251): Homolog of NCBI NO: 7486053 NR Description: hypothetical protein F23K16.90 - Arabidopsis
  misc_feature (8)..(281): Homolog of NCBI NO: 18399114 NR Description: mitochondrial carrier protein family [Arabidopsis
  misc_feature (8)..(278): Homolog of NCBI NO: 18420458 NR Description: mitochondrial carrier protein family [Arabidopsis
  misc_feature (6)..(285): Homolog of NCBI NO: 34394981 NR Description: mitochondrial aspartate-glutamate carrier
MGASGGGEDKPFNFLQILCEGVIAGGAAGVVVETALYPIDTIKTRLQAARAGSQIQWKGLYSGLGGNLVGVLPASALFVGIYEPTKRKLLDMFPENLSAVAHLTAGAVGGLGASLIRVPTEVVKQRMQTGQFRTAPDAVRLIVAKEGFRGLFAGYGSFLLRDLPFDAIQFCIYEQLRIGYKLMAKRELKDPENALIGAFAGAITGAITTPLDVLKTRLMIQGQTKQYSGIVSCAKTILREEGPGAFLKGIEPRVLWIGIGGSIFFGVLEKTKSVLAERSSRKAALAEKDE

SEQ ID NO: 68594 - protein, 199 aa, Triticum aestivum
  peptide (1)..(199): Ceres Seq. ID no. 15221776
  misc_feature: Pfam Name: Mito_carr Pfam Description: Mitochondrial carrier protein
  misc_feature (1)..(151): Homolog of NCBI NO: 34857703 NR Description: similar to RIKEN cDNA 4930433D19 [Rattus
  misc_feature (1)..(175): Homolog of NCBI NO: 19115553 NR Description: agpet8 protein. [Schizosaccharomyces pombe]
  misc_feature (1)..(189): Homolog of NCBI NO: 24650120 NR Description: CG4743-PA [Drosophila melanogaster]
  misc_feature (1)..(186): Homolog of NCBI NO: 6324325 NR Description: Member of family of mitochondrial carrier
  misc_feature (1)..(186): Homolog of NCBI NO: 27754081 NR Description: RIKEN cDNA 4930433D19 [Mus musculus]
  misc_feature (1)..(183): Homolog of NCBI NO: 3171731 NR Description: AgPET8 [Eremothecium gossypii]
  misc_feature (1)..(160): Homolog of NCBI NO: 7486053 NR Description: hypothetical protein F23K16.90 - Arabidopsis
  misc_feature (1)..(190): Homolog of NCBI NO: 18399114 NR Description: mitochondrial carrier protein family [Arabidopsis
  misc_feature (1)..(187): Homolog of NCBI NO: 18420458 NR Description: mitochondrial carrier protein family [Arabidopsis
  misc_feature (1)..(194): Homolog of NCBI NO: 34394981 NR Description: mitochondrial aspartate-glutamate carrier
MFPENLSAVAHLTAGAVGGLGASLIRVPTEVVKQRMQTGQFRTAPDAVRLIVAKEGFRGLFAGYGSFLLRDLPFDAIQFCIYEQLRIGYKLMAKRELKDPENALIGAFAGAITGAITTPLDVLKTRLMIQGQTKQYSGIVSCAKTILREEGPGAFLKGIEPRVLWIGIGGSIFFGVLEKTKSVLAERSSRKAALAEKDE

SEQ ID NO: 68595 - DNA, 1684 bp, Triticum aestivum
  misc_feature (1)..(1684): Ceres Seq. ID no. 14303557
caccctcccccgctcctcctcctcgggctccgccgcccccgcctccgcctccccgaatcccagccctagcggccggcgagcgcggcgatgggcgccgtcgcctccacggtggcggcgcgcttcgccttcttcccgccctccccgccgtcgtacggcgtcgagcccccgccctcgccggccgcggccgccgcggacggcgcggtggtggagctcagcggggtgccccggcggggcggcgtggaggcgcggcggctgccgaccaagcgcggctcggaggtggtggccatgtacgtgcgccagcccggggcgcgcctcacgctgctctactcccacggcaacgcggccgacctgggccagatgtacgagctcttcgtcgagctcagctcgcacctcaacgtcaacctcatgggttatgattattctggatatgggcaatcatctgggaagccaagtgagcagaacacttatgcagacatagaggccgcttataggtgtctcatagaaacttatggggcctccgaggaaaacatcattctgtatggtcaatcagttggcagtggccctactttagatttggcatctcgtttgcctcatttgagagcagtggttctacatagcccaatttcgtctggcttgagagtaatgtatcctgtgaaacatacatactggtttgacatatataagaacattgacaaagttgcattggtcaaatgccccgtgttagtaatccatggtacggctgatgatgttgttgactgttctcatgggagagcactgtgggaactatccaaagtgaagtatgagcctttgtgggtcaaaggtgggaaccattgtaatttggaactctatcccgaatacattaagcacctaaagaagttcatcacagccatagagaagtccccaccactgaaagatgattctccagaaagttcaggcccttcagatcttgaaacaggatctgaaagtatggagagttcaagaaaaagcacggatgtgagggacaaatcaaggtcaagcactgatcacaggcggagtacagatcgacgggagaaaccaaggagcagcatagataggaaggataaaggcagaaagagtgtagatcatcctgacaaaccacgggctagtgtggatcaatctgataagccacggaaaagcattgaccgctttggagggatgatgaggtcggttaaattgtgcaatattgactgcttcaaagtaacttccacttccgggagctgaaaatagtggaaggttagttttgatagtatctgtatttatttcatctgtataatctattcaattgggtgtttttagttttgctgtggaaggtgtattgatttgggtgagggttatgcacactgaattgtttcgtgagaagaaatgatcattcattcccgaccccctgagttttcaaagccattcatttggcacatcaacaatgctactcccacggagtatgaagcaacaccattgttacactgtacataagttgttgtatcattacactgtcttagtttttctttttcatagaaacatttgatagataactaaactgggaatttgtgtcttccctctggaaagaagttctcttcaaaaatggatttctgtcacttgattgctttgtcatggagcttgaacttgaaatgaatcactggatcattcaatgtaatcatcatctttgttc

SEQ ID NO: 68596 - protein, 383 aa, Triticum aestivum
  peptide (1)..(383): Ceres Seq. ID no. 14303558
  misc_feature (107)..(175): Pfam Name: alpha/beta hydrolase fold Pfam Description: alpha/beta hydrolase fold
  misc_feature (8)..(338): Homolog of NCBI NO: 15222895 NR Description: hypothetical protein [Arabidopsis thaliana]
  misc_feature (1)..(268): Homolog of NCBI NO: 22330474 NR Description: expressed protein [Arabidopsis thaliana]
  misc_feature (1)..(338): Homolog of NCBI NO: 25352159 NR Description: F21F23.4 protein - Arabidopsis thaliana
  misc_feature (1)..(338): Homolog of NCBI NO: 9802758 NR Description: Hypothetical protein [Arabidopsis thaliana]
  misc_feature (24)..(335): Homolog of NCBI NO: 34911338 NR Description: P0519D04.38 [Oryza sativa (japonica
  misc_feature (1)..(337): Homolog of NCBI NO: 10177798 NR Description: emb|CAB87778.1~gene_id:MXA21.9~strong similarity
  misc_feature (1)..(358): Homolog of NCBI NO: 15233975 NR Description: expressed protein [Arabidopsis thaliana]
  misc_feature (1)..(359): Homolog of NCBI NO: 15232168 NR Description: expressed protein [Arabidopsis thaliana]
  misc_feature (1)..(358): Homolog of NCBI NO: 15241394 NR Description: expressed protein [Arabidopsis thaliana]
  misc_feature (1)..(360): Homolog of NCBI NO: 15230760 NR Description: hypothetical protein [Arabidopsis thaliana]
MGAVASTVAARFAFFPPSPPSYGVEPPPSPAAAAADGAVVELSGVPRRGGVEARRLPTKRGSEVVAMYVRQPGARLTLLYSHGNAADLGQMYELFVELSSHLNVNLMGYDYSGYGQSSGKPSEQNTYADIEAAYRCLIETYGASEENIILYGQSVGSGPTLDLASRLPHLRAVVLHSPISSGLRVMYPVKHTYWFDIYKNIDKVALVKCPVLVIHGTADDVVDCSHGRALWELSKVKYEPLWVKGGNHCNLELYPEYIKHLKKFITAIEKSPPLKDDSPESSGPSDLETGSESMESSRKSTDVRDKSRSSTDHRRSTDRREKPRSSIDRKDKGRKSVDHPDKPRASVDQSDKPRKSIDRFGGMMRSVKLCNIDCFKVTSTSGS

SEQ ID NO: 68597 - protein, 317 aa, Triticum aestivum
  peptide (1)..(317): Ceres Seq. ID no. 14303559
  misc_feature (41)..(109): Pfam Name: alpha/beta hydrolase fold Pfam Description: alpha/beta hydrolase fold
  misc_feature (1)..(272): Homolog of NCBI NO: 15222895 NR Description: hypothetical protein [Arabidopsis thaliana]
  misc_feature (1)..(202): Homolog of NCBI NO: 22330474 NR Description: expressed protein [Arabidopsis thaliana]
  misc_feature (1)..(272): Homolog of NCBI NO: 25352159 NR Description: F21F23.4 protein - Arabidopsis thaliana
  misc_feature (1)..(272): Homolog of NCBI NO: 9802758 NR Description: Hypothetical protein [Arabidopsis thaliana]
  misc_feature (1)..(269): Homolog of NCBI NO: 34911338 NR Description: P0519D04.38 [Oryza sativa (japonica
  misc_feature (1)..(271): Homolog of NCBI NO: 10177798 NR Description: emb|CAB87778.1~gene_id:MXA21.9~strong similarity
  misc_feature (1)..(292): Homolog of NCBI NO: 15233975 NR Description: expressed protein [Arabidopsis thaliana]
  misc_feature (1)..(293): Homolog of NCBI NO: 15232168 NR Description: expressed protein [Arabidopsis thaliana]
  misc_feature (1)..(292): Homolog of NCBI NO: 15241394 NR Description: expressed protein [Arabidopsis thaliana]
  misc_feature (1)..(294): Homolog of NCBI NO: 15230760 NR Description: hypothetical protein [Arabidopsis thaliana]
MYVRQPGARLTLLYSHGNAADLGQMYELFVELSSHLNVNLMGYDYSGYGQSSGKPSEQNTYADIEAAYRCLIETYGASEENIILYGQSVGSGPTLDLASRLPHLRAVVLHSPISSGLRVMYPVKHTYWFDIYKNIDKVALVKCPVLVIHGTADDVVDCSHGRALWELSKVKYEPLWVKGGNHCNLELYPEYIKHLKKFITAIEKSPPLKDDSPESSGPSDLETGSESMESSRKSTDVRDKSRSSTDHRRSTDRREKPRSSIDRKDKGRKSVDHPDKPRASVDQSDKPRKSIDRFGGMMRSVKLCNIDCFKVTSTSGS

SEQ ID NO: 68598 - protein, 293 aa, Triticum aestivum
  peptide (1)..(293): Ceres Seq. ID no. 14303560
  misc_feature (17)..(85): Pfam Name: alpha/beta hydrolase fold Pfam Description: alpha/beta hydrolase fold
  misc_feature (1)..(248): Homolog of NCBI NO: 15222895 NR Description: hypothetical protein [Arabidopsis thaliana]
  misc_feature (1)..(178): Homolog of NCBI NO: 22330474 NR Description: expressed protein [Arabidopsis thaliana]
  misc_feature (1)..(248): Homolog of NCBI NO: 25352159 NR Description: F21F23.4 protein - Arabidopsis thaliana
  misc_feature (1)..(248): Homolog of NCBI NO: 9802758 NR Description: Hypothetical protein [Arabidopsis thaliana]
  misc_feature (1)..(245): Homolog of NCBI NO: 34911338 NR Description: P0519D04.38 [Oryza sativa (japonica
  misc_feature (1)..(247): Homolog of NCBI NO: 10177798 NR Description: emb|CAB87778.1~gene_id:MXA21.9~strong similarity
  misc_feature (1)..(268): Homolog of NCBI NO: 15233975 NR Description: expressed protein [Arabidopsis thaliana]
  misc_feature (1)..(269): Homolog of NCBI NO: 15232168 NR Description: expressed protein [Arabidopsis thaliana]
  misc_feature (1)..(268): Homolog of NCBI NO: 15241394 NR Description: expressed protein [Arabidopsis thaliana]
  misc_feature (1)..(270): Homolog of NCBI NO: 15230760 NR Description: hypothetical protein [Arabidopsis thaliana]
MYELFVELSSHLNVNLMGYDYSGYGQSSGKPSEQNTYADIEAAYRCLIETYGASEENIILYGQSVGSGPTLDLASRLPHLRAVVLHSPISSGLRVMYPVKHTYWFDIYKNIDKVALVKCPVLVIHGTADDVVDCSHGRALWELSKVKYEPLWVKGGNHCNLELYPEYIKHLKKFITAIEKSPPLKDDSPESSGPSDLETGSESMESSRKSTDVRDKSRSSTDHRRSTDRREKPRSSIDRKDKGRKSVDHPDKPRASVDQSDKPRKSIDRFGGMMRSVKLCNIDCFKVTSTSGS

SEQ ID NO: 68599 - DNA, 1811 bp, Triticum aestivum
  misc_feature (1)..(1811): Ceres Seq. ID no. 13654583
atttctgccaaagtggaaccggggaggcagcgagactgggactggtgcgtagtggaggagctgatttctccaagcgggcagtggcaatggcgtgctacgccgctctcctgcaccagccgcccgcctcgccgtccccgtgcacctcaggccgcgccggctcctgccgtgtccgtccgcccccactcctccagcgccgagcccttcccctgtctgtgcgcgctcggatctccccccgctgctcctacgccgcagccggagaaagcgccggagcgggcgccggggaacagcccgcggcggcgctccggagagtgctggggacgccgggcgcccaccaggcgcccgcttgctacgacgcgctcagcgcccgcctcgtcgagcgcgcggggttcagggcctgcttcacgagcggcttctcaatatctgctgcaaggcttggattaccagatgttggtctcatctcctatggtgaaatgatagatcaagggcgtttaatcactgaagcagtatcgatacctgtcattggtgatgctgataatggttatggaaactgtatgaatgtcaagaggacagtgaaaggatttattaatgctggttttgctggaattattcttgaagatcaggtgtcaccaaaagcatgtggacatacacaaggaaggaaagttgtctcaagagaggaagcgattatgcacataaaagccgctgtagatgccaggaaggagagtggctctgacattgttattgtggcaaggacagattctcgtcaagctttgtctcttgatgaagcgttgtggagagcacgagcttttgctgatgctggagcagatgttctatttattgatgcccttgcctcaagggaagagatgatggcgttttgtgcagtttcacctggagttccaaaaatggccaacatgttagaaggtggtggtaaaactcctatattgagccctcttgaacttgaagaaattggttacaaaatcatagcctacccattatctctaattggggtatcaatgcgtgcaatggaggatgctcttgttgctataaaaggtggccgcatacctcctccaagtagcttgccatcatttgaggagatcaaggatacgctagggtttaaccgttattatgaagaggaaaagcgatacgttgcatcaccagctcaatcatccttttggagtgttataggtaattatgattatacaagtgaagctagcagttcaggagacaccaagtccaggactgagaaatcacaagaacctattattgacatactgccacagctctatgatcctggttccgctggaggcagaggtccttcaggtgggatgtggtcccgcacacttcgattgaagattacaggaagagatggggtccagaaaattgatgccaggatacctgctggattcttagaagggatgacaaaagttattccaggcctggctggaactaatatcatggaaaggcttcggaacgcgcctatggattcggacaacccccagaacgggcagatactgcttgattttgaggacggcaggggagataggatccaggttttcatcgcgtgagcgtgttgttcgttgttgtcgtcccggcatccgatactcagacgagcgtcatgttccgtttgagtagtataagcaaatggctgttacttggtagtagttggtaggcccttgctgcctacatccagttatgtaaactccgcatcatactgcatgcatccagaactagtcttcctgtaaccttcctcgtctcatggatgcggaagttaaattcgaataaaacaagttatggaaaaggtattcctctatgcg

SEQ ID NO: 68600 - protein, 519 aa, Triticum aestivum
  peptide (1)..(519): Ceres Seq. ID no. 13654584
  misc_feature (95)..(335): Pfam Name: Isocitrate lyase family Pfam Description: Isocitrate lyase family
  misc_feature (112)..(382): Homolog of NCBI NO: 40739091 NR Description: hypothetical protein AN6882.2 [Aspergillus
  misc_feature (113)..(374): Homolog of NCBI NO: 40747280 NR Description: hypothetical protein AN9369.2 [Aspergillus
  misc_feature (100)..(380): Homolog of NCBI NO: 23043034 NR Description: hypothetical protein [Trichodesmium erythraeum
  misc_feature (409)..(464): Homolog of NCBI NO: 25408843 NR Description: probable carboxyphosphonoenolpyruvate mutase
  misc_feature (66)..(422): Homolog of NCBI NO: 25408843 NR Description: probable carboxyphosphonoenolpyruvate mutase
  misc_feature (66)..(464): Homolog of NCBI NO: 30689282 NR Description: carboxyphosphonoenolpyruvate mutase -related
  misc_feature (66)..(518): Homolog of NCBI NO: 30689278 NR Description: carboxyphosphonoenolpyruvate mutase -related
  misc_feature (446)..(518): Homolog of NCBI NO: 38347227 NR Description: OSJNBa0044M19.9 [Oryza sativa (japonica
  misc_feature (86)..(433): Homolog of NCBI NO: 38347227 NR Description: OSJNBa0044M19.9 [Oryza sativa (japonica
  misc_feature (29)..(518): Homolog of NCBI NO: 32490267 NR Description: OSJNBb0116K07.9 [Oryza sativa (japonica
FCQSGTGEAARLGLVRSGGADFSKRAVAMACYAALLHQPPASPSPCTSGRAGSCRVRPPPLLQRRALPLSVRARISPRCSYAAAGESAGAGAGEQPAAALRRVLGTPGAHQAPACYDALSARLVERAGFRACFTSGFSISAARLGLPDVGLISYGEMIDQGRLITEAVSIPVIGDADNGYGNCMNVKRTVKGFINAGFAGIILEDQVSPKACGHTQGRKVVSREEAIMHIKAAVDARKESGSDIVIVARTDSRQALSLDEALWRARAFADAGADVLFIDALASREEMMAFCAVSPGVPKMANMLEGGGKTPILSPLELEEIGYKIIAYPLSLIGVSMRAMEDALVAIKGGRIPPPSSLPSFEEIKDTLGFNRYYEEEKRYVASPAQSSFWSVIGNYDYTSEASSSGDTKSRTEKSQEPIIDILPQLYDPGSAGGRGPSGGMWSRTLRLKITGRDGVQKIDARIPAGFLEGMTKVIPGLAGTNIMERLRNAPMDSDNPQNGQILLDFEDGRGDRIQVFIA

SEQ ID NO: 68601 - protein, 491 aa, Triticum aestivum
  peptide (1)..(491): Ceres Seq. ID no. 13654585
  misc_feature (67)..(307): Pfam Name: Isocitrate lyase family Pfam Description: Isocitrate lyase family
  misc_feature (84)..(354): Homolog of NCBI NO: 40739091 NR Description: hypothetical protein AN6882.2 [Aspergillus
  misc_feature (85)..(346): Homolog of NCBI NO: 40747280 NR Description: hypothetical protein AN9369.2 [Aspergillus
  misc_feature (72)..(352): Homolog of NCBI NO: 23043034 NR Description: hypothetical protein [Trichodesmium erythraeum
  misc_feature (381)..(436): Homolog of NCBI NO: 25408843 NR Description: probable carboxyphosphonoenolpyruvate mutase
  misc_feature (38)..(394): Homolog of NCBI NO: 25408843 NR Description: probable carboxyphosphonoenolpyruvate mutase
  misc_feature (38)..(436): Homolog of NCBI NO: 30689282 NR Description: carboxyphosphonoenolpyruvate mutase -related
  misc_feature (38)..(490): Homolog of NCBI NO: 30689278 NR Description: carboxyphosphonoenolpyruvate mutase -related
  misc_feature (418)..(490): Homolog of NCBI NO: 38347227 NR Description: OSJNBa0044M19.9 [Oryza sativa (japonica
  misc_feature (58)..(405): Homolog of NCBI NO: 38347227 NR Description: OSJNBa0044M19.9 [Oryza sativa (japonica
  misc_feature (1)..(490): Homolog of NCBI NO: 32490267 NR Description: OSJNBb0116K07.9 [Oryza sativa (japonica
MACYAALLHQPPASPSPCTSGRAGSCRVRPPPLLQRRALPLSVRARISPRCSYAAAGESAGAGAGEQPAAALRRVLGTPGAHQAPACYDALSARLVERAGFRACFTSGFSISAARLGLPDVGLISYGEMIDQGRLITEAVSIPVIGDADNGYGNCMNVKRTVKGFINAGFAGIILEDQVSPKACGHTQGRKVVSREEAIMHIKAAVDARKESGSDIVIVARTDSRQALSLDEALWRARAFADAGADVLFIDALASREEMMAFCAVSPGVPKMANMLEGGGKTPILSPLELEEIGYKIIAYPLSLIGVSMRAMEDALVAIKGGRIPPPSSLPSFEEIKDTLGFNRYYEEEKRYVASPAQSSFWSVIGNYDYTSEASSSGDTKSRTEKSQEPIIDILPQLYDPGSAGGRGPSGGMWSRTLRLKITGRDGVQKIDARIPAGFLEGMTKVIPGLAGTNIMERLRNAPMDSDNPQNGQILLDFEDGRGDRIQVFIA

SEQ ID NO: 68602 - protein, 363 aa, Triticum aestivum
  peptide (1)..(363): Ceres Seq. ID no. 13654586
  misc_feature (1)..(179): Pfam Name: Isocitrate lyase family Pfam Description: Isocitrate lyase family
  misc_feature (1)..(226): Homolog of NCBI NO: 40739091 NR Description: hypothetical protein AN6882.2 [Aspergillus
  misc_feature (1)..(218): Homolog of NCBI NO: 40747280 NR Description: hypothetical protein AN9369.2 [Aspergillus
  misc_feature (1)..(224): Homolog of NCBI NO: 23043034 NR Description: hypothetical protein [Trichodesmium erythraeum
  misc_feature (253)..(308): Homolog of NCBI NO: 25408843 NR Description: probable carboxyphosphonoenolpyruvate mutase
  misc_feature (1)..(266): Homolog of NCBI NO: 25408843 NR Description: probable carboxyphosphonoenolpyruvate mutase
  misc_feature (1)..(308): Homolog of NCBI NO: 30689282 NR Description: carboxyphosphonoenolpyruvate mutase -related
  misc_feature (1)..(362): Homolog of NCBI NO: 30689278 NR Description: carboxyphosphonoenolpyruvate mutase -related
  misc_feature (290)..(362): Homolog of NCBI NO: 38347227 NR Description: OSJNBa0044M19.9 [Oryza sativa (japonica
  misc_feature (1)..(277): Homolog of NCBI NO: 38347227 NR Description: OSJNBa0044M19.9 [Oryza sativa (japonica
  misc_feature (1)..(362): Homolog of NCBI NO: 32490267 NR Description: OSJNBb0116K07.9 [Oryza sativa (japonica
MIDQGRLITEAVSIPVIGDADNGYGNCMNVKRTVKGFINAGFAGIILEDQVSPKACGHTQGRKVVSREEAIMHIKAAVDARKESGSDIVIVARTDSRQALSLDEALWRARAFADAGADVLFIDALASREEMMAFCAVSPGVPKMANMLEGGGKTPILSPLELEEIGYKIIAYPLSLIGVSMRAMEDALVAIKGGRIPPPSSLPSFEEIKDTLGFNRYYEEEKRYVASPAQSSFWSVIGNYDYTSEASSSGDTKSRTEKSQEPIIDILPQLYDPGSAGGRGPSGGMWSRTLRLKITGRDGVQKIDARIPAGFLEGMTKVIPGLAGTNIMERLRNAPMDSDNPQNGQILLDFEDGRGDRIQVFIA

SEQ ID NO: 68603 - DNA, 1624 bp, Triticum aestivum
  misc_feature (1)..(1624): Ceres Seq. ID no. 14303592
cataagcgcccagccatcggtcagctcacaccaccctagctctccggcgaacgaccgataagtacccgtcgggatgggcgaggcaagctccgacgccgccgccaaggctgcggccgtgcgggctgtcgcagtctcccgggtcgcgccctcggtgctgggggaggtgcagcgcgttgaactttccttcttcgattcgccgtgggtcgtgctgccgccgatccagcgggtgttcctgtacgagcttggggatgccgacggcttcccgacggtggtggagcggctcaagcgcgctctcgcggacaccctggcgcactacctgcccctggcggggatgctcgagtacgcggtggagaccggggacgccttcgtggactgcactcacgccggggtcgccttcctggaggccgagggcgatatggacgtgcagcgtctagccggcgacgaggcgcacgacatcctggcattcctgagcctggtgccggagctggatgcccgggtgctcccggcgcccgtgctgtcagtgcaggccactcgtctaagcggcggcctggcggtgggcctgtccgtgcaccacgtagtcgcggacggacgcgccgtttggcgattcatggaggcctggtcttccgcttcccgcgagggctccccggtcaccaaggtcctcggcccgccgcactacggccgggaggtcatccagcaccccaacggcgacgagctcgcccgcgacatgctaaagaccgtcgcgcccaatctccctgtggtgagggggcagtacgatttcagccagcggttcctgcgggcgcgccggacattctacctcggcgccgacgacatccagtcgctcaggcggcggatcgacgacctcgcctcggacgagtctgctaccggtggcgacgcgcccaagccgaaaccggtgtcgacgttcgtggcgctggcggcactgagctggacggcgttcgttcgatccaaggggctcggcgcaggggacgacacgtacctcatgttcctcgccgacctgcgctcccgcctcgacccgccagtcagcgaggcttacctgggcaactgcgtgcgcgcgtgcctggcgagctgcgccgacgcggcggacctcctcggccagtccggcatcctccgcgcggcgcgggccgtgcaggcggcggtggccgagatggaggcggcgccgctgtccgggacggacaaggggtggatgcagatgctgatgcggctgccgtttcagcggatgaccaacgtggcggcgagccctcggttccgggcctacgaggcggccgacttcgggttcgggaagcccgcgcgcgtggagctggtgtccatgaaccacgacggcgagatggtgctagtcggcggccggcgcgacggcgaggtgcaagcctccgtgtccatcgacccggcgcacatggacgcattcaaggcctgcatcctcggctagacaaactcaaaaaattagctagtagccacgtccgtacgccgtcgaacttgcatagatccaataaatacaacaagtagcatgagtcatgcaccaattctgtttccattcctgtaatgatcgatcgtttatcgtcgtttcgactatttgggttctagttcaccggatgaattgtcacaagaaagg

SEQ ID NO: 68604 - protein, 455 aa, Triticum aestivum
  peptide (1)..(455): Ceres Seq. ID no. 14303593
  misc_feature (13)..(229): Pfam Name: Transferase family Pfam Description: Transferase family
  misc_feature (25)..(449): Homolog of NCBI NO: 38503267 NR Description: Anthocyanin 5-aromatic acyltransferase (5AT)
  misc_feature (15)..(448): Homolog of NCBI NO: 15230048 NR Description: transferase family [Arabidopsis thaliana]
  misc_feature (13)..(447): Homolog of NCBI NO: 15450469 NR Description: AT5g39050/MXF12_60 [Arabidopsis thaliana]
  misc_feature (105)..(220): Homolog of NCBI NO: 34894314 NR Description: unnamed protein product [Oryza sativa (japonica
  misc_feature (14)..(450): Homolog of NCBI NO: 37534152 NR Description: putative anthocyanin 5-aromatic acyltransferase
  misc_feature (43)..(451): Homolog of NCBI NO: 32488674 NR Description: OSJNBb0003B01.2 [Oryza sativa (japonica
  misc_feature (242)..(454): Homolog of NCBI NO: 34894314 NR Description: unnamed protein product [Oryza sativa (japonica
  misc_feature (10)..(229): Homolog of NCBI NO: 34894314 NR Description: unnamed protein product [Oryza sativa (japonica
  misc_feature (43)..(454): Homolog of NCBI NO: 21741235 NR Description: OSJNBb0034I13.21 [Oryza sativa (japonica
  misc_feature (35)..(451): Homolog of NCBI NO: 40253598 NR Description: putative Anthocyanin 5-aromatic acyltransferase
MGEASSDAAAKAAAVRAVAVSRVAPSVLGEVQRVELSFFDSPWVVLPPIQRVFLYELGDADGFPTVVERLKRALADTLAHYLPLAGMLEYAVETGDAFVDCTHAGVAFLEAEGDMDVQRLAGDEAHDILAFLSLVPELDARVLPAPVLSVQATRLSGGLAVGLSVHHVVADGRAVWRFMEAWSSASREGSPVTKVLGPPHYGREVIQHPNGDELARDMLKTVAPNLPVVRGQYDFSQRFLRARRTFYLGADDIQSLRRRIDDLASDESATGGDAPKPKPVSTFVALAALSWTAFVRSKGLGAGDDTYLMFLADLRSRLDPPVSEAYLGNCVRACLASCADAADLLGQSGILRAARAVQAAVAEMEAAPLSGTDKGWMQMLMRLPFQRMTNVAASPRFRAYEAADFGFGKPARVELVSMNHDGEMVLVGGRRDGEVQASVSIDPAHMDAFKACILG

SEQ ID NO: 68605 - protein, 369 aa, Triticum aestivum
  peptide (1)..(369): Ceres Seq. ID no. 14303594
  misc_feature (1)..(143): Pfam Name: Transferase family Pfam Description: Transferase family
  misc_feature (1)..(363): Homolog of NCBI NO: 38503267 NR Description: Anthocyanin 5-aromatic acyltransferase (5AT)
  misc_feature (1)..(362): Homolog of NCBI NO: 15230048 NR Description: transferase family [Arabidopsis thaliana]
  misc_feature (1)..(361): Homolog of NCBI NO: 15450469 NR Description: AT5g39050/MXF12_60 [Arabidopsis thaliana]
  misc_feature (19)..(134): Homolog of NCBI NO: 34894314 NR Description: unnamed protein product [Oryza sativa (japonica
  misc_feature (1)..(364): Homolog of NCBI NO: 37534152 NR Description: putative anthocyanin 5-aromatic acyltransferase
  misc_feature (1)..(365): Homolog of NCBI NO: 32488674 NR Description: OSJNBb0003B01.2 [Oryza sativa (japonica
  misc_feature (156)..(368): Homolog of NCBI NO: 34894314 NR Description: unnamed protein product [Oryza sativa (japonica
  misc_feature (1)..(143): Homolog of NCBI NO: 34894314 NR Description: unnamed protein product [Oryza sativa (japonica
  misc_feature (1)..(368): Homolog of NCBI NO: 21741235 NR Description: OSJNBb0034I13.21 [Oryza sativa (japonica
  misc_feature (1)..(365): Homolog of NCBI NO: 40253598 NR Description: putative Anthocyanin 5-aromatic acyltransferase
MLEYAVETGDAFVDCTHAGVAFLEAEGDMDVQRLAGDEAHDILAFLSLVPELDARVLPAPVLSVQATRLSGGLAVGLSVHHVVADGRAVWRFMEAWSSASREGSPVTKVLGPPHYGREVIQHPNGDELARDMLKTVAPNLPVVRGQYDFSQRFLRARRTFYLGADDIQSLRRRIDDLASDESATGGDAPKPKPVSTFVALAALSWTAFVRSKGLGAGDDTYLMFLADLRSRLDPPVSEAYLGNCVRACLASCADAADLLGQSGILRAARAVQAAVAEMEAAPLSGTDKGWMQMLMRLPFQRMTNVAASPRFRAYEAADFGFGKPARVELVSMNHDGEMVLVGGRRDGEVQASVSIDPAHMDAFKACILG

SEQ ID NO: 68606 - protein, 341 aa, Triticum aestivum
  peptide (1)..(341): Ceres Seq. ID no. 14303595
  misc_feature (1)..(115): Pfam Name: Transferase family Pfam Description: Transferase family
  misc_feature (1)..(335): Homolog of NCBI NO: 38503267 NR Description: Anthocyanin 5-aromatic acyltransferase (5AT)
  misc_feature (1)..(334): Homolog of NCBI NO: 15230048 NR Description: transferase family [Arabidopsis thaliana]
  misc_feature (1)..(333): Homolog of NCBI NO: 15450469 NR Description: AT5g39050/MXF12_60 [Arabidopsis thaliana]
  misc_feature (1)..(106): Homolog of NCBI NO: 34894314 NR Description: unnamed protein product [Oryza sativa (japonica
  misc_feature (1)..(336): Homolog of NCBI NO: 37534152 NR Description: putative anthocyanin 5-aromatic acyltransferase
  misc_feature (1)..(337): Homolog of NCBI NO: 32488674 NR Description: OSJNBb0003B01.2 [Oryza sativa (japonica
  misc_feature (128)..(340): Homolog of NCBI NO: 34894314 NR Description: unnamed protein product [Oryza sativa (japonica
  misc_feature (1)..(115): Homolog of NCBI NO: 34894314 NR Description: unnamed protein product [Oryza sativa (japonica
  misc_feature (1)..(340): Homolog of NCBI NO: 21741235 NR Description: OSJNBb0034I13.21 [Oryza sativa (japonica
  misc_feature (1)..(337): Homolog of NCBI NO: 40253598 NR Description: putative Anthocyanin 5-aromatic acyltransferase
MDVQRLAGDEAHDILAFLSLVPELDARVLPAPVLSVQATRLSGGLAVGLSVHHVVADGRAVWRFMEAWSSASREGSPVTKVLGPPHYGREVIQHPNGDELARDMLKTVAPNLPVVRGQYDFSQRFLRARRTFYLGADDIQSLRRRIDDLASDESATGGDAPKPKPVSTFVALAALSWTAFVRSKGLGAGDDTYLMFLADLRSRLDPPVSEAYLGNCVRACLASCADAADLLGQSGILRAARAVQAAVAEMEAAPLSGTDKGWMQMLMRLPFQRMTNVAASPRFRAYEAADFGFGKPARVELVSMNHDGEMVLVGGRRDGEVQASVSIDPAHMDAFKACILG

SEQ ID NO: 68607 - DNA, 1287 bp, Triticum aestivum
  misc_feature (1)..(1287): Ceres Seq. ID no. 14302267
accgcggcccaacaatctcaccaaccggagcctagcaaactttcaacacgttggcccgctactcttctcctgtcctgtccaccagccgaaactcagagctccgagctccgcctctgactccacctccggccacggcgggcaccatggcgccaacggtggagatcaggaatctcaccttcacctacccgggaatcgacggcaagccgccgcccggagcaccgcccctcatcgaggacgtctgcttctccctcgaagccggtcagcgctgccttctcgtcggctccaacggcgcaggtaagacaacgatactgaagatactgggcgggaagcacatggtggatccgagcatggttggggtcctgggaaggtcggccttccacgacacggcgcttacctcctccggagacctctgctaccttggcggcgagtggaggcgcgatgttgcctttgccggctaccaggtgaatatacagatggacatttcggcagagaaaatgctatttggtgtcactggcgttgatcctcagagaagagatgagcttatcaagattttggatgttgaccttacctggcggatgcacaaggcatcagatggtcagaggagaagagtccagatttgcatgggacttctcaagccattcaaggttcttcttcttgatgagataacagttgatcttgatgtgttggcaagagcaaatctgttgacatatctaaagaaggaatgtgcggaacaaggtgcaacaattatctatgccacacatatcttcgatggcctggatgactggccaactcacattgtctatgttgctcatgggaagttgcaactagcgctgccattagaaaaggtgaaagaaatgagccagttatcgctcatgagaacagtagagcgctggctgaggaaagagagggacgaagacaggaggaagagaaaggagcggaaggagaaaggcctcccggcattcgacaaggtcattgaggggagcagagtagtgaacaacgggtgggcagcaggaaggctcacttcgacgatagccggggaagataacttttctttcagttcaaacagcgttcttcggtagtaatcccacactgcactttggttcttgagatgatgaataacagtcctatagcaccacactcgagggattttggcggtaacagcaacattcttgcacaaaaggaacagagaatttgacaaaccatgcacccctgctgcatgtatacgacaatgtactctgaatctatgatactgggcgtcgattattattgtttgattttttttctgcg

SEQ ID NO: 68608 - protein, 311 aa, Triticum aestivum
  peptide (1)..(311): Ceres Seq. ID no. 14302268
  misc_feature (41)..(224): Pfam Name: ABC transporter Pfam Description: ABC transporter
  misc_feature (7)..(226): Homolog of NCBI NO: 23483625 NR Description: NBD-like protein [Plasmodium yoelii yoelii]
  misc_feature (91)..(287): Homolog of NCBI NO: 40738662 NR Description: hypothetical protein AN6512.2 [Aspergillus
  misc_feature (5)..(241): Homolog of NCBI NO: 14318491 NR Description: CCR4 associated factor; Caf16p [Saccharomyces
  misc_feature (29)..(270): Homolog of NCBI NO: 32405648 NR Description: hypothetical protein [Neurospora crassa]
  misc_feature (36)..(282): Homolog of NCBI NO: 19115648 NR Description: probable ATP-dependent transporter
  misc_feature (27)..(263): Homolog of NCBI NO: 25406749 NR Description: hypothetical protein [imported] - Arabidopsis
  misc_feature (27)..(263): Homolog of NCBI NO: 18379174 NR Description: ABC transporter family protein [Arabidopsis
  misc_feature (27)..(263): Homolog of NCBI NO: 21592901 NR Description: NBD-like protein [Arabidopsis thaliana]
  misc_feature (27)..(264): Homolog of NCBI NO: 15240093 NR Description: ABC transporter family protein [Arabidopsis
  misc_feature (4)..(311): Homolog of NCBI NO: 15241744 NR Description: ABC transporter family protein [Arabidopsis
MAPTVEIRNLTFTYPGIDGKPPPGAPPLIEDVCFSLEAGQRCLLVGSNGAGKTTILKILGGKHMVDPSMVGVLGRSAFHDTALTSSGDLCYLGGEWRRDVAFAGYQVNIQMDISAEKMLFGVTGVDPQRRDELIKILDVDLTWRMHKASDGQRRRVQICMGLLKPFKVLLLDEITVDLDVLARANLLTYLKKECAEQGATIIYATHIFDGLDDWPTHIVYVAHGKLQLALPLEKVKEMSQLSLMRTVERWLRKERDEDRRKRKERKEKGLPAFDKVIEGSRVVNNGWAAGRLTSTIAGEDNFSFSSNSVLR

SEQ ID NO: 68609 - protein, 248 aa, Triticum aestivum
  peptide (1)..(248): Ceres Seq. ID no. 14302269
  misc_feature (1)..(161): Pfam Name: ABC transporter Pfam Description: ABC transporter
  misc_feature (1)..(163): Homolog of NCBI NO: 23483625 NR Description: NBD-like protein [Plasmodium yoelii yoelii]
  misc_feature (28)..(224): Homolog of NCBI NO: 40738662 NR Description: hypothetical protein AN6512.2 [Aspergillus
  misc_feature (1)..(178): Homolog of NCBI NO: 14318491 NR Description: CCR4 associated factor; Caf16p [Saccharomyces
  misc_feature (1)..(207): Homolog of NCBI NO: 32405648 NR Description: hypothetical protein [Neurospora crassa]
  misc_feature (1)..(219): Homolog of NCBI NO: 19115648 NR Description: probable ATP-dependent transporter
  misc_feature (1)..(200): Homolog of NCBI NO: 25406749 NR Description: hypothetical protein [imported] - Arabidopsis
  misc_feature (1)..(200): Homolog of NCBI NO: 18379174 NR Description: ABC transporter family protein [Arabidopsis
  misc_feature (1)..(200): Homolog of NCBI NO: 21592901 NR Description: NBD-like protein [Arabidopsis thaliana]
  misc_feature (1)..(201): Homolog of NCBI NO: 15240093 NR Description: ABC transporter family protein [Arabidopsis
  misc_feature (1)..(248): Homolog of NCBI NO: 15241744 NR Description: ABC transporter family protein [Arabidopsis
MVDPSMVGVLGRSAFHDTALTSSGDLCYLGGEWRRDVAFAGYQVNIQMDISAEKMLFGVTGVDPQRRDELIKILDVDLTWRMHKASDGQRRRVQICMGLLKPFKVLLLDEITVDLDVLARANLLTYLKKECAEQGATIIYATHIFDGLDDWPTHIVYVAHGKLQLALPLEKVKEMSQLSLMRTVERWLRKERDEDRRKRKERKEKGLPAFDKVIEGSRVVNNGWAAGRLTSTIAGEDNFSFSSNSVLR

SEQ ID NO: 68610 - protein, 243 aa, Triticum aestivum
  peptide (1)..(243): Ceres Seq. ID no. 14302270
  misc_feature (1)..(156): Pfam Name: ABC transporter Pfam Description: ABC transporter
  misc_feature (1)..(158): Homolog of NCBI NO: 23483625 NR Description: NBD-like protein [Plasmodium yoelii yoelii]
  misc_feature (23)..(219): Homolog of NCBI NO: 40738662 NR Description: hypothetical protein AN6512.2 [Aspergillus
  misc_feature (1)..(173): Homolog of NCBI NO: 14318491 NR Description: CCR4 associated factor; Caf16p [Saccharomyces
  misc_feature (1)..(202): Homolog of NCBI NO: 32405648 NR Description: hypothetical protein [Neurospora crassa]
  misc_feature (1)..(214): Homolog of NCBI NO: 19115648 NR Description: probable ATP-dependent transporter
  misc_feature (1)..(195): Homolog of NCBI NO: 25406749 NR Description: hypothetical protein [imported] - Arabidopsis
  misc_feature (1)..(195): Homolog of NCBI NO: 18379174 NR Description: ABC transporter family protein [Arabidopsis
  misc_feature (1)..(195): Homolog of NCBI NO: 21592901 NR Description: NBD-like protein [Arabidopsis thaliana]
  misc_feature (1)..(196): Homolog of NCBI NO: 15240093 NR Description: ABC transporter family protein [Arabidopsis
  misc_feature (1)..(243): Homolog of NCBI NO: 15241744 NR Description: ABC transporter family protein [Arabidopsis
MVGVLGRSAFHDTALTSSGDLCYLGGEWRRDVAFAGYQVNIQMDISAEKMLFGVTGVDPQRRDELIKILDVDLTWRMHKASDGQRRRVQICMGLLKPFKVLLLDEITVDLDVLARANLLTYLKKECAEQGATIIYATHIFDGLDDWPTHIVYVAHGKLQLALPLEKVKEMSQLSLMRTVERWLRKERDEDRRKRKERKEKGLPAFDKVIEGSRVVNNGWAAGRLTSTIAGEDNFSFSSNSVLR

SEQ ID NO: 68611 - DNA, 1888 bp, Triticum aestivum
  misc_feature (1)..(1888): Ceres Seq. ID no. 13596398
actctcctctgcacatctctcctccccccctcccccacgacgcggcaaaaacagggaggagagagggcgagagagggagcccgagcccgaatccctgcgatccccccctcccggtcggaggatccggcgatcagccatgaacgagaaggcctccgtctccaaggagctcaacgccaggcacaagaagatattggaaggccttctgcggttgccggagaacagagaatgtgcagactgcaagtcaaagggtcctcgatgggcaagtgtcaatcttgggatcttcgtatgcatgcagtgttctggaattcatagaagccttggggtacacatatcaaaggtaaggtctgctactctggatacatggttgccagagcaagttgcatttattcaatcaatgggaaatgaaaaggcaaatggctattgggaagcagagctgccccctaattatgacagggttgggatagagaacttcatccgtgcaaaatacgaggacaagaggtggataccgaggaatggaacatcaaaactgccctctagtgctcgagatgagaagagctctgaatctcaggccagtcatgctaacaggggtgggcacgctcaaaaaccttcatttgagcaacatcgtgtttcaccagctgctacgaaaagaactgttccagtggcttctaggatgcacacgcaggcatcacctcagccaaaagcagaactaccagttcccaaggttgcttcgcctcctcagccagcaaaatctcctgctaaagttgatgtgacacccccaaaagttcatcagccatcggttgcaccccctcctaaagttgactatgccattgacctctttaacatgttatcgatggacggaacaactgagaaagaaccagtgtcatcttccaatgatgataatgcttgggatggcttccagtctgcagaaccagcacctaactccgagaaaaaggatactgctaagccagtagaaagtaaggcccagtctacatcgggaatcgaagacttatttaaagactcgccagctgtggcagcgtcttcagctccagttgcttccaaatcaaacccacagacagatatcatgagtctgtttgagaagtcgaatatggtatcaccatttgctatccatcagcagcagcttgcttttatgacccagcaacaagctttactgatggctgctcttaaatctggaaatgcaccccaaatggttcctgggaatgcaccccaaatggttcccgggaatgctagtgtgctaaatgctaatggttctaatgcccctaatggaagcttgccttcccatagctggccaaatctaggttatcagaaccctgcatctattccagcagcagcaccacaaaatggtgtcgccaaggctgggaacaacaatcaggacttcttttctggtaacttcggttttggttcgccgggcaagccagcaaatggggccacaaccgcaggtgctaacaagagcgcatccacccctacctcttctaccctgccctctcaatcaggcaaagagtacgatttttcctcattaacgcaaggaatgttctcgaagcgatgagtggcttgcaatacttggaaatggatgaggcctccattgggcgcagatttagggagaagttggggggaagcttgtacactgttttaccgaggcagctttgccaattgtggatacatagttacatcaccttgtgggccaacaagtgcggatatggcagaaaactgctcatgttgtttcctacagctgaatagtcgcattgttacagtgatgccaaagaacttcaaacagaggattccccttttctcttgttcagggtgtagttgcaataccatatgtcgattactttgtattgtacgccaataattttattccgttgtgttccat

SEQ ID NO: 68612 - protein, 520 aa, Triticum aestivum
  peptide (1)..(520): Ceres Seq. ID no. 15221860
  misc_feature (53)..(498): Homolog of NCBI NO: 16303736 NR Description: stromal membrane-associated protein SMAP1A [Homo
  misc_feature (53)..(474): Homolog of NCBI NO: 24651922 NR Description: CG8243-PA [Drosophila melanogaster]
  misc_feature (53)..(498): Homolog of NCBI NO: 23273590 NR Description: Similar to stromal membrane-associated protein
  misc_feature (53)..(269): Homolog of NCBI NO: 28077013 NR Description: stromal membrane-associated protein [Mus
  misc_feature (46)..(162): Homolog of NCBI NO: 15229090 NR Description: ARF GTPase-activating domain-containing protein
  misc_feature (46)..(177): Homolog of NCBI NO: 9294154 NR Description: emb|CAB07858.1~gene_id:MKP6.22~similar to unknown
  misc_feature (52)..(519): Homolog of NCBI NO: 10441352 NR Description: ARF GAP-like zinc finger-containing protein ZIGA3
  misc_feature (46)..(519): Homolog of NCBI NO: 21618169 NR Description: ARF GAP-like zinc finger-containing protein ZIGA3
  misc_feature (46)..(519): Homolog of NCBI NO: 18423615 NR Description: ARF GAP-like zinc finger-containing protein
  misc_feature (46)..(520): Homolog of NCBI NO: 34898734 NR Description: contains ESTs
LSSAHLSSPPPPRRGKNREERGREREPEPESLRSPPPGRRIRRSAMNEKASVSKELNARHKKILEGLLRLPENRECADCKSKGPRWASVNLGIFVCMQCSGIHRSLGVHISKVRSATLDTWLPEQVAFIQSMGNEKANGYWEAELPPNYDRVGIENFIRAKYEDKRWIPRNGTSKLPSSARDEKSSESQASHANRGGHAQKPSFEQHRVSPAATKRTVPVASRMHTQASPQPKAELPVPKVASPPQPAKSPAKVDVTPPKVHQPSVAPPPKVDYAIDLFNMLSMDGTTEKEPVSSSNDDNAWDGFQSAEPAPNSEKKDTAKPVESKAQSTSGIEDLFKDSPAVAASSAPVASKSNPQTDIMSLFEKSNMVSPFAIHQQQLAFMTQQQALLMAALKSGNAPQMVPGNAPQMVPGNASVLNANGSNAPNGSLPSHSWPNLGYQNPASIPAAAPQNGVAKAGNNNQDFFSGNFGFGSPGKPANGATTAGANKSASTPTSSTLPSQSGKEYDFSSLTQGMFSKR

SEQ ID NO: 68613 - protein, 475 aa, Triticum aestivum
  peptide (1)..(475): Ceres Seq. ID no. 15221861
  misc_feature (8)..(453): Homolog of NCBI NO: 16303736 NR Description: stromal membrane-associated protein SMAP1A [Homo
  misc_feature (8)..(429): Homolog of NCBI NO: 24651922 NR Description: CG8243-PA [Drosophila melanogaster]
  misc_feature (8)..(453): Homolog of NCBI NO: 23273590 NR Description: Similar to stromal membrane-associated protein
  misc_feature (8)..(224): Homolog of NCBI NO: 28077013 NR Description: stromal membrane-associated protein [Mus
  misc_feature (1)..(117): Homolog of NCBI NO: 15229090 NR Description: ARF GTPase-activating domain-containing protein
  misc_feature (1)..(132): Homolog of NCBI NO: 9294154 NR Description: emb|CAB07858.1~gene_id:MKP6.22~similar to unknown
  misc_feature (7)..(474): Homolog of NCBI NO: 10441352 NR Description: ARF GAP-like zinc finger-containing protein ZIGA3
  misc_feature (1)..(474): Homolog of NCBI NO: 21618169 NR Description: ARF GAP-like zinc finger-containing protein ZIGA3
  misc_feature (1)..(474): Homolog of NCBI NO: 18423615 NR Description: ARF GAP-like zinc finger-containing protein
  misc_feature (1)..(475): Homolog of NCBI NO: 34898734 NR Description: contains ESTs
MNEKASVSKELNARHKKILEGLLRLPENRECADCKSKGPRWASVNLGIFVCMQCSGIHRSLGVHISKVRSATLDTWLPEQVAFIQSMGNEKANGYWEAELPPNYDRVGIENFIRAKYEDKRWIPRNGTSKLPSSARDEKSSESQASHANRGGHAQKPSFEQHRVSPAATKRTVPVASRMHTQASPQPKAELPVPKVASPPQPAKSPAKVDVTPPKVHQPSVAPPPKVDYAIDLFNMLSMDGTTEKEPVSSSNDDNAWDGFQSAEPAPNSEKKDTAKPVESKAQSTSGIEDLFKDSPAVAASSAPVASKSNPQTDIMSLFEKSNMVSPFAIHQQQLAFMTQQQALLMAALKSGNAPQMVPGNAPQMVPGNASVLNANGSNAPNGSLPSHSWPNLGYQNPASIPAAAPQNGVAKAGNNNQDFFSGNFGFGSPGKPANGATTAGANKSASTPTSSTLPSQSGKEYDFSSLTQGMFSKR

SEQ ID NO: 68614 - protein, 424 aa, Triticum aestivum
  peptide (1)..(424): Ceres Seq. ID no. 15221862
  misc_feature (1)..(402): Homolog of NCBI NO: 16303736 NR Description: stromal membrane-associated protein SMAP1A [Homo
  misc_feature (1)..(378): Homolog of NCBI NO: 24651922 NR Description: CG8243-PA [Drosophila melanogaster]
  misc_feature (1)..(402): Homolog of NCBI NO: 23273590 NR Description: Similar to stromal membrane-associated protein
  misc_feature (1)..(173): Homolog of NCBI NO: 28077013 NR Description: stromal membrane-associated protein [Mus
  misc_feature (1)..(66): Homolog of NCBI NO: 15229090 NR Description: ARF GTPase-activating domain-containing protein
  misc_feature (1)..(81): Homolog of NCBI NO: 9294154 NR Description: emb|CAB07858.1~gene_id:MKP6.22~similar to unknown
  misc_feature (1)..(423): Homolog of NCBI NO: 10441352 NR Description: ARF GAP-like zinc finger-containing protein ZIGA3
  misc_feature (1)..(423): Homolog of NCBI NO: 21618169 NR Description: ARF GAP-like zinc finger-containing protein ZIGA3
  misc_feature (1)..(423): Homolog of NCBI NO: 18423615 NR Description: ARF GAP-like zinc finger-containing protein
  misc_feature (1)..(424): Homolog of NCBI NO: 34898734 NR Description: contains ESTs
MQCSGIHRSLGVHISKVRSATLDTWLPEQVAFIQSMGNEKANGYWEAELPPNYDRVGIENFIRAKYEDKRWIPRNGTSKLPSSARDEKSSESQASHANRGGHAQKPSFEQHRVSPAATKRTVPVASRMHTQASPQPKAELPVPKVASPPQPAKSPAKVDVTPPKVHQPSVAPPPKVDYAIDLFNMLSMDGTTEKEPVSSSNDDNAWDGFQSAEPAPNSEKKDTAKPVESKAQSTSGIEDLFKDSPAVAASSAPVASKSNPQTDIMSLFEKSNMVSPFAIHQQQLAFMTQQQALLMAALKSGNAPQMVPGNAPQMVPGNASVLNANGSNAPNGSLPSHSWPNLGYQNPASIPAAAPQNGVAKAGNNNQDFFSGNFGFGSPGKPANGATTAGANKSASTPTSSTLPSQSGKEYDFSSLTQGMFSKR

SEQ ID NO: 68615 - DNA, 1092 bp, Triticum aestivum
  misc_feature (1)..(1092): Ceres Seq. ID no. 13654590
ggacgaccccgacgcgccaccacctgctcctcccggcggctgcctgctcgactcgattccccaaccgcagcagggtcaacgacagaacctatcgcgcgatgggcttgggactgagattgccgttcttcctactcctcttgctgctggtcagcctgggagccgcacaaggccggagcacagtttttcttgatatccaggaggaggctcgaggctctggtcaaatcatcaaggatcaactaactttgagcaaaattcccgtgcgtgttgagaggggcagcccactatgcccagcttgtgagaagtttacagaggaagctcttagctatcttagtcagaaacaatcacaagataagatgatggaggtccttcatgaagcttgttctcagacattctcgttggaaaagaagtgtgttgagtttgtggactcctatgcaactctcttatttgccaagatcgctgagatcaagccagaagagttctgcaaacgaaatggcctctgcagggacaatgctcttctgtctggtgtgagaagtgagagcacatgcgtgttttgccaccacctcatggatgaagttttgtccaaactgaaggatcctgatgctgagtttgagataattcaaattctcctcaaggagtgcaagaagatcgaaggtcatgaacagcagtgcaaacgactggtcctgcaatacatccctctcatcctggtgaacggagagaagttcctcgagaagaacgatatatgtaccattgtccaagcgtgcgatgctggcaaaaagacaatggtcgggccattctccgaggagggtttgttgcgtgatgcatgaaggtagaaagaccacaccaggctgcgtaaacccagacgaaacattatgcactagttcttccttgttgtacataggtgtccaaaaattcgtctggcttttgccttgtactgctgctcctgcattctgtggatgctttgtattataaagggagcggcatgacaaacagtttattatgtcaacttgaagccgtgttgtacttattacttcgtcagtgtttaatttgtaatgacatttgaacaactgtagatactaaatcgagtttcagtcg

SEQ ID NO: 68616 - protein, 273 aa, Triticum aestivum
  peptide (1)..(273): Ceres Seq. ID no. 13654591
  misc_feature (219)..(253): Pfam Name: Saposin-like type B, region 2 Pfam Description: Saposin-like type B, region 2
  misc_feature (94)..(253): Homolog of NCBI NO: 15241065 NR Description: expressed protein [Arabidopsis thaliana]
  misc_feature (98)..(253): Homolog of NCBI NO: 6942199 NR Description: putative protein [Vitis riparia]
  misc_feature (82)..(263): Homolog of NCBI NO: 15231028 NR Description: expressed protein [Arabidopsis thaliana]
  misc_feature (94)..(256): Homolog of NCBI NO: 34896130 NR Description: P0701D05.19 [Oryza sativa (japonica
TTPTRHHLLLPAAACSTRFPNRSRVNDRTYRAMGLGLRLPFFLLLLLLVSLGAAQGRSTVFLDIQEEARGSGQIIKDQLTLSKIPVRVERGSPLCPACEKFTEEALSYLSQKQSQDKMMEVLHEACSQTFSLEKKCVEFVDSYATLLFAKIAEIKPEEFCKRNGLCRDNALLSGVRSESTCVFCHHLMDEVLSKLKDPDAEFEIIQILLKECKKIEGHEQQCKRLVLQYIPLILVNGEKFLEKNDICTIVQACDAGKKTMVGPFSEEGLLRDA

SEQ ID NO: 68617 - protein, 241 aa, Triticum aestivum
  peptide (1)..(241): Ceres Seq. ID no. 13654592
  misc_feature (187)..(221): Pfam Name: Saposin-like type B, region 2 Pfam Description: Saposin-like type B, region 2
  misc_feature (62)..(221): Homolog of NCBI NO: 15241065 NR Description: expressed protein [Arabidopsis thaliana]
  misc_feature (66)..(221): Homolog of NCBI NO: 6942199 NR Description: putative protein [Vitis riparia]
  misc_feature (50)..(231): Homolog of NCBI NO: 15231028 NR Description: expressed protein [Arabidopsis thaliana]
  misc_feature (62)..(224): Homolog of NCBI NO: 34896130 NR Description: P0701D05.19 [Oryza sativa (japonica
MGLGLRLPFFLLLLLLVSLGAAQGRSTVFLDIQEEARGSGQIIKDQLTLSKIPVRVERGSPLCPACEKFTEEALSYLSQKQSQDKMMEVLHEACSQTFSLEKKCVEFVDSYATLLFAKIAEIKPEEFCKRNGLCRDNALLSGVRSESTCVFCHHLMDEVLSKLKDPDAEFEIIQILLKECKKIEGHEQQCKRLVLQYIPLILVNGEKFLEKNDICTIVQACDAGKKTMVGPFSEEGLLRDA

SEQ ID NO: 68618 - protein, 156 aa, Triticum aestivum
  peptide (1)..(156): Ceres Seq. ID no. 13654593
  misc_feature (102)..(136): Pfam Name: Saposin-like type B, region 2 Pfam Description: Saposin-like type B, region 2
  misc_feature (1)..(136): Homolog of NCBI NO: 15241065 NR Description: expressed protein [Arabidopsis thaliana]
  misc_feature (1)..(136): Homolog of NCBI NO: 6942199 NR Description: putative protein [Vitis riparia]
  misc_feature (1)..(146): Homolog of NCBI NO: 15231028 NR Description: expressed protein [Arabidopsis thaliana]
  misc_feature (1)..(139): Homolog of NCBI NO: 34896130 NR Description: P0701D05.19 [Oryza sativa (japonica
MMEVLHEACSQTFSLEKKCVEFVDSYATLLFAKIAEIKPEEFCKRNGLCRDNALLSGVRSESTCVFCHHLMDEVLSKLKDPDAEFEIIQILLKECKKIEGHEQQCKRLVLQYIPLILVNGEKFLEKNDICTIVQACDAGKKTMVGPFSEEGLLRDA

SEQ ID NO: 68619 - DNA, 1198 bp, Triticum aestivum
  misc_feature (1)..(1198): Ceres Seq. ID no. 13596109
aaagaaaaagtccacgccacctcactgcagggcacgccgtcgcgcggagccagccagggcggtcgccgccggccgcgaccatggccgacggcaagcgcagcgtcgcggagaccttctccagactccgggagcgcggcaagacggcattcatcccattcatcaccgccggtgaccctgatttggcgaccacatcaaaggcgcttaggatcctagactcctgcggctcaaacgtgatcgagctcggcgtgccctactcggatccgttagctgatggtccagtcattcaggctgcagcatcccgtgcgcttaagaaaggcactaagctcggttctgtcttggcgatgctcacggaggttataccagagctctcttgtccaatagttctcttcacatactacaacccgattctaaaaaatggggtgcgaaacttcatggctaagattaagcaagctggtgtacatggtcttgtcgtacctgatcttcctttggaggagacaacattgttgaggagcgaggccactatgcataacatagagctggtgctacttacaacaccaaccacaccaacagagaggatgaaggaaatcacaaaagcttcagaaggattcgtttatcttgtgagtgctgtcggagttacaggtgcacgctcaaatgtaaacttacgcgttgagcatcttcttaaggagatcaagcaggttacagacaaacctgtggctgttggctttggcatatcaactccagagcatgcgaagcagattgcgggctggggagcggatggtgtgattattggcagtgcgattgttagacagttgggcgaagccgcttctccggaagaaggactgagaagaatagaagagtacgccaagagcatcaaggcggctattccatgagatgggcagttccatcatgaacaagccaattagtagatcgtaagcatgtcgtttatcatctggtagtctgcttgatggacctggaatctgtagttcgtctggcatatttgattccagtgctcaaaacaattatatctttgtgtgttagaatcacaacatgaattaacaaggtaatctggaaatggtacgaagctcgatttctgttgtgaggaaacattgtgagatgtagtgttcttatgtggaaatatggaatgttagaatttggaaggacttgtcctgagaggagcaacaggataagtccatggtgc

SEQ ID NO: 68620 - protein, 295 aa, Triticum aestivum
  peptide (1)..(295): Ceres Seq. ID no. 15221777
  misc_feature (38)..(295): Pfam Name: Tryptophan synthase alpha chain Pfam Description: Tryptophan synthase alpha chain
  misc_feature (1)..(295): Homolog of NCBI NO: 34897216 NR Description: putative indole-3-glycerol phosphate lyase
  misc_feature (5)..(295): Homolog of NCBI NO: 34897218 NR Description: putative indole-3-glycerol phosphate lyase
  misc_feature (1)..(295): Homolog of NCBI NO: 11993325 NR Description: indole-3-glycerol phosphate lyase [Zea mays]
  misc_feature (1)..(295): Homolog of NCBI NO: 34897212 NR Description: putative indole-3-glycerol phosphate lyase
  misc_feature (34)..(294): Homolog of NCBI NO: 15235430 NR Description: tryptophan synthase, alpha subunit (TSA1),
  misc_feature (20)..(294): Homolog of NCBI NO: 18410104 NR Description: tryptophan synthase, alpha subunit (TSA1)
  misc_feature (20)..(294): Homolog of NCBI NO: 21593559 NR Description: tryptophan synthase alpha chain [Arabidopsis
  misc_feature (24)..(295): Homolog of NCBI NO: 34393530 NR Description: putative tryptophan synthase alpha chain
  misc_feature (28)..(295): Homolog of NCBI NO: 11993328 NR Description: putative tryptophan synthase alpha [Zea mays]
  misc_feature (30)..(295): Homolog of NCBI NO: 34897224 NR Description: putative indole-3-glycerol phosphate lyase
RKSPRHLTAGHAVARSQPGRSPPAATMADGKRSVAETFSRLRERGKTAFIPFITAGDPDLATTSKALRILDSCGSNVIELGVPYSDPLADGPVIQAAASRALKKGTKLGSVLAMLTEVIPELSCPIVLFTYYNPILKNGVRNFMAKIKQAGVHGLVVPDLPLEETTLLRSEATMHNIELVLLTTPTTPTERMKEITKASEGFVYLVSAVGVTGARSNVNLRVEHLLKEIKQVTDKPVAVGFGISTPEHAKQIAGWGADGVIIGSAIVRQLGEAASPEEGLRRIEEYAKSIKAAIP

SEQ ID NO: 68621 - protein, 269 aa, Triticum aestivum
  peptide (1)..(269): Ceres Seq. ID no. 15221778
  misc_feature (12)..(269): Pfam Name: Tryptophan synthase alpha chain Pfam Description: Tryptophan synthase alpha chain
  misc_feature (1)..(269): Homolog of NCBI NO: 34897216 NR Description: putative indole-3-glycerol phosphate lyase
  misc_feature (1)..(269): Homolog of NCBI NO: 34897218 NR Description: putative indole-3-glycerol phosphate lyase
  misc_feature (1)..(269): Homolog of NCBI NO: 11993325 NR Description: indole-3-glycerol phosphate lyase [Zea mays]
  misc_feature (1)..(269): Homolog of NCBI NO: 34897212 NR Description: putative indole-3-glycerol phosphate lyase
  misc_feature (8)..(268): Homolog of NCBI NO: 15235430 NR Description: tryptophan synthase, alpha subunit (TSA1),
  misc_feature (1)..(268): Homolog of NCBI NO: 18410104 NR Description: tryptophan synthase, alpha subunit (TSA1)
  misc_feature (1)..(268): Homolog of NCBI NO: 21593559 NR Description: tryptophan synthase alpha chain [Arabidopsis
  misc_feature (1)..(269): Homolog of NCBI NO: 34393530 NR Description: putative tryptophan synthase alpha chain
  misc_feature (2)..(269): Homolog of NCBI NO: 11993328 NR Description: putative tryptophan synthase alpha [Zea mays]
  misc_feature (4)..(269): Homolog of NCBI NO: 34897224 NR Description: putative indole-3-glycerol phosphate lyase
MADGKRSVAETFSRLRERGKTAFIPFITAGDPDLATTSKALRILDSCGSNVIELGVPYSDPLADGPVIQAAASRALKKGTKLGSVLAMLTEVIPELSCPIVLFTYYNPILKNGVRNFMAKIKQAGVHGLVVPDLPLEETTLLRSEATMHNIELVLLTTPTTPTERMKEITKASEGFVYLVSAVGVTGARSNVNLRVEHLLKEIKQVTDKPVAVGFGISTPEHAKQIAGWGADGVIIGSAIVRQLGEAASPEEGLRRIEEYAKSIKAAIP

SEQ ID NO: 68622 - protein, 182 aa, Triticum aestivum
  peptide (1)..(182): Ceres Seq. ID no. 15221779
  misc_feature (1)..(182): Pfam Name: Tryptophan synthase alpha chain Pfam Description: Tryptophan synthase alpha chain
  misc_feature (1)..(182): Homolog of NCBI NO: 34897216 NR Description: putative indole-3-glycerol phosphate lyase
  misc_feature (1)..(182): Homolog of NCBI NO: 34897218 NR Description: putative indole-3-glycerol phosphate lyase
  misc_feature (1)..(182): Homolog of NCBI NO: 11993325 NR Description: indole-3-glycerol phosphate lyase [Zea mays]
  misc_feature (1)..(182): Homolog of NCBI NO: 34897212 NR Description: putative indole-3-glycerol phosphate lyase
  misc_feature (1)..(181): Homolog of NCBI NO: 15235430 NR Description: tryptophan synthase, alpha subunit (TSA1),
  misc_feature (1)..(181): Homolog of NCBI NO: 18410104 NR Description: tryptophan synthase, alpha subunit (TSA1)
  misc_feature (1)..(181): Homolog of NCBI NO: 21593559 NR Description: tryptophan synthase alpha chain [Arabidopsis
  misc_feature (1)..(182): Homolog of NCBI NO: 34393530 NR Description: putative tryptophan synthase alpha chain
  misc_feature (1)..(182): Homolog of NCBI NO: 11993328 NR Description: putative tryptophan synthase alpha [Zea mays]
  misc_feature (1)..(182): Homolog of NCBI NO: 34897224 NR Description: putative indole-3-glycerol phosphate lyase
MLTEVIPELSCPIVLFTYYNPILKNGVRNFMAKIKQAGVHGLVVPDLPLEETTLLRSEATMHNIELVLLTTPTTPTERMKEITKASEGFVYLVSAVGVTGARSNVNLRVEHLLKEIKQVTDKPVAVGFGISTPEHAKQIAGWGADGVIIGSAIVRQLGEAASPEEGLRRIEEYAKSIKAAIP

SEQ ID NO: 68623 - DNA, 1353 bp, Triticum aestivum
  misc_feature (1)..(1353): Ceres Seq. ID no. 13596492
attcgaaaaccttcctcgcgaaaccccagccccgctcctccgctccaccccccacctcccctggtccctcgcgagagcaggtccgggtcgcgtctccggcggcggagaagcaagacaagggcggcggagatgtcggtcagcaacatagggatgatggacggcgcctacttcgtggggcggaacgagatcctcgcctggatcaacactaccctgcagctcggcctcgccaaggtcgaggaggcggcgtcgggcgcggtggcgtcccagctcatggacgcggcgcaccccggggcggtgcccatgcacaaggtcaacttcgacgccaagaacgagtacgacatgatccagaactacaaggtcctgcaggatgtgttcaacaagctgaagatcaccaagcacattgaggttaataagctcatcaaaggaaggcccctagacaacctggagttcatgcagtggatgaaaagatactgtgattctgttaatggtggattcatgaccagctacaatgcttccgagagaagagaaagcagcaagggtgggaaagacaccaacagaaggacatcagggacttcccaggcgcctgccaagtctgcatccgccacccacaaagctcagcctccgtcgcacgcagctaagcgggccaacgggcatgcttcaaatgctccacagcggtgcgcaaagccgcctccagcttatgatgcacagatgaccgagctgaaactccttgttgatagcgccgagaaagagagagatttctatttctctaagctgcgggacgttgagatcttgtgccagagccccgaggttgagcatttaccgattgcgaaggctatccagaagatactctatgcttcggaggacgacccctcgacggtggcggaagcccaggcagagatggtggcgcagcagaaccagatgcagcagcagccaatgctgagccccatcctggaggcgtccgaggccccaagcatcacccccaaggattcttccgaggagagcttgaggcaggaagcagcggcagcacacaagaggaagagcatctcggacctggaggagttcgagatggggtcgagctccaggatgaggctctcagacgtctcggacgtgcagctgtgcggctcaccgttgatgagcttcacctgaaagaaaggagggaccgaattgcaggggctgagttgatgtcattgccggttatgacttgtgggtttatcttgtgttgtttcgtttgttgtttggtgtcataatgtgtgtgctcttgtggagctggagttgaacctgcctttgactgtgatcgatctgccacagcatttgtggccttctgcaacatgttattattgaatagcctctttt

SEQ ID NO: 68624 - protein, 381 aa, Triticum aestivum
  peptide (1)..(381): Ceres Seq. ID no. 13596493
  misc_feature (59)..(159): Pfam Name: Calponin homology (CH) domain Pfam Description: Calponin homology (CH) domain
  misc_feature (58)..(306): Homolog of NCBI NO: 12751131 NR Description: EBF3-S [Homo sapiens]
  misc_feature (236)..(369): Homolog of NCBI NO: 17976864 NR Description: microtubule-associated protein EB1 [Dictyostelium
  misc_feature (59)..(232): Homolog of NCBI NO: 17976864 NR Description: microtubule-associated protein EB1 [Dictyostelium
  misc_feature (47)..(217): Homolog of NCBI NO: 26450360 NR Description: putative microtubule-associated protein EB1
  misc_feature (47)..(304): Homolog of NCBI NO: 29124955 NR Description: microtubule-associated protein EB1 [Chlamydomonas
  misc_feature (47)..(342): Homolog of NCBI NO: 15241860 NR Description: microtubule-associated protein EB1-related
  misc_feature (47)..(297): Homolog of NCBI NO: 32815913 NR Description: At3g47690 [Arabidopsis thaliana]
  misc_feature (41)..(307): Homolog of NCBI NO: 38344911 NR Description: OSJNBb0079B02.14 [Oryza sativa (japonica
  misc_feature (47)..(379): Homolog of NCBI NO: 15240262 NR Description: expressed protein [Arabidopsis thaliana]
  misc_feature (44)..(381): Homolog of NCBI NO: 37535740 NR Description: putative microtubule-associated protein
IRKPSSRNPSPAPPLHPPPPLVPRESRSGSRLRRRRSKTRAAEMSVSNIGMMDGAYFVGRNEILAWINTTLQLGLAKVEEAASGAVASQLMDAAHPGAVPMHKVNFDAKNEYDMIQNYKVLQDVFNKLKITKHIEVNKLIKGRPLDNLEFMQWMKRYCDSVNGGFMTSYNASERRESSKGGKDTNRRTSGTSQAPAKSASATHKAQPPSHAAKRANGHASNAPQRCAKPPPAYDAQMTELKLLVDSAEKERDFYFSKLRDVEILCQSPEVEHLPIAKAIQKILYASEDDPSTVAEAQAEMVAQQNQMQQQPMLSPILEASEAPSITPKDSSEESLRQEAAAAHKRKSISDLEEFEMGSSSRMRLSDVSDVQLCGSPLMSFT

SEQ ID NO: 68625 - protein, 338 aa, Triticum aestivum
  peptide (1)..(338): Ceres Seq. ID no. 13596494
  misc_feature (16)..(116): Pfam Name: Calponin homology (CH) domain Pfam Description: Calponin homology (CH) domain
  misc_feature (15)..(263): Homolog of NCBI NO: 12751131 NR Description: EBF3-S [Homo sapiens]
  misc_feature (193)..(326): Homolog of NCBI NO: 17976864 NR Description: microtubule-associated protein EB1 [Dictyostelium
  misc_feature (16)..(189): Homolog of NCBI NO: 17976864 NR Description: microtubule-associated protein EB1 [Dictyostelium
  misc_feature (4)..(174): Homolog of NCBI NO: 26450360 NR Description: putative microtubule-associated protein EB1
  misc_feature (4)..(261): Homolog of NCBI NO: 29124955 NR Description: microtubule-associated protein EB1 [Chlamydomonas
  misc_feature (4)..(299): Homolog of NCBI NO: 15241860 NR Description: microtubule-associated protein EB1-related
  misc_feature (4)..(254): Homolog of NCBI NO: 32815913 NR Description: At3g47690 [Arabidopsis thaliana]
  misc_feature (1)..(264): Homolog of NCBI NO: 38344911 NR Description: OSJNBb0079B02.14 [Oryza sativa (japonica
  misc_feature (4)..(336): Homolog of NCBI NO: 15240262 NR Description: expressed protein [Arabidopsis thaliana]
  misc_feature (1)..(338): Homolog of NCBI NO: 37535740 NR Description: putative microtubule-associated protein
MSVSNIGMMDGAYFVGRNEILAWINTTLQLGLAKVEEAASGAVASQLMDAAHPGAVPMHKVNFDAKNEYDMIQNYKVLQDVFNKLKITKHIEVNKLIKGRPLDNLEFMQWMKRYCDSVNGGFMTSYNASERRESSKGGKDTNRRTSGTSQAPAKSASATHKAQPPSHAAKRANGHASNAPQRCAKPPPAYDAQMTELKLLVDSAEKERDFYFSKLRDVEILCQSPEVEHLPIAKAIQKILYASEDDPSTVAEAQAEMVAQQNQMQQQPMLSPILEASEAPSITPKDSSEESLRQEAAAAHKRKSISDLEEFEMGSSSRMRLSDVSDVQLCGSPLMSFT

SEQ ID NO: 68626 - protein, 331 aa, Triticum aestivum
  peptide (1)..(331): Ceres Seq. ID no. 13596495
  misc_feature (9)..(109): Pfam Name: Calponin homology (CH) domain Pfam Description: Calponin homology (CH) domain
  misc_feature (8)..(256): Homolog of NCBI NO: 12751131 NR Description: EBF3-S [Homo sapiens]
  misc_feature (186)..(319): Homolog of NCBI NO: 17976864 NR Description: microtubule-associated protein EB1 [Dictyostelium
  misc_feature (9)..(182): Homolog of NCBI NO: 17976864 NR Description: microtubule-associated protein EB1 [Dictyostelium
  misc_feature (1)..(167): Homolog of NCBI NO: 26450360 NR Description: putative microtubule-associated protein EB1
  misc_feature (1)..(254): Homolog of NCBI NO: 29124955 NR Description: microtubule-associated protein EB1 [Chlamydomonas
  misc_feature (1)..(292): Homolog of NCBI NO: 15241860 NR Description: microtubule-associated protein EB1-related
  misc_feature (1)..(247): Homolog of NCBI NO: 32815913 NR Description: At3g47690 [Arabidopsis thaliana]
  misc_feature (1)..(257): Homolog of NCBI NO: 38344911 NR Description: OSJNBb0079B02.14 [Oryza sativa (japonica
  misc_feature (1)..(329): Homolog of NCBI NO: 15240262 NR Description: expressed protein [Arabidopsis thaliana]
  misc_feature (1)..(331): Homolog of NCBI NO: 37535740 NR Description: putative microtubule-associated protein
MMDGAYFVGRNEILAWINTTLQLGLAKVEEAASGAVASQLMDAAHPGAVPMHKVNFDAKNEYDMIQNYKVLQDVFNKLKITKHIEVNKLIKGRPLDNLEFMQWMKRYCDSVNGGFMTSYNASERRESSKGGKDTNRRTSGTSQAPAKSASATHKAQPPSHAAKRANGHASNAPQRCAKPPPAYDAQMTELKLLVDSAEKERDFYFSKLRDVEILCQSPEVEHLPIAKAIQKILYASEDDPSTVAEAQAEMVAQQNQMQQQPMLSPILEASEAPSITPKDSSEESLRQEAAAAHKRKSISDLEEFEMGSSSRMRLSDVSDVQLCGSPLMSFT

SEQ ID NO: 68627 - DNA, 1751 bp, Triticum aestivum
  misc_feature (1)..(1751): Ceres Seq. ID no. 15224709
atcaccttgactgagatcgggacgaggcaatggcgtctccgagattcaagcccgtggaggagtgcagctccgaggggaggtcggggcagacggtggccgcagacttcgacggcacgctgctccgctcctccaacgccttcccctactacctcctggtggcgctggaggccggcagcgtcctccgcgccgtggcgctgctcctgtcggtgcccttcgtgtacgtgacctacatcttcttctccgagtcgctggccatcagcaccctggtgtacatctccgtggccgggctcaaggtgcggagcatcgagatggcggcgcggtcggtgctgcccaagttctacgcgcaggacgtgcacccggagagctggcgggtgttccggtccttcggcaagcggtacatcatcacggccagccccagggtcatggtggagcccttcgccagggagttcctcggcgccgaccgggtggtgggcacggagctggaggtgggcaagtccggcaaggccacggggttcatggtgaagcccggggtgctcgtcggggagcacaagaagcaggccgtggtgaaggagctgggcgacgcggtgcccgacgtcggcatgggcaacagggccaccgatttcaacttcatgtccatatgcaaggaagcctaccttgtcacgtcgaggaagtacagcccggtgcccaagaaccagctgctgacgcccctcatcctccacgacggccgcctcgtgcagcgcccgacgccgctggtggcgctcgtcaccttcctctggatgccgttcggcttcgccctcgccctcctccgcgtgtacatcaacctgcccctcccggagcgcatcgtcttctacatctaccacatgatgggcatccggctcatcgtgaaggggaccccgccgccgccgcccaagaaggggagcccgggcgtgctcttcgtgtgcaaccaccgcaccgtgctggaccccatcgaggtcgccgtcgcgctcggccgcaaggtgagctgcgtgacctacagcatctccaagttctcggagctcatctcgccgatcaaggcggtggcgctgacgcgggagcgcgacaaggacgccgagaacatccggcggctgctggaggagggcgacctggtgatctgccccgagggcaccacctgccgggagccctacctgctgcgcttcagcgcgctcttcgccgagctcacggaccgcatcgtgccggtggcgatcaacaccagggagcacatgttccacggctccaccgtgcgcgggttcaagctcatggacccctacttcttcttcatgaacccgcggccggtctacgaggtcaccttcctcaacatgctgcccaaggagctcacctgcggcgggggcaagtcgcccatcgaggtcgccaactacatccagaagacgctcagcgaccagctcggcttcgagtgcaccaccatcacccgcaaggagaagtacggcatactggccggcaccgacgggcgcgtcccgtccaagaacaaggacaaggagaagaactagcggatctctcgggctggactgcctcgcgtcgcgccggctacagtggttgatcgtggttgttgttgtttacagtttactatgattaattgtttgttatttgtcagatcactcaccgtttccaggaaactaaaaggaccgtgtcgtcgtgtattagcttgaggtcacaattgtcttgtaccaataattgtttcttcgccaaaaggatgagtaattatatggacgatttcc

SEQ ID NO: 68628 - protein, 497 aa, Triticum aestivum
  peptide (1)..(497): Ceres Seq. ID no. 15224710
  misc_feature (22)..(161): Pfam Name: haloacid dehalogenase-like hydrolase Pfam Description: haloacid dehalogenase-like hydrolase
  misc_feature (12)..(487): Homolog of NCBI NO: 21618047 NR Description: unknown [Arabidopsis thaliana]
  misc_feature (12)..(487): Homolog of NCBI NO: 18390661 NR Description: phospholipid/glycerol acyltransferase family
  misc_feature (14)..(487): Homolog of NCBI NO: 15239924 NR Description: phospholipid/glycerol acyltransferase family
  misc_feature (16)..(487): Homolog of NCBI NO: 15229747 NR Description: expressed protein [Arabidopsis thaliana]
  misc_feature (6)..(487): Homolog of NCBI NO: 37534314 NR Description: hypothetical protein [Oryza sativa (japonica
  misc_feature (43)..(496): Homolog of NCBI NO: 29788867 NR Description: hypothetical protein [Oryza sativa (japonica
  misc_feature (1)..(496): Homolog of NCBI NO: 38000002 NR Description: unknown protein [Oryza sativa (japonica
  misc_feature (1)..(494): Homolog of NCBI NO: 17064780 NR Description: Unknown protein [Arabidopsis thaliana]
  misc_feature (1)..(494): Homolog of NCBI NO: 15223437 NR Description: expressed protein [Arabidopsis thaliana]
  misc_feature (5)..(494): Homolog of NCBI NO: 15224445 NR Description: phospholipid/glycerol acyltransferase family
MASPRFKPVEECSSEGRSGQTVAADFDGTLLRSSNAFPYYLLVALEAGSVLRAVALLLSVPFVYVTYIFFSESLAISTLVYISVAGLKVRSIEMAARSVLPKFYAQDVHPESWRVFRSFGKRYIITASPRVMVEPFAREFLGADRVVGTELEVGKSGKATGFMVKPGVLVGEHKKQAVVKELGDAVPDVGMGNRATDFNFMSICKEAYLVTSRKYSPVPKNQLLTPLILHDGRLVQRPTPLVALVTFLWMPFGFALALLRVYINLPLPERIVFYIYHMMGIRLIVKGTPPPPPKKGSPGVLFVCNHRTVLDPIEVAVALGRKVSCVTYSISKFSELISPIKAVALTRERDKDAENIRRLLEEGDLVICPEGTTCREPYLLRFSALFAELTDRIVPVAINTREHMFHGSTVRGFKLMDPYFFFMNPRPVYEVTFLNMLPKELTCGGGKSPIEVANYIQKTLSDQLGFECTTITRKEKYGILAGTDGRVPSKNKDKEKN

SEQ ID NO: 68629 - protein, 404 aa, Triticum aestivum
  peptide (1)..(404): Ceres Seq. ID no. 15224711
  misc_feature (1)..(68): Pfam Name: haloacid dehalogenase-like hydrolase Pfam Description: haloacid dehalogenase-like hydrolase
  misc_feature (1)..(394): Homolog of NCBI NO: 21618047 NR Description: unknown [Arabidopsis thaliana]
  misc_feature (1)..(394): Homolog of NCBI NO: 18390661 NR Description: phospholipid/glycerol acyltransferase family
  misc_feature (1)..(394): Homolog of NCBI NO: 15239924 NR Description: phospholipid/glycerol acyltransferase family
  misc_feature (1)..(394): Homolog of NCBI NO: 15229747 NR Description: expressed protein [Arabidopsis thaliana]
  misc_feature (1)..(394): Homolog of NCBI NO: 37534314 NR Description: hypothetical protein [Oryza sativa (japonica
  misc_feature (1)..(403): Homolog of NCBI NO: 29788867 NR Description: hypothetical protein [Oryza sativa (japonica
  misc_feature (1)..(403): Homolog of NCBI NO: 38000002 NR Description: unknown protein [Oryza sativa (japonica
  misc_feature (1)..(401): Homolog of NCBI NO: 17064780 NR Description: Unknown protein [Arabidopsis thaliana]
  misc_feature (1)..(401): Homolog of NCBI NO: 15223437 NR Description: expressed protein [Arabidopsis thaliana]
  misc_feature (1)..(401): Homolog of NCBI NO: 15224445 NR Description: phospholipid/glycerol acyltransferase family
MAARSVLPKFYAQDVHPESWRVFRSFGKRYIITASPRVMVEPFAREFLGADRVVGTELEVGKSGKATGFMVKPGVLVGEHKKQAVVKELGDAVPDVGMGNRATDFNFMSICKEAYLVTSRKYSPVPKNQLLTPLILHDGRLVQRPTPLVALVTFLWMPFGFALALLRVYINLPLPERIVFYIYHMMGIRLIVKGTPPPPPKKGSPGVLFVCNHRTVLDPIEVAVALGRKVSCVTYSISKFSELISPIKAVALTRERDKDAENIRRLLEEGDLVICPEGTTCREPYLLRFSALFAELTDRIVPVAINTREHMFHGSTVRGFKLMDPYFFFMNPRPVYEVTFLNMLPKELTCGGGKSPIEVANYIQKTLSDQLGFECTTITRKEKYGILAGTDGRVPSKNKDKEKN

SEQ ID NO: 68630 - protein, 366 aa, Triticum aestivum
  peptide (1)..(366): Ceres Seq. ID no. 15224712
  misc_feature (1)..(356): Homolog of NCBI NO: 21618047 NR Description: unknown [Arabidopsis thaliana]
  misc_feature (1)..(356): Homolog of NCBI NO: 18390661 NR Description: phospholipid/glycerol acyltransferase family
  misc_feature (1)..(356): Homolog of NCBI NO: 15239924 NR Description: phospholipid/glycerol acyltransferase family
  misc_feature (1)..(356): Homolog of NCBI NO: 15229747 NR Description: expressed protein [Arabidopsis thaliana]
  misc_feature (1)..(356): Homolog of NCBI NO: 37534314 NR Description: hypothetical protein [Oryza sativa (japonica
  misc_feature (1)..(365): Homolog of NCBI NO: 29788867 NR Description: hypothetical protein [Oryza sativa (japonica
  misc_feature (1)..(365): Homolog of NCBI NO: 38000002 NR Description: unknown protein [Oryza sativa (japonica
  misc_feature (1)..(363): Homolog of NCBI NO: 17064780 NR Description: Unknown protein [Arabidopsis thaliana]
  misc_feature (1)..(363): Homolog of NCBI NO: 15223437 NR Description: expressed protein [Arabidopsis thaliana]
  misc_feature (1)..(363): Homolog of NCBI NO: 15224445 NR Description: phospholipid/glycerol acyltransferase family
MVEPFAREFLGADRVVGTELEVGKSGKATGFMVKPGVLVGEHKKQAVVKELGDAVPDVGMGNRATDFNFMSICKEAYLVTSRKYSPVPKNQLLTPLILHDGRLVQRPTPLVALVTFLWMPFGFALALLRVYINLPLPERIVFYIYHMMGIRLIVKGTPPPPPKKGSPGVLFVCNHRTVLDPIEVAVALGRKVSCVTYSISKFSELISPIKAVALTRERDKDAENIRRLLEEGDLVICPEGTTCREPYLLRFSALFAELTDRIVPVAINTREHMFHGSTVRGFKLMDPYFFFMNPRPVYEVTFLNMLPKELTCGGGKSPIEVANYIQKTLSDQLGFECTTITRKEKYGILAGTDGRVPSKNKDKEKN

SEQ ID NO: 68631 - DNA, 1767 bp, Triticum aestivum
  misc_feature (1)..(1767): Ceres Seq. ID no. 13662391
tttttagccgatcagtatcctccacaagaaaaaaaatactataagcgcaatagaaaaatagtgatccctcaataagaaaatcaagaaaagatttccttttcttcttgggctcccttccaccaccaacctcttctccggccggccgagttgtcccgctccggctgcgtcttctccggcgagaggtgtagctaggttgcctgctcttcctttgagcggtctcctcccggcagggctgaggagatctctcgggacctcgggactggggcgtgtatgatggggatttcgcttatgccgatgaagacgcccacgcggcttctgtggagcaccagcttcttccgccacaagctcgccgccatgatcgcctcctcgtcctgcttcttataagagcccctccgccgcgcagcagctgtatatatacgtctttttcatttgattccgccccccgttcgatcgacaaccaaccaaggcaacttcttgaagctttctctgcgatggagcccggccggctcatcttcaacacgtcgggctccggcaacggacagatgctcttcatggactgcggcgccggcggcatcgccggcgcggccggcatgttccatcgaggggtgagaccggtcctcggcggcatggaagaagggcgcggcgtgaagcggcccttcttcacctcgccggatgacatgctcgaggaggagtactacgacgagcagctcccggagaagaagcggcgcctcaccccggagcaggtccacctgctggagaggagcttcgaggaggagaataagctggagccggagaggaagacggagctggcccgcaagctcgggctgcagccacgccaggtggccgtctggttccagaaccgccgcgcccggtggaagacaaagacgctggagcgcgacttcgaccgcctcaaggcgtccttcgacgccctccgggccgaccacgacgccctcctccaggacaaccaccggctccggtcacaggtggtaacgttgaccgagaagatgcaagataaggaggcgccggaaggcagcttcggtgcagccgtcgacgccttggagccggagcaggcggcggcggaggcgaaggcttccttggccaacgccgaggaacatgccgcggcagcggaggcgttcgaggtggtgcagcagcagctgcatgtgaaggacgaggagaggctgagcccggggagcggcgggagcgcggtgctggacgcgagggacgcgctgctcgggagcggatgcggtctcgccggcgtggtggacagcagcgtggactcgtactgcttcccggggggcgccggcggcgacgagtaccacgagtgcgtgatgggccccgtggcgggcggcatccagtcggaggaggacgacggcgcgggcagcgacgagggctgcagctactaccccgacgacgccgccgtcttcttcgccgccgcgcaagggcacggccaccatcacacggacgacgacgatcagcaggacgacggccagatcagctactggatgtggaactaggctcgcgcacgcatcaagaagcgtgcgtgcgtgcgccgtggaatcgatcaatttcggagtatatcagtaaaagaaatcgtggcgttttgttttctctccttgtatgcttcccgctgtaatcttgggtcactacgatcgaccaagttgtatgcatatgcattgtactacgagttagggtaatacatcggtggtaaaatctgtcgtgatgtacgggaaataagtgaacggagtcagagcctcattcttatggcac

SEQ ID NO: 68632 - protein, 340 aa, Triticum aestivum
  peptide (1)..(340): Ceres Seq. ID no. 13662392
  misc_feature (76)..(130): Pfam Name: Homeobox domain Pfam Description: Homeobox domain
  misc_feature (49)..(189): Homolog of NCBI NO: 15148918 NR Description: homeodomain leucine zipper protein HDZ2
  misc_feature (56)..(201): Homolog of NCBI NO: 7446244 NR Description: homeotic protein - carrot
  misc_feature (72)..(171): Homolog of NCBI NO: 166754 NR Description: homeobox protein
  misc_feature (71)..(195): Homolog of NCBI NO: 15148920 NR Description: homeodomain leucine zipper protein HDZ3
  misc_feature (1)..(197): Homolog of NCBI NO: 18034441 NR Description: homeodomain leucine zipper protein CPHB-5
  misc_feature (1)..(176): Homolog of NCBI NO: 15232122 NR Description: homeobox-leucine zipper protein HAT5 (HD-ZIP
  misc_feature (1)..(340): Homolog of NCBI NO: 37573050 NR Description: homeodomain leucine zipper protein
  misc_feature (1)..(340): Homolog of NCBI NO: 5006855 NR Description: homeodomain leucine zipper protein [Oryza sativa]
MEPGRLIFNTSGSGNGQMLFMDCGAGGIAGAAGMFHRGVRPVLGGMEEGRGVKRPFFTSPDDMLEEEYYDEQLPEKKRRLTPEQVHLLERSFEEENKLEPERKTELARKLGLQPRQVAVWFQNRRARWKTKTLERDFDRLKASFDALRADHDALLQDNHRLRSQVVTLTEKMQDKEAPEGSFGAAVDALEPEQAAAEAKASLANAEEHAAAAEAFEVVQQQLHVKDEERLSPGSGGSAVLDARDALLGSGCGLAGVVDSSVDSYCFPGGAGGDEYHECVMGPVAGGIQSEEDDGAGSDEGCSYYPDDAAVFFAAAQGHGHHHTDDDDQQDDGQISYWMWN

SEQ ID NO: 68633 - protein, 323 aa, Triticum aestivum
  peptide (1)..(323): Ceres Seq. ID no. 13662393
  misc_feature (59)..(113): Pfam Name: Homeobox domain Pfam Description: Homeobox domain
  misc_feature (32)..(172): Homolog of NCBI NO: 15148918 NR Description: homeodomain leucine zipper protein HDZ2
  misc_feature (39)..(184): Homolog of NCBI NO: 7446244 NR Description: homeotic protein - carrot
  misc_feature (55)..(154): Homolog of NCBI NO: 166754 NR Description: homeobox protein
  misc_feature (54)..(178): Homolog of NCBI NO: 15148920 NR Description: homeodomain leucine zipper protein HDZ3
  misc_feature (1)..(180): Homolog of NCBI NO: 18034441 NR Description: homeodomain leucine zipper protein CPHB-5
  misc_feature (1)..(159): Homolog of NCBI NO: 15232122 NR Description: homeobox-leucine zipper protein HAT5 (HD-ZIP
  misc_feature (1)..(323): Homolog of NCBI NO: 37573050 NR Description: homeodomain leucine zipper protein
  misc_feature (1)..(323): Homolog of NCBI NO: 5006855 NR Description: homeodomain leucine zipper protein [Oryza sativa]
MLFMDCGAGGIAGAAGMFHRGVRPVLGGMEEGRGVKRPFFTSPDDMLEEEYYDEQLPEKKRRLTPEQVHLLERSFEEENKLEPERKTELARKLGLQPRQVAVWFQNRRARWKTKTLERDFDRLKASFDALRADHDALLQDNHRLRSQVVTLTEKMQDKEAPEGSFGAAVDALEPEQAAAEAKASLANAEEHAAAAEAFEVVQQQLHVKDEERLSPGSGGSAVLDARDALLGSGCGLAGVVDSSVDSYCFPGGAGGDEYHECVMGPVAGGIQSEEDDGAGSDEGCSYYPDDAAVFFAAAQGHGHHHTDDDDQQDDGQISYWMWN

SEQ ID NO: 68634 - protein, 320 aa, Triticum aestivum
  peptide (1)..(320): Ceres Seq. ID no. 13662394
  misc_feature (56)..(110): Pfam Name: Homeobox domain Pfam Description: Homeobox domain
  misc_feature (29)..(169): Homolog of NCBI NO: 15148918 NR Description: homeodomain leucine zipper protein HDZ2
  misc_feature (36)..(181): Homolog of NCBI NO: 7446244 NR Description: homeotic protein - carrot
  misc_feature (52)..(151): Homolog of NCBI NO: 166754 NR Description: homeobox protein
  misc_feature (51)..(175): Homolog of NCBI NO: 15148920 NR Description: homeodomain leucine zipper protein HDZ3
  misc_feature (1)..(177): Homolog of NCBI NO: 18034441 NR Description: homeodomain leucine zipper protein CPHB-5
  misc_feature (1)..(156): Homolog of NCBI NO: 15232122 NR Description: homeobox-leucine zipper protein HAT5 (HD-ZIP
  misc_feature (1)..(320): Homolog of NCBI NO: 37573050 NR Description: homeodomain leucine zipper protein
  misc_feature (1)..(320): Homolog of NCBI NO: 5006855 NR Description: homeodomain leucine zipper protein [Oryza sativa]
MDCGAGGIAGAAGMFHRGVRPVLGGMEEGRGVKRPFFTSPDDMLEEEYYDEQLPEKKRRLTPEQVHLLERSFEEENKLEPERKTELARKLGLQPRQVAVWFQNRRARWKTKTLERDFDRLKASFDALRADHDALLQDNHRLRSQVVTLTEKMQDKEAPEGSFGAAVDALEPEQAAAEAKASLANAEEHAAAAEAFEVVQQQLHVKDEERLSPGSGGSAVLDARDALLGSGCGLAGVVDSSVDSYCFPGGAGGDEYHECVMGPVAGGIQSEEDDGAGSDEGCSYYPDDAAVFFAAAQGHGHHHTDDDDQQDDGQISYWMWN

SEQ ID NO: 68635 - DNA, 1404 bp, Triticum aestivum
  misc_feature (1)..(1404): Ceres Seq. ID no. 12614942
atcatcagtctccactctccacccatctcagcaaaaaagaagctagcacagctccacacaccatggcagccatggccaccaccgcctccagcctcctcaagacctccttctccggcgtccgcctcccggcggcggcccgcaccccgtcctgcgtcgccaccccgcgcgccggcgccatctgcaactccatctcctcctccaccccaccctacgacctcaacgccttcaagttcagccccatcaaggagtccatcgtctcccgcgagatgacccgccgctacatgaccgacatgatcacctacgccgacaccgacgtcgtcatcgtcggcgccggatccgcggggctgtcctgcgcgtacgagctctccaaggacccctccatcagcatcgccatcatcgagcagtccgtgtcccccggcggcggcgcgtggctcggcggccagctcttctccgccatggtcgtgcgcaagccggcgcacctcttcctcgacgagctcaacatcgagtacgacgagcaggaggactacgtcgtcatcaagcacgccgcgctcttcacctccaccgtcatgagccgcctcctcgcgcgccccaacgtcaagctcttcaacgccgtcgccgtggaggacctcatcgtcaaggaggaccgcgtcgccggcgtcgtcaccaactgggcgctcgtctccatgaaccacgacacacagtcctgcatggaccccaacgtcatggaggccaaggtcgtggtgagctcctgcggccacgacgggcccttcggcgccaccggggtcaagcggctccaggacatcggcatgatccaggcggtgcccgggatgaaggcgctcgacatgaacacggccgaggatgccatcgtgcgcctcacccgcgaggttgtccccggcatgattgtcaccggcatggaggtcgccgagatcgacggcgccccgagaatgggcccgaccttcggcgccatgatgatctccggccagaaggcggcgcacctggcgctcaaggccctcggccggccgaacggcatcgacgggacgctcaagaacgtgaccccggcgctgcacccggagatgatcctggcggcgaccaacaacggcgacatcgtggacgcctaagcaaagcaatgagccacggacaccaaggcgtacgtacgctggtgtttgggggcgcaagatcaataagatggttcggtgaaacggaggatgcttagggacgagggcttgtctttgtgatttgtcagactcgtgtttaattccgatgtttgtctttagttttcttgtgttagcgtattttgttcatgccacctgcccgccatgtgctctgccctgcctctgcctcgcggcagttccatggatgatgaatccttctggaacaagaggagggaataaaaaggttgagtcc

SEQ ID NO: 68636 - protein, 371 aa, Triticum aestivum
  peptide (1)..(371): Ceres Seq. ID no. 12614943
  misc_feature (76)..(319): Pfam Name: Thi4 family Pfam Description: Thi4 family
  misc_feature (14)..(371): Homolog of NCBI NO: 6094476 NR Description: Thiazole biosynthetic enzyme, chloroplast
  misc_feature (24)..(371): Homolog of NCBI NO: 2501189 NR Description: Thiazole biosynthetic enzyme 1-1, chloroplast
  misc_feature (24)..(371): Homolog of NCBI NO: 2501190 NR Description: Thiazole biosynthetic enzyme 1-2, chloroplast
  misc_feature (24)..(371): Homolog of NCBI NO: 27261025 NR Description: putative thiamine biosynthetic enzyme
HQSPLSTHLSKKEASTAPHTMAAMATTASSLLKTSFSGVRLPAAARTPSCVATPRAGAICNSISSSTPPYDLNAFKFSPIKESIVSREMTRRYMTDMITYADTDVVIVGAGSAGLSCAYELSKDPSISIAIIEQSVSPGGGAWLGGQLFSAMVVRKPAHLFLDELNIEYDEQEDYVVIKHAALFTSTVMSRLLARPNVKLFNAVAVEDLIVKEDRVAGVVTNWALVSMNHDTQSCMDPNVMEAKVVVSSCGHDGPFGATGVKRLQDIGMIQAVPGMKALDMNTAEDAIVRLTREVVPGMIVTGMEVAEIDGAPRMGPTFGAMMISGQKAAHLALKALGRPNGIDGTLKNVTPALHPEMILAATNNGDIVDA

SEQ ID NO: 68637 - protein, 351 aa, Triticum aestivum
  peptide (1)..(351): Ceres Seq. ID no. 12614944
  misc_feature (56)..(299): Pfam Name: Thi4 family Pfam Description: Thi4 family
  misc_feature (1)..(351): Homolog of NCBI NO: 6094476 NR Description: Thiazole biosynthetic enzyme, chloroplast
  misc_feature (4)..(351): Homolog of NCBI NO: 2501189 NR Description: Thiazole biosynthetic enzyme 1-1, chloroplast
  misc_feature (4)..(351): Homolog of NCBI NO: 2501190 NR Description: Thiazole biosynthetic enzyme 1-2, chloroplast
  misc_feature (4)..(351): Homolog of NCBI NO: 27261025 NR Description: putative thiamine biosynthetic enzyme
MAAMATTASSLLKTSFSGVRLPAAARTPSCVATPRAGAICNSISSSTPPYDLNAFKFSPIKESIVSREMTRRYMTDMITYADTDVVIVGAGSAGLSCAYELSKDPSISIAIIEQSVSPGGGAWLGGQLFSAMVVRKPAHLFLDELNIEYDEQEDYVVIKHAALFTSTVMSRLLARPNVKLFNAVAVEDLIVKEDRVAGVVTNWALVSMNHDTQSCMDPNVMEAKVVVSSCGHDGPFGATGVKRLQDIGMIQAVPGMKALDMNTAEDAIVRLTREVVPGMIVTGMEVAEIDGAPRMGPTFGAMMISGQKAAHLALKALGRPNGIDGTLKNVTPALHPEMILAATNNGDIVDA

SEQ ID NO: 68638 - protein, 348 aa, Triticum aestivum
  peptide (1)..(348): Ceres Seq. ID no. 12614945
  misc_feature (53)..(296): Pfam Name: Thi4 family Pfam Description: Thi4 family
  misc_feature (1)..(348): Homolog of NCBI NO: 6094476 NR Description: Thiazole biosynthetic enzyme, chloroplast
  misc_feature (1)..(348): Homolog of NCBI NO: 2501189 NR Description: Thiazole biosynthetic enzyme 1-1, chloroplast
  misc_feature (1)..(348): Homolog of NCBI NO: 2501190 NR Description: Thiazole biosynthetic enzyme 1-2, chloroplast
  misc_feature (1)..(348): Homolog of NCBI NO: 27261025 NR Description: putative thiamine biosynthetic enzyme
MATTASSLLKTSFSGVRLPAAARTPSCVATPRAGAICNSISSSTPPYDLNAFKFSPIKESIVSREMTRRYMTDMITYADTDVVIVGAGSAGLSCAYELSKDPSISIAIIEQSVSPGGGAWLGGQLFSAMVVRKPAHLFLDELNIEYDEQEDYVVIKHAALFTSTVMSRLLARPNVKLFNAVAVEDLIVKEDRVAGVVTNWALVSMNHDTQSCMDPNVMEAKVVVSSCGHDGPFGATGVKRLQDIGMIQAVPGMKALDMNTAEDAIVRLTREVVPGMIVTGMEVAEIDGAPRMGPTFGAMMISGQKAAHLALKALGRPNGIDGTLKNVTPALHPEMILAATNNGDIVDA

SEQ ID NO: 68639 - DNA, 1389 bp, Triticum aestivum
  misc_feature (1)..(1389): Ceres Seq. ID no. 13596496
atcccacacgccccacccctattccgccgcctcccttctctcttctcctcactccctctcgccgcagagaagatggcgtccgacggcagcggcgttgtcacggtgtacggcagcggcaacaacggcgccggtacgcagctggagcccaagtcgtccccgttctctgtcaaggtgggcctggcccagatgctccgcggcggcgtcatcatggacgtcgtcaacgccgagcaggcgcgcatcgccgaggaggccggcgcctgcgccgtcatggcgctcgagcgcgtccccgccgacatccgcgcccagggcggcgtcgcccgcatgtccgacccgggcctcatccgcgaaatcaagcgcgccgtcaccatccctgtcatggccaaggcccgcatcgggcacttcgtcgaggcccagatcctcgagtccatcggcgtcgactacgtggacgagagcgaggtcctcacgctcgccgacgacgcccaccacatcaacaagcacaacttccgcgtccccttcgtctgcggctgccgcaacctgggcgaggccctccgccgcatccgcgagggcgccgccatgatccgcaccaagggcgaggccggcaccggcaatgtcatcgaggccgtccgccacgtccgctccgtcatgggcgacgtgcgtgccctccgcagcatggacgacgacgaggtattcacctatgccaagagcatcgccgcaccgtacgacctcgtcatgcagaccaagcagctcggccgcctgcccgtcgtccagttcgccgccggcggggtcgccacgccggccgatgcggccctcatgatgcagctcggctgcgacggtgtcttcgtcggctccggtgtcttcaagagcggcgaccccgcgcgccgcgcgcgcgccatcgtgcaggccgtcacccactacagcgaccctaatgtgctcgccgaggtgagctgcgacctcggtgaggccatggtgggcatcaacctctccgatcccaaggtcgagcgctttgcggcgcgctccgagtgatctttgttggccaccgtcaataccagctcccaaaataatactccatggatcaatgataaggacaaaaaagaagtacttagaaacgattcctagttattatcatgtgatttcttcatgatgatcattctagctccgataacaattcaagcggtagcaagcatgcacctccagtcagtcagtcggtcagtcgctcgctttatatatgtacacacatgttgtcgtcttccatttcatttctgttgttgttaacacaagttaagtatccatccatccttttcctccgtgttctcttgctactatgcattttgctgtttcagattcgttgttgtttctctgatcgattttgctactgttgttgccaattgc

SEQ ID NO: 68640 - protein, 340 aa, Triticum aestivum
  peptide (1)..(340): Ceres Seq. ID no. 15221893
  misc_feature (53)..(259): Pfam Name: SOR/SNZ family Pfam Description: SOR/SNZ family
  misc_feature (48)..(338): Homolog of NCBI NO: 19115894 NR Description: putative stress-induced protein
  misc_feature (50)..(338): Homolog of NCBI NO: 22970419 NR Description: hypothetical protein [Chloroflexus aurantiacus]
  misc_feature (29)..(340): Homolog of NCBI NO: 15224470 NR Description: SOR1 from the fungus Cercospora nicotianae
  misc_feature (25)..(340): Homolog of NCBI NO: 13310484 NR Description: Sor-like protein [Ginkgo biloba]
  misc_feature (28)..(340): Homolog of NCBI NO: 21617922 NR Description: pyridoxine biosynthesis protein-like [Arabidopsis
  misc_feature (29)..(340): Homolog of NCBI NO: 2501578 NR Description: ETHYLENE-INDUCIBLE PROTEIN HEVER
  misc_feature (25)..(340): Homolog of NCBI NO: 37530308 NR Description: putative pyridoxine/pyridoxal 5-phosphate
  misc_feature (28)..(340): Homolog of NCBI NO: 15240972 NR Description: pyridoxine biosynthesis protein - like
  misc_feature (25)..(340): Homolog of NCBI NO: 10719739 NR Description: putative pyridoxine biosynthetic enzyme
  misc_feature (25)..(340): Homolog of NCBI NO: 34394152 NR Description: putative ethylene-inducible protein
IPHAPPLFRRLPSLFSSLPLAAEKMASDGSGVVTVYGSGNNGAGTQLEPKSSPFSVKVGLAQMLRGGVIMDVVNAEQARIAEEAGACAVMALERVPADIRAQGGVARMSDPGLIREIKRAVTIPVMAKARIGHFVEAQILESIGVDYVDESEVLTLADDAHHINKHNFRVPFVCGCRNLGEALRRIREGAAMIRTKGEAGTGNVIEAVRHVRSVMGDVRALRSMDDDEVFTYAKSIAAPYDLVMQTKQLGRLPVVQFAAGGVATPADAALMMQLGCDGVFVGSGVFKSGDPARRARAIVQAVTHYSDPNVLAEVSCDLGEAMVGINLSDPKVERFAARSE

SEQ ID NO: 68641 - protein, 316 aa, Triticum aestivum
  peptide (1)..(316): Ceres Seq. ID no. 15221894
  misc_feature (29)..(235): Pfam Name: SOR/SNZ family Pfam Description: SOR/SNZ family
  misc_feature (24)..(314): Homolog of NCBI NO: 19115894 NR Description: putative stress-induced protein
  misc_feature (26)..(314): Homolog of NCBI NO: 22970419 NR Description: hypothetical protein [Chloroflexus aurantiacus]
  misc_feature (5)..(316): Homolog of NCBI NO: 15224470 NR Description: SOR1 from the fungus Cercospora nicotianae
  misc_feature (1)..(316): Homolog of NCBI NO: 13310484 NR Description: Sor-like protein [Ginkgo biloba]
  misc_feature (4)..(316): Homolog of NCBI NO: 21617922 NR Description: pyridoxine biosynthesis protein-like [Arabidopsis
  misc_feature (5)..(316): Homolog of NCBI NO: 2501578 NR Description: ETHYLENE-INDUCIBLE PROTEIN HEVER
  misc_feature (1)..(316): Homolog of NCBI NO: 37530308 NR Description: putative pyridoxine/pyridoxal 5-phosphate
  misc_feature (4)..(316): Homolog of NCBI NO: 15240972 NR Description: pyridoxine biosynthesis protein - like
  misc_feature (1)..(316): Homolog of NCBI NO: 10719739 NR Description: putative pyridoxine biosynthetic enzyme
  misc_feature (1)..(316): Homolog of NCBI NO: 34394152 NR Description: putative ethylene-inducible protein
MASDGSGVVTVYGSGNNGAGTQLEPKSSPFSVKVGLAQMLRGGVIMDVVNAEQARIAEEAGACAVMALERVPADIRAQGGVARMSDPGLIREIKRAVTIPVMAKARIGHFVEAQILESIGVDYVDESEVLTLADDAHHINKHNFRVPFVCGCRNLGEALRRIREGAAMIRTKGEAGTGNVIEAVRHVRSVMGDVRALRSMDDDEVFTYAKSIAAPYDLVMQTKQLGRLPVVQFAAGGVATPADAALMMQLGCDGVFVGSGVFKSGDPARRARAIVQAVTHYSDPNVLAEVSCDLGEAMVGINLSDPKVERFAARSE

SEQ ID NO: 68642 - protein, 307 aa, Triticum aestivum
  peptide (1)..(307): Ceres Seq. ID no. 15221895
  misc_feature (22)..(278): Pfam Name: HlyD family secretion protein Pfam Description: HlyD family secretion protein
PTRPTPIPPPPFSLLLTPSRRREDGVRRQRRCHGVRQRQQRRRYAAGAQVVPVLCQGGPGPDAPRRRHHGRRQRRAGAHRRGGRRLRRHGARARPRRHPRPGRRRPHVRPGPHPRNQARRHHPCHGQGPHRALRRGPDPRVHRRRLRGRERGPHARRRRPPHQQAQLPRPLRLRLPQPGRGPPPHPRGRRHDPHQGRGRHRQCHRGRPPRPLRHGRRACPPQHGRRRGIHLCQEHRRTVRPRHADQAARPPARRPVRRRRGRHAGRCGPHDAARLRRCLRRLRCLQERRPRAPRARHRAGRHPLQRP

SEQ ID NO: 68643 - DNA, 988 bp, Triticum aestivum
  misc_feature (1)..(988): Ceres Seq. ID no. 12584561
aattcccagcacaaccgggagaaacacggaagcggacgccggggcacgctcgccggggaggccaccatggacatggacagcgtggagtgcctctccctcccggacgcctccatggacgtagacgacgtcgacagccaccagcaccagcaccaccaccacagcatcccgatccatcccgtgcacctcgccgctaacgggggcgtcggaggacgcgcgttcgcgaagatgaacgccgggggcgcggccggggccgggggagtgggtgctaccgcgggcgccaccggcgggccaccggcgaccagcgtacacgaattgctcgagtgtcctgtctgcaccaactccatgttcccgcccatccaccaggtcaacttgctattgacaaaatggatgaaagagctagaaaaaatattctatgggaacattgtgaaatatgatactgcaataagcccagaagcaagccaggatgatcttgtaaatgtcatctggaggaatgtgtacgctgacgaaggttcagagcccatggacgcagctgctacccctgctgtccaggcattggcaagatatactcggagggaggcaacttgcctatcattgacagataaagaagctgtgttctctggcaacttcaagtttacggccgttttgccaaccgtcctcagcccagtgaagcgacggcgatgagcgttggcattggtagatcagtattccatatgaaggctgactggtatacatggacaaggaagactggaagtcctatcatcattacaaataataggaaatttccagtatttatttatgcacgaatctcagcatttcgggccattttggtggctaaacctgcctctagctagaaatctcctttatgtttatcctctatgagcattgcattgatggctgcccttcggaatggagcacacggtggaaacgttttcctggttgaatgcgtgtactagtattttaccattttcattgctgatttggacttgag

SEQ ID NO: 68644 - protein, 226 aa, Triticum aestivum
  peptide (1)..(226): Ceres Seq. ID no. 12584562
  misc_feature (122)..(199): Pfam Name: Ubiquinol-cytochrome C chaperone Pfam Description: Ubiquinol-cytochrome C chaperone
  misc_feature (60)..(121): Homolog of NCBI NO: 15234306 NR Description: putative zinc finger protein; protein id:
  misc_feature (23)..(121): Homolog of NCBI NO: 11291753 NR Description: SINAH1 protein [imported] - upland cotton
  misc_feature (5)..(121): Homolog of NCBI NO: 34904390 NR Description: unnamed protein product [Oryza sativa (japonica
  misc_feature (122)..(199): Homolog of NCBI NO: 8843859 NR Description: contains similarity to unknown
  misc_feature (122)..(212): Homolog of NCBI NO: 30696021 NR Description: expressed protein [Arabidopsis thaliana]
  misc_feature (122)..(223): Homolog of NCBI NO: 33146996 NR Description: unknown protein [Oryza sativa (japonica
NSQHNREKHGSGRRGTLAGEATMDMDSVECLSLPDASMDVDDVDSHQHQHHHHSIPIHPVHLAANGGVGGRAFAKMNAGGAAGAGGVGATAGATGGPPATSVHELLECPVCTNSMFPPIHQVNLLLTKWMKELEKIFYGNIVKYDTAISPEASQDDLVNVIWRNVYADEGSEPMDAAATPAVQALARYTRREATCLSLTDKEAVFSGNFKFTAVLPTVLSPVKRRR

SEQ ID NO: 68645 - protein, 204 aa, Triticum aestivum
  peptide (1)..(204): Ceres Seq. ID no. 12584563
  misc_feature (100)..(177): Pfam Name: Ubiquinol-cytochrome C chaperone Pfam Description: Ubiquinol-cytochrome C chaperone
  misc_feature (38)..(99): Homolog of NCBI NO: 15234306 NR Description: putative zinc finger protein; protein id:
  misc_feature (1)..(99): Homolog of NCBI NO: 11291753 NR Description: SINAH1 protein [imported] - upland cotton
  misc_feature (1)..(99): Homolog of NCBI NO: 34904390 NR Description: unnamed protein product [Oryza sativa (japonica
  misc_feature (100)..(177): Homolog of NCBI NO: 8843859 NR Description: contains similarity to unknown
  misc_feature (100)..(190): Homolog of NCBI NO: 30696021 NR Description: expressed protein [Arabidopsis thaliana]
  misc_feature (100)..(201): Homolog of NCBI NO: 33146996 NR Description: unknown protein [Oryza sativa (japonica
MDMDSVECLSLPDASMDVDDVDSHQHQHHHHSIPIHPVHLAANGGVGGRAFAKMNAGGAAGAGGVGATAGATGGPPATSVHELLECPVCTNSMFPPIHQVNLLLTKWMKELEKIFYGNIVKYDTAISPEASQDDLVNVIWRNVYADEGSEPMDAAATPAVQALARYTRREATCLSLTDKEAVFSGNFKFTAVLPTVLSPVKRRR

SEQ ID NO: 68646 - protein, 202 aa, Triticum aestivum
  peptide (1)..(202): Ceres Seq. ID no. 12584564
  misc_feature (98)..(175): Pfam Name: Ubiquinol-cytochrome C chaperone Pfam Description: Ubiquinol-cytochrome C chaperone
  misc_feature (36)..(97): Homolog of NCBI NO: 15234306 NR Description: putative zinc finger protein; protein id:
  misc_feature (1)..(97): Homolog of NCBI NO: 11291753 NR Description: SINAH1 protein [imported] - upland cotton
  misc_feature (1)..(97): Homolog of NCBI NO: 34904390 NR Description: unnamed protein product [Oryza sativa (japonica
  misc_feature (98)..(175): Homolog of NCBI NO: 8843859 NR Description: contains similarity to unknown
  misc_feature (98)..(188): Homolog of NCBI NO: 30696021 NR Description: expressed protein [Arabidopsis thaliana]
  misc_feature (98)..(199): Homolog of NCBI NO: 33146996 NR Description: unknown protein [Oryza sativa (japonica
MDSVECLSLPDASMDVDDVDSHQHQHHHHSIPIHPVHLAANGGVGGRAFAKMNAGGAAGAGGVGATAGATGGPPATSVHELLECPVCTNSMFPPIHQVNLLLTKWMKELEKIFYGNIVKYDTAISPEASQDDLVNVIWRNVYADEGSEPMDAAATPAVQALARYTRREATCLSLTDKEAVFSGNFKFTAVLPTVLSPVKRRR

SEQ ID NO: 68647 - DNA, 1300 bp, Triticum aestivum
  misc_feature (1)..(1300): Ceres Seq. ID no. 13596110
cccactcaaagcaccaaccctagctcccgcacccccgcaccctcgccgcagccatggcggaagaagccgccgccaccgcctccgcctccgccaccaacttcgaggtggacctgggccacctcctggcctacgacccctcgcaccacctcgccgccggcgccgcgtcctcccgggcggagctgcgggacgagtgcctgcggaaggccacggagctcgcgcaggccgtcgccaacgccctcttctcgctgcccgccaccgagggccgcgacggccctgtcgtccgcctcccgccgcccaccaaccgcctaccccgcgagaagcacttgccaaggccaaagcctcctaccaagtgggagcagttcgcaaagtcgaaagggattatcaagcacaagaagaacaagcgtgcatgggatgagcaaactaattcctggaagcggacgtatggctatgatcgtgttaatgatgacagagacgttcccatcattgaagccaaattgacagacgagcctggtgttgatccttttgctcaaagaagggaagagaagaagggcagggtcgataaacaagaaaagaacagacttgggaatttgaagaatgctgcaaaagttggtgctctgccaagtcatatacagctcgctgccacgtccgtgcccatcacaggaactaaagctgatctgccaagaaaagctaagaaggaagacctcgagaatgtcgctggtatggcttctgcagcaacggctagcggtggaaagtttgataaaaagttgcctggtgagaaacctctaaagaaggctggcaaaaacagaaagttcctccctgttgttgaagggaaaggaatgggcaacctagagaaacagcaaaacgacaagatcctgaacagtctactggccaagaacttcgaggaaccattggatgtcagcaaggcaatcacgatgtacaaggtgaagaaggacaacaagaggaggaaagacaagcaatcatcgtcgtcgtccggatcaaataagttgaagccccagaagaaaatccacaagaaatcttcaaagaaaagcgcttaggtccttccacatcatcgttgagacatgccgtgctgtaggcggcgagcgcagtctccaagcatcaaggatagtcttggcaaattttgtatggtcattgtcctgtttaagtcccaagggagaaatatagttattccggttaccactggttatgatatggcgcaagaagctgagtgccgtgatgacatagctgtacacgtattgtattttcagaagtttgggaaatgtttctggaaagctttgttggc

SEQ ID NO: 68648 - protein, 333 aa, Triticum aestivum
  peptide (1)..(333): Ceres Seq. ID no. 13596111
  misc_feature (16)..(182): Pfam Name: Ribosome biogenesis regulatory protein (RRS1) Pfam Description: Ribosome biogenesis regulatory protein (RRS1)
  misc_feature (1)..(327): Homolog of NCBI NO: 12845436 NR Description: unnamed protein product [Mus musculus]
  misc_feature (1)..(317): Homolog of NCBI NO: 27713790 NR Description: similar to regulator for ribosome resistance
  misc_feature (1)..(327): Homolog of NCBI NO: 12860310 NR Description: unnamed protein product [Mus musculus]
  misc_feature (1)..(331): Homolog of NCBI NO: 10946930 NR Description: RRS1 ribosome biogenesis regulator homolog
  misc_feature (1)..(327): Homolog of NCBI NO: 21362904 NR Description: Ribosome biogenesis regulatory protein homolog
  misc_feature (1)..(276): Homolog of NCBI NO: 33585885 NR Description: Ribosome biogenesis regulatory protein homolog
  misc_feature (16)..(151): Homolog of NCBI NO: 21362906 NR Description: Ribosome biogenesis regulatory protein homolog
  misc_feature (148)..(332): Homolog of NCBI NO: 21362906 NR Description: Ribosome biogenesis regulatory protein homolog
  misc_feature (16)..(332): Homolog of NCBI NO: 18404610 NR Description: expressed protein [Arabidopsis thaliana]
  misc_feature (16)..(332): Homolog of NCBI NO: 21593609 NR Description: unknown [Arabidopsis thaliana]
MAEEAAATASASATNFEVDLGHLLAYDPSHHLAAGAASSRAELRDECLRKATELAQAVANALFSLPATEGRDGPVVRLPPPTNRLPREKHLPRPKPPTKWEQFAKSKGIIKHKKNKRAWDEQTNSWKRTYGYDRVNDDRDVPIIEAKLTDEPGVDPFAQRREEKKGRVDKQEKNRLGNLKNAAKVGALPSHIQLAATSVPITGTKADLPRKAKKEDLENVAGMASAATASGGKFDKKLPGEKPLKKAGKNRKFLPVVEGKGMGNLEKQQNDKILNSLLAKNFEEPLDVSKAITMYKVKKDNKRRKDKQSSSSSGSNKLKPQKKIHKKSSKKSA

SEQ ID NO: 68649 - DNA, 1887 bp, Triticum aestivum
  misc_feature (1)..(1887): Ceres Seq. ID no. 15226950
aaaaaacaacccgtgggcagcagcagcttctctgcatacaccaagaagtcgcctcccttgctttccttcctccagcagtgcgcgcccctcctctcgagatcttccccgagttcctgagatctggttgtaagcagccaagatggtgaagatctgctgcatcggagctggctacgtcggcggcccaaccatggccgtcattgccatcaagtgcccggcgatcgaggttgttgtcgtcgacatctccaagccccgcattgacgcctggaacagcgacaccctccccatctacgagcccggcctcgacgacgttgtcaaggcctgcaggggcaagaacctcttcttcagcactgatgttgagaagcatgtcgccgaggccgacatcatctttgtgtccgtgaacacccccaccaagacccgcggcctgggagccggcaaggccgccgacctcacctactgggagagcgccgcccggatgatcgccgacgtgtccaagtcggacaagatcgtcgtcgagaagtccaccgtgcctgtcaagaccgccgaggccatcgagaagatcctgacccacaacagcaagggcatcaactaccagatcctgtccaacccggagttcctcgccgagggcacggcgatcgaggacctgttcaagcccgacagggtgctcatcggcggccgggagacccccgggggccagaaggccgtccaggccctcaaggaggtgtacgcccactgggtgcccgaggcgaacatcatcaccaccaacctgtggtcggccgagctctccaagctggccgccaacgcgttcctggcgcagaggatctcgtccgtgaacgccatgtcggcgctgtgcgaggccaccggcgccaacgtgtcggaggtgtcgtacgccatcggcaaggactcgcggatcgggcccaagttcctgaacgccagcgtggggttcggcgggtcgtgcttccagaaggacatcctgaacctggtgtacatctgcgagtgcaacggcctgccggaggtggccaactactggaagcaggtgatcaagatcaacgactaccagaagagccggttcgtgaaccgggtggtgtcgtccatgttcaacacggtgtccggcaagaagatcgcggtgctcgggttcgcgttcaagaaggacacgggcgacacccgggagacgccggcgatcgacgtgtgcaagggcctggtgggcgacaaggcccaggtgagcatctacgacccgcaggtgacggaggagcagatccagcgggacctggccatgaacaagttcgactgggaccacccgatgcacctgcagccgaccagccccacggcggtgaagcaggtgagcgtggtgtgggacgcgtacgaggcctgcaagggcgcccacggcgtgtgcatcctcaccgagtgggacgagttcaagaagctcgactaccagaagatcttcgacaacatgcagaagccggccttcgtcttcgacggccgcaacgtggtcgacgccgagaagctcagggagatgggcttcatcgtctactccatcggcaagccgctcgacggctggctcaaggacatgcccgccgtggcctaagttcacctcgtcgccccgccggatcggaggaagagcaagaagtggtttgaccatcattcattatttatagtttgcattttgcaggagaagcatctacattttctctgtcggccataaaattttagcaaatcttcatgtcttgtcaagtttcgattcgatacatgtttgcgtctgtagatcttacttataatcaaatcctcgggcccctgtgctgcctgaggaggttttccgttgtatcccatgaacgaactttgtagcctgttttgctgaaatcattacagaatcaatgtgttttttcgccaaac

SEQ ID NO: 68650 - protein, 480 aa, Triticum aestivum
  peptide (1)..(480): Ceres Seq. ID no. 15226951
  misc_feature (2)..(200): Pfam Name: UDP-glucose/GDP-mannose dehydrogenase family, Pfam Description: UDP-glucose/GDP-mannose dehydrogenase family,
  misc_feature (1)..(480): Homolog of NCBI NO: 29028306 NR Description: UDP-glucose dehydrogenase [Colocasia esculenta]
  misc_feature (1)..(480): Homolog of NCBI NO: 13236672 NR Description: putative UDP-glucose dehydrogenase
MVKICCIGAGYVGGPTMAVIAIKCPAIEVVVVDISKPRIDAWNSDTLPIYEPGLDDVVKACRGKNLFFSTDVEKHVAEADIIFVSVNTPTKTRGLGAGKAADLTYWESAARMIADVSKSDKIVVEKSTVPVKTAEAIEKILTHNSKGINYQILSNPEFLAEGTAIEDLFKPDRVLIGGRETPGGQKAVQALKEVYAHWVPEANIITTNLWSAELSKLAANAFLAQRISSVNAMSALCEATGANVSEVSYAIGKDSRIGPKFLNASVGFGGSCFQKDILNLVYICECNGLPEVANYWKQVIKINDYQKSRFVNRVVSSMFNTVSGKKIAVLGFAFKKDTGDTRETPAIDVCKGLVGDKAQVSIYDPQVTEEQIQRDLAMNKFDWDHPMHLQPTSPTAVKQVSVVWDAYEACKGAHGVCILTEWDEFKKLDYQKIFDNMQKPAFVFDGRNVVDAEKLREMGFIVYSIGKPLDGWLKDMPAVA

SEQ ID NO: 68651 - protein, 464 aa, Triticum aestivum
  peptide (1)..(464): Ceres Seq. ID no. 15226952
  misc_feature (1)..(184): Pfam Name: UDP-glucose/GDP-mannose dehydrogenase family, Pfam Description: UDP-glucose/GDP-mannose dehydrogenase family,
  misc_feature (1)..(464): Homolog of NCBI NO: 29028306 NR Description: UDP-glucose dehydrogenase [Colocasia esculenta]
  misc_feature (1)..(464): Homolog of NCBI NO: 13236672 NR Description: putative UDP-glucose dehydrogenase
MAVIAIKCPAIEVVVVDISKPRIDAWNSDTLPIYEPGLDDVVKACRGKNLFFSTDVEKHVAEADIIFVSVNTPTKTRGLGAGKAADLTYWESAARMIADVSKSDKIVVEKSTVPVKTAEAIEKILTHNSKGINYQILSNPEFLAEGTAIEDLFKPDRVLIGGRETPGGQKAVQALKEVYAHWVPEANIITTNLWSAELSKLAANAFLAQRISSVNAMSALCEATGANVSEVSYAIGKDSRIGPKFLNASVGFGGSCFQKDILNLVYICECNGLPEVANYWKQVIKINDYQKSRFVNRVVSSMFNTVSGKKIAVLGFAFKKDTGDTRETPAIDVCKGLVGDKAQVSIYDPQVTEEQIQRDLAMNKFDWDHPMHLQPTSPTAVKQVSVVWDAYEACKGAHGVCILTEWDEFKKLDYQKIFDNMQKPAFVFDGRNVVDAEKLREMGFIVYSIGKPLDGWLKDMPAVA

SEQ ID NO: 68652 - protein, 369 aa, Triticum aestivum
  peptide (1)..(369): Ceres Seq. ID no. 15226953
  misc_feature (1)..(89): Pfam Name: UDP-glucose/GDP-mannose dehydrogenase family, Pfam Description: UDP-glucose/GDP-mannose dehydrogenase family,
  misc_feature (1)..(369): Homolog of NCBI NO: 29028306 NR Description: UDP-glucose dehydrogenase [Colocasia esculenta]
  misc_feature (1)..(369): Homolog of NCBI NO: 13236672 NR Description: putative UDP-glucose dehydrogenase
MIADVSKSDKIVVEKSTVPVKTAEAIEKILTHNSKGINYQILSNPEFLAEGTAIEDLFKPDRVLIGGRETPGGQKAVQALKEVYAHWVPEANIITTNLWSAELSKLAANAFLAQRISSVNAMSALCEATGANVSEVSYAIGKDSRIGPKFLNASVGFGGSCFQKDILNLVYICECNGLPEVANYWKQVIKINDYQKSRFVNRVVSSMFNTVSGKKIAVLGFAFKKDTGDTRETPAIDVCKGLVGDKAQVSIYDPQVTEEQIQRDLAMNKFDWDHPMHLQPTSPTAVKQVSVVWDAYEACKGAHGVCILTEWDEFKKLDYQKIFDNMQKPAFVFDGRNVVDAEKLREMGFIVYSIGKPLDGWLKDMPAVA

SEQ ID NO: 68653 - DNA, 1174 bp, Triticum aestivum
  misc_feature (1)..(1174): Ceres Seq. ID no. 13590940
acccctttcccttcgcctccaaaccccagcggcagaaccttatcccctgcgagtcttatccccctctgcaatggcggccaccctcttctccaccgcgctctcgcaccacttcatcccgctcccctccgccgccaggcccgccgccgcctcggcctccttcgcctgcggcccgctgcgcgccgtgtcggcgctgctggcgccgcggaggcggctcctgctgcccgtggccgtggccgtgtcgtccgagttcgggacggaggacgccgaggaggagcagagcgagggcgagggcggcggcgactccgaggccgagtactccgaggacctcaaggtcttcgtcggcaacctccccttcaccgtggacagcgcgcagctcgccgggctcttcgagcaggccggctccgtcgagatggtcgaggttgtatacgatagaatgaccggacggagccgtggatttggattcgtcacaatgggttcagctgaggaagttgctgccgccgttgagcaattcaatggctatacgttccaaggaagacctctcagggttaactccggaccaccaccacccagagatgaattcgcacccagaacaccgaggaccatgggcggcggtggcggcggcggcagctttgattcagctaacaagctctacgtcggaaacctatcctggggtgttgacaactcaacgctcgagaacctgttcagcgaacaaggaaaggtgcttgatgctaaggtcatctatgaccgcgacagtggcaggtcgaggggtttcggtttcgtcacctatggctctgccgacgaggtcaacaatgcgatctcaaacctcgacggcgtggaccttgacggcaggcagatccgggttaccgtcgcagagtcgaagccgagggagcaaaggcggttttaagagatcctgacgctggttagagattaatcatgtgttccgtaagtgttagtttgtagtttctactactattttctcgcggttgatgagagagactgggaagtgaatttgtataccggaagatttttgtcagccgtgcaactcgttgcgcctcttgatagaaaaagtagaaattttgtcaaagtcattcttatatgcttagcagcagagatgatgtacgataccattaaaaacccatctgaatgtttgttgatgctgtgtatggctctctcc

SEQ ID NO: 68654 - protein, 300 aa, Triticum aestivum
  peptide (1)..(300): Ceres Seq. ID no. 15221016
  misc_feature (216)..(287): Pfam Name: RNA recognition motif. (a.k.a. RRM, RBD, or RNP domain) Pfam Description: RNA recognition motif. (a.k.a. RRM, RBD, or RNP
  misc_feature (202)..(294): Homolog of NCBI NO: 15231817 NR Description: 29 kDa ribonucleoprotein, chloroplast
  misc_feature (202)..(294): Homolog of NCBI NO: 30693824 NR Description: 29 kDa ribonucleoprotein, chloroplast
  misc_feature (202)..(294): Homolog of NCBI NO: 681904 NR Description: cp29 [Arabidopsis thaliana]
  misc_feature (53)..(212): Homolog of NCBI NO: 15231817 NR Description: 29 kDa ribonucleoprotein, chloroplast
  misc_feature (53)..(212): Homolog of NCBI NO: 30693824 NR Description: 29 kDa ribonucleoprotein, chloroplast
  misc_feature (53)..(212): Homolog of NCBI NO: 681904 NR Description: cp29 [Arabidopsis thaliana]
  misc_feature (22)..(300): Homolog of NCBI NO: 1350820 NR Description: 30 kDa ribonucleoprotein, chloroplast precursor
  misc_feature (22)..(300): Homolog of NCBI NO: 12230584 NR Description: 29 kDa ribonucleoprotein A, chloroplast precursor
  misc_feature (24)..(297): Homolog of NCBI NO: 18921322 NR Description: putative ribonucleoprotein [Oryza sativa]
  misc_feature (24)..(297): Homolog of NCBI NO: 34913270 NR Description: putative ribonucleoprotein
PLSLRLQTPAAEPYPLRVLSPSAMAATLFSTALSHHFIPLPSAARPAAASASFACGPLRAVSALLAPRRRLLLPVAVAVSSEFGTEDAEEEQSEGEGGGDSEAEYSEDLKVFVGNLPFTVDSAQLAGLFEQAGSVEMVEVVYDRMTGRSRGFGFVTMGSAEEVAAAVEQFNGYTFQGRPLRVNSGPPPPRDEFAPRTPRTMGGGGGGGSFDSANKLYVGNLSWGVDNSTLENLFSEQGKVLDAKVIYDRDSGRSRGFGFVTYGSADEVNNAISNLDGVDLDGRQIRVTVAESKPREQRRF

SEQ ID NO: 68655 - protein, 277 aa, Triticum aestivum
  peptide (1)..(277): Ceres Seq. ID no. 15221017
  misc_feature (193)..(264): Pfam Name: RNA recognition motif. (a.k.a. RRM, RBD, or RNP domain) Pfam Description: RNA recognition motif. (a.k.a. RRM, RBD, or RNP
  misc_feature (179)..(271): Homolog of NCBI NO: 15231817 NR Description: 29 kDa ribonucleoprotein, chloroplast
  misc_feature (179)..(271): Homolog of NCBI NO: 30693824 NR Description: 29 kDa ribonucleoprotein, chloroplast
  misc_feature (179)..(271): Homolog of NCBI NO: 681904 NR Description: cp29 [Arabidopsis thaliana]
  misc_feature (30)..(189): Homolog of NCBI NO: 30693824 NR Description: 29 kDa ribonucleoprotein, chloroplast
  misc_feature (30)..(189): Homolog of NCBI NO: 15231817 NR Description: 29 kDa ribonucleoprotein, chloroplast
  misc_feature (30)..(189): Homolog of NCBI NO: 681904 NR Description: cp29 [Arabidopsis thaliana]
  misc_feature (1)..(277): Homolog of NCBI NO: 1350820 NR Description: 30 kDa ribonucleoprotein, chloroplast precursor
  misc_feature (1)..(277): Homolog of NCBI NO: 12230584 NR Description: 29 kDa ribonucleoprotein A, chloroplast precursor
  misc_feature (1)..(274): Homolog of NCBI NO: 18921322 NR Description: putative ribonucleoprotein [Oryza sativa]
  misc_feature (1)..(274): Homolog of NCBI NO: 34913270 NR Description: putative ribonucleoprotein
MAATLFSTALSHHFIPLPSAARPAAASASFACGPLRAVSALLAPRRRLLLPVAVAVSSEFGTEDAEEEQSEGEGGGDSEAEYSEDLKVFVGNLPFTVDSAQLAGLFEQAGSVEMVEVVYDRMTGRSRGFGFVTMGSAEEVAAAVEQFNGYTFQGRPLRVNSGPPPPRDEFAPRTPRTMGGGGGGGSFDSANKLYVGNLSWGVDNSTLENLFSEQGKVLDAKVIYDRDSGRSRGFGFVTYGSADEVNNAISNLDGVDLDGRQIRVTVAESKPREQRRF

SEQ ID NO: 68656 - protein, 164 aa, Triticum aestivum
  peptide (1)..(164): Ceres Seq. ID no. 15221018
  misc_feature (80)..(151): Pfam Name: RNA recognition motif. (a.k.a. RRM, RBD, or RNP domain) Pfam Description: RNA recognition motif. (a.k.a. RRM, RBD, or RNP
  misc_feature (66)..(158): Homolog of NCBI NO: 15231817 NR Description: 29 kDa ribonucleoprotein, chloroplast
  misc_feature (66)..(158): Homolog of NCBI NO: 30693824 NR Description: 29 kDa ribonucleoprotein, chloroplast
  misc_feature (66)..(158): Homolog of NCBI NO: 681904 NR Description: cp29 [Arabidopsis thaliana]
  misc_feature (1)..(76): Homolog of NCBI NO: 15231817 NR Description: 29 kDa ribonucleoprotein, chloroplast
  misc_feature (1)..(76): Homolog of NCBI NO: 30693824 NR Description: 29 kDa ribonucleoprotein, chloroplast
  misc_feature (1)..(76): Homolog of NCBI NO: 681904 NR Description: cp29 [Arabidopsis thaliana]
  misc_feature (1)..(164): Homolog of NCBI NO: 1350820 NR Description: 30 kDa ribonucleoprotein, chloroplast precursor
  misc_feature (1)..(164): Homolog of NCBI NO: 12230584 NR Description: 29 kDa ribonucleoprotein A, chloroplast precursor
  misc_feature (1)..(161): Homolog of NCBI NO: 18921322 NR Description: putative ribonucleoprotein [Oryza sativa]
  misc_feature (1)..(161): Homolog of NCBI NO: 34913270 NR Description: putative ribonucleoprotein
MVEVVYDRMTGRSRGFGFVTMGSAEEVAAAVEQFNGYTFQGRPLRVNSGPPPPRDEFAPRTPRTMGGGGGGGSFDSANKLYVGNLSWGVDNSTLENLFSEQGKVLDAKVIYDRDSGRSRGFGFVTYGSADEVNNAISNLDGVDLDGRQIRVTVAESKPREQRRF

SEQ ID NO: 68657 - DNA, 988 bp, Triticum aestivum
  misc_feature (1)..(988): Ceres Seq. ID no. 12627129
atcaatcaatccgcggaatctatcccccccgcagcagacgccatggccgccgcaccgacgccgcagcccttgctcccggtgaccaacccctcctccgggggcggcggctctgccccgtccgccggcagcggcctcaccgactccgcgctcgccacgccggccttccggctcttcctcagcagggtctccgacacggcgcggcgctcgctcgccgaccgccgcccctggacggagctcatcgaccgctcggccatctcgcggccggactccctctccgaggccacctcgcgattgcgccgcaacctgggctacttccgcgtcaactacgccgccgtggtggccttctccctcgcggcctccctcctggcgcaccccttctcgctgctcgtcctcctcggcatcctcggcgcctggtgcttcctctacgtcttccgcgcgcccgaccagcccgtcgtgctcttcggccgcaccttcaccgaccgggagacgctgctcggcctcgtcgtctcgtcgctgctcgccttcttcctcacgtccgtcgcctcgctcatcatctccggcctgctcgtcggcggcgcgctggtggcggtgcacggcgcgttccgcatgcccgaggacctcttcctcgacgactcgagctctgtgtcaagcggcaacacttcccacaggctgctctccttcctcgcgtcgcccggatctggtgtttgagcctgcgcgagatctggtagccttcttgcatcaacgagttcatctcaagtctgagtctaatttcgcgagatctgattttggttttaatatgtatctccagttattcaaagatccgcgtgaagctgtattctctcgtatttgaccagatgttaagcattagcaaattgatcactgtgcactatgaatcgattgagcgttagcaaattgatccgcattattagctgtattcgctcgtatttaaccagattgttcatatacaggttttatggtttccactgtg

SEQ ID NO: 68658 - protein, 241 aa, Triticum aestivum
  peptide (1)..(241): Ceres Seq. ID no. 12627130
QSIRGIYPPRSRRHGRRTDAAALAPGDQPLLRGRRLCPVRRQRPHRLRARHAGLPALPQQGLRHGAALARRPPPLDGAHRPLGHLAAGLPLRGHLAIAPQPGLLPRQLRRRGGLLPRGLPPGAPLLAARPPRHPRRLVLPLRLPRARPARRALRPHLHRPGDAARPRRLVAARLLPHVRRLAHHLRPARRRRAGGGARRVPHARGPLPRRLELCVKRQHFPQAALLPRVARIWCLSLREIW

SEQ ID NO: 68659 - protein, 235 aa, Triticum aestivum
  peptide (1)..(235): Ceres Seq. ID no. 12627131
  misc_feature (9)..(218): Homolog of NCBI NO: 40539036 NR Description: putative prenylated rab acceptor protein
  misc_feature (48)..(214): Homolog of NCBI NO: 18405248 NR Description: expressed protein
  misc_feature (23)..(235): Homolog of NCBI NO: 15240698 NR Description: putative protein
  misc_feature (20)..(235): Homolog of NCBI NO: 15241022 NR Description: putative protein; protein id: At5g01640.1
  misc_feature (18)..(233): Homolog of NCBI NO: 15224494 NR Description: unknown protein; protein id: At2g38360.1
  misc_feature (15)..(230): Homolog of NCBI NO: 15226664 NR Description: unknown protein; protein id: At2g40380.1
  misc_feature (20)..(235): Homolog of NCBI NO: 15450978 NR Description: putative protein [Arabidopsis thaliana]
  misc_feature (20)..(235): Homolog of NCBI NO: 15228824 NR Description: putative protein
  misc_feature (23)..(235): Homolog of NCBI NO: 18072825 NR Description: prenylated Rab receptor 2 [Arabidopsis thaliana]
  misc_feature (23)..(235): Homolog of NCBI NO: 15239101 NR Description: putative protein; protein id: At5g05380.1
INQSAESIPPAADAMAAAPTPQPLLPVTNPSSGGGGSAPSAGSGLTDSALATPAFRLFLSRVSDTARRSLADRRPWTELIDRSAISRPDSLSEATSRLRRNLGYFRVNYAAVVAFSLAASLLAHPFSLLVLLGILGAWCFLYVFRAPDQPVVLFGRTFTDRETLLGLVVSSLLAFFLTSVASLIISGLLVGGALVAVHGAFRMPEDLFLDDSSSVSSGNTSHRLLSFLASPGSGV

SEQ ID NO: 68660 - protein, 221 aa, Triticum aestivum
  peptide (1)..(221): Ceres Seq. ID no. 12627132
  misc_feature (1)..(204): Homolog of NCBI NO: 40539036 NR Description: putative prenylated rab acceptor protein
  misc_feature (34)..(200): Homolog of NCBI NO: 18405248 NR Description: expressed protein
  misc_feature (9)..(221): Homolog of NCBI NO: 15240698 NR Description: putative protein
  misc_feature (6)..(221): Homolog of NCBI NO: 15241022 NR Description: putative protein; protein id: At5g01640.1
  misc_feature (4)..(219): Homolog of NCBI NO: 15224494 NR Description: unknown protein; protein id: At2g38360.1
  misc_feature (1)..(216): Homolog of NCBI NO: 15226664 NR Description: unknown protein; protein id: At2g40380.1
  misc_feature (6)..(221): Homolog of NCBI NO: 15450978 NR Description: putative protein [Arabidopsis thaliana]
  misc_feature (6)..(221): Homolog of NCBI NO: 15228824 NR Description: putative protein
  misc_feature (9)..(221): Homolog of NCBI NO: 18072825 NR Description: prenylated Rab receptor 2 [Arabidopsis thaliana]
  misc_feature (9)..(221): Homolog of NCBI NO: 15239101 NR Description: putative protein; protein id: At5g05380.1
MAAAPTPQPLLPVTNPSSGGGGSAPSAGSGLTDSALATPAFRLFLSRVSDTARRSLADRRPWTELIDRSAISRPDSLSEATSRLRRNLGYFRVNYAAVVAFSLAASLLAHPFSLLVLLGILGAWCFLYVFRAPDQPVVLFGRTFTDRETLLGLVVSSLLAFFLTSVASLIISGLLVGGALVAVHGAFRMPEDLFLDDSSSVSSGNTSHRLLSFLASPGSGV

SEQ ID NO: 68661 - DNA, 1443 bp, Triticum aestivum
  misc_feature (1)..(1443): Ceres Seq. ID no. 13654285
agaacatcctaatcgaaaaaacttcccccaaccaaaagacagcaccgtgtgttctcgtgtgtatatgtctatggcctaatcgagaccatggacgttaccggggacgccggtggaggtcgccgccccaacttccccctgcagctcctcgagaagaaggaggagcatccgtgctccatctccccggctgctgggctcgggacgaatgggtcggcgacgggggagctgcaggtgcggaaggcggcaccgcctaagcggaccacgagcaaggaccggcatacgaaggtggacgggcgcggccgccgcatccggatgccggcgatctgcgcggcgcgggtgttccagctgacgcgggaactggggcacaagacggacggcgagaccatcgagtggctcctgcagcaggcggagcccgctgtgattgcggccaccggcacaggcaccatcccggccaacttcacatctctcaacatctccctccgctcctccggctccatgctctccaccatacccgcccacctccgcgccgccggcctgccggggtctcgctttggaggtggcccatgggcggacgcgtgggaccgcttcgtcggtctcgggttcggcggtggcctcgagagcccggcctccaccaccacctcgtcgtcgtccccgctgctgctgagcttccactccggaagcgtcggcctcgacgtttcgccgtcgtcggcgacggctgcggccaacacggaactgtccaggaagcggcgttgggagcaagaaatgcagcagcagcagcaacaacatcatcaccaccaacagcaacagcagcaacagtaccagcaacagatggccgggtacacgcagagccaaatgccgggcactgtgtggatggtgccgacgagcaacgcccaggccgccggagcggcgcctgccggtggcggcgagtcgatctggacgttcccgcaacccggaagcggcggcggcggcggctcggcgaccgtgtaccgcggcgtgccgagcgggctacatttcatgaacatccccgcgccgatggcagtgcacgcgcagcagctgggactcggccaggccggcggcggcggatcagcagcagcgggcgaggggcacatggggatcctcgccgcgctcaacgcgtaccgtgggcagcatgcagcggcgtcggaggtcaccgtggcggggcacaatggagcagctgaagggactactcaccatcaacatcagaatcagcatcagcatctgcagcacgggggtggcgagccgaacgagagcatgagcggcagcgactcgtaggacttcgtgaccgctggtccgttcgacagctttggcttaccaattttcgtctttggatttgttcttctttggtttgtttctgttcttgactcgatcgcttgttatggctttgttccttctccaaattcttgcacggttcatacgattgcaacttgc

SEQ ID NO: 68662 - protein, 399 aa, Triticum aestivum
  peptide (1)..(399): Ceres Seq. ID no. 15219637
  misc_feature (50)..(293): Pfam Name: TCP family transcription factor Pfam Description: TCP family transcription factor
  misc_feature (44)..(131): Homolog of NCBI NO: 15242216 NR Description: TCP family transcription factor, putative
  misc_feature (54)..(196): Homolog of NCBI NO: 15232059 NR Description: TCP family transcription factor, putative
  misc_feature (8)..(139): Homolog of NCBI NO: 20975251 NR Description: transcription factor PCF3 [Oryza sativa (japonica
  misc_feature (30)..(138): Homolog of NCBI NO: 15219640 NR Description: TCP family transcription factor, putative
  misc_feature (51)..(395): Homolog of NCBI NO: 15217857 NR Description: TCP family transcription factor, putative
  misc_feature (29)..(353): Homolog of NCBI NO: 15218305 NR Description: TCP family transcription factor, putative
  misc_feature (27)..(203): Homolog of NCBI NO: 5731257 NR Description: auxin-induced basic helix-loop-helix
  misc_feature (6)..(158): Homolog of NCBI NO: 18409345 NR Description: TCP family transcription factor, putative
  misc_feature (50)..(382): Homolog of NCBI NO: 22331641 NR Description: TCP family transcription factor, putative
  misc_feature (50)..(382): Homolog of NCBI NO: 11357581 NR Description: hypothetical protein F1P2.170 - Arabidopsis
MDVTGDAGGGRRPNFPLQLLEKKEEHPCSISPAAGLGTNGSATGELQVRKAAPPKRTTSKDRHTKVDGRGRRIRMPAICAARVFQLTRELGHKTDGETIEWLLQQAEPAVIAATGTGTIPANFTSLNISLRSSGSMLSTIPAHLRAAGLPGSRFGGGPWADAWDRFVGLGFGGGLESPASTTTSSSSPLLLSFHSGSVGLDVSPSSATAAANTELSRKRRWEQEMQQQQQQHHHHQQQQQQQYQQQMAGYTQSQMPGTVWMVPTSNAQAAGAAPAGGGESIWTFPQPGSGGGGGSATVYRGVPSGLHFMNIPAPMAVHAQQLGLGQAGGGGSAAAGEGHMGILAALNAYRGQHAAASEVTVAGHNGAAEGTTHHQHQNQHQHLQHGGGEPNESMSGSDS

SEQ ID NO: 68663 - protein, 325 aa, Triticum aestivum
  peptide (1)..(325): Ceres Seq. ID no. 15219638
  misc_feature (1)..(219): Pfam Name: TCP family transcription factor Pfam Description: TCP family transcription factor
  misc_feature (1)..(57): Homolog of NCBI NO: 15242216 NR Description: TCP family transcription factor, putative
  misc_feature (1)..(122): Homolog of NCBI NO: 15232059 NR Description: TCP family transcription factor, putative
  misc_feature (1)..(65): Homolog of NCBI NO: 20975251 NR Description: transcription factor PCF3 [Oryza sativa (japonica
  misc_feature (1)..(64): Homolog of NCBI NO: 15219640 NR Description: TCP family transcription factor, putative
  misc_feature (1)..(321): Homolog of NCBI NO: 15217857 NR Description: TCP family transcription factor, putative
  misc_feature (1)..(279): Homolog of NCBI NO: 15218305 NR Description: TCP family transcription factor, putative
  misc_feature (1)..(129): Homolog of NCBI NO: 5731257 NR Description: auxin-induced basic helix-loop-helix
  misc_feature (1)..(84): Homolog of NCBI NO: 18409345 NR Description: TCP family transcription factor, putative
  misc_feature (1)..(308): Homolog of NCBI NO: 22331641 NR Description: TCP family transcription factor, putative
  misc_feature (1)..(308): Homolog of NCBI NO: 11357581 NR Description: hypothetical protein F1P2.170 - Arabidopsis
MPAICAARVFQLTRELGHKTDGETIEWLLQQAEPAVIAATGTGTIPANFTSLNISLRSSGSMLSTIPAHLRAAGLPGSRFGGGPWADAWDRFVGLGFGGGLESPASTTTSSSSPLLLSFHSGSVGLDVSPSSATAAANTELSRKRRWEQEMQQQQQQHHHHQQQQQQQYQQQMAGYTQSQMPGTVWMVPTSNAQAAGAAPAGGGESIWTFPQPGSGGGGGSATVYRGVPSGLHFMNIPAPMAVHAQQLGLGQAGGGGSAAAGEGHMGILAALNAYRGQHAAASEVTVAGHNGAAEGTTHHQHQNQHQHLQHGGGEPNESMSGSDS

SEQ ID NO: 68664 - protein, 264 aa, Triticum aestivum
  peptide (1)..(264): Ceres Seq. ID no. 15219639
  misc_feature (1)..(158): Pfam Name: TCP family transcription factor Pfam Description: TCP family transcription factor
  misc_feature (1)..(27): Homolog of NCBI NO: 32487528 NR Description: OSJNBb0026E15.1 [Oryza sativa (japonica
  misc_feature (1)..(69): Homolog of NCBI NO: 15225538 NR Description: TCP family transcription factor, putative
  misc_feature (1)..(22): Homolog of NCBI NO: 15241596 NR Description: TCP family transcription factor, putative
  misc_feature (1)..(61): Homolog of NCBI NO: 15232059 NR Description: TCP family transcription factor, putative
  misc_feature (1)..(260): Homolog of NCBI NO: 15217857 NR Description: TCP family transcription factor, putative
  misc_feature (1)..(218): Homolog of NCBI NO: 15218305 NR Description: TCP family transcription factor, putative
  misc_feature (1)..(68): Homolog of NCBI NO: 5731257 NR Description: auxin-induced basic helix-loop-helix
  misc_feature (1)..(23): Homolog of NCBI NO: 18409345 NR Description: TCP family transcription factor, putative
  misc_feature (1)..(247): Homolog of NCBI NO: 22331641 NR Description: TCP family transcription factor, putative
  misc_feature (1)..(247): Homolog of NCBI NO: 11357581 NR Description: hypothetical protein F1P2.170 - Arabidopsis
MLSTIPAHLRAAGLPGSRFGGGPWADAWDRFVGLGFGGGLESPASTTTSSSSPLLLSFHSGSVGLDVSPSSATAAANTELSRKRRWEQEMQQQQQQHHHHQQQQQQQYQQQMAGYTQSQMPGTVWMVPTSNAQAAGAAPAGGGESIWTFPQPGSGGGGGSATVYRGVPSGLHFMNIPAPMAVHAQQLGLGQAGGGGSAAAGEGHMGILAALNAYRGQHAAASEVTVAGHNGAAEGTTHHQHQNQHQHLQHGGGEPNESMSGSDS

SEQ ID NO: 68665 - DNA, 1242 bp, Triticum aestivum
  misc_feature (1)..(1242): Ceres Seq. ID no. 14302299
gcatagctcacatcacatcaatacatcaccaccaccaccaccctcctctctcctctccctccctctctcctcgtagacaccttctccttctaggtctccttgcctgtgcaggctccagcacgtacactcaaggaccgacgacgacgatgcggcttagctgcaacggctgccgcgtgctgcggaagggctgcagcgaggactgcagcatccgcccctgcctgcagtggatcaagagccccgaggcgcaggccaacgccaccgtcttcctcgccaagttctacggccgcgcggggctcatgaacctcatcaacgccggcacggacgacagcctccgccccggcatcttccgctcgctcctctacgaggcctgcggccggatcgtcaaccccatatacggctccgtcggcctgctctggtccaacaactggcagatgtgccaggccgccgtcgaggccgtcctcagcggcaagcccatcgtccaggtctcctccgaggatgccgccgccgaccggacaccgccgctcaaggcgtacgacatccgccacgtctccacctcgccagccgccgacgggaggctccacaaggtcgccaagccgggtcgcacccgcttcaagcgcgcgtcctccgcctcgtcccaccacaacccgtccagcgactccaacaacaagcccaagcccaagccgcagcctcagacgcgggcgcccacggcggaggaggagctggatcgtcaacaccgcaaggagatggaggagggcgcgtcccagcgtgctccgagccacgaatcctccgacagccgacacgaggaccccgtggagccacactgccagcaagaggcgtccgcagacacggaggccgaggcggggtcgcacgtcagccaggcggagcaggagcaggagcagagcacagagccggccgcagagcacgcggaggaggtcgaaaaggaggaggacgaagaactagcgctcgagcttacgcttggattcgctcccgtcgcagtacggccggccggatttcacctgagcgtccggaccgcggcggagccggctttcgtcgggctccggttcctctaaaagcacatttaccttgtgaaaagaatatagagctatttgatggactcttttacctttaattggaaaaaaattaggtccgttagttcgtttttgtttcatggttgcaatgagtgtacagacaatagctccctcatggccaagatttttccaataaaaaatgtgttttgctgac

SEQ ID NO: 68666 - protein, 355 aa, Triticum aestivum
  peptide (1)..(355): Ceres Seq. ID no. 14302300
  misc_feature (52)..(158): Pfam Name: Protein of unknown function DUF260 Pfam Description: Protein of unknown function DUF260
  misc_feature (51)..(264): Homolog of NCBI NO: 15240739 NR Description: lateral organ boundaries (LOB) domain protein 37
  misc_feature (51)..(240): Homolog of NCBI NO: 21553886 NR Description: unknown [Arabidopsis thaliana]
  misc_feature (51)..(240): Homolog of NCBI NO: 15229644 NR Description: lateral organ boundaries (LOB) domain protein,
  misc_feature (49)..(190): Homolog of NCBI NO: 15221429 NR Description: lateral organ boundaries (LOB) domain protein 42
  misc_feature (49)..(226): Homolog of NCBI NO: 15219829 NR Description: lateral organ boundaries (LOB) domain family
  misc_feature (49)..(329): Homolog of NCBI NO: 34895540 NR Description: unnamed protein product [Oryza sativa (japonica
  misc_feature (49)..(262): Homolog of NCBI NO: 18396229 NR Description: lateral organ boundaries (LOB) domain protein 41
  misc_feature (49)..(262): Homolog of NCBI NO: 21554191 NR Description: unknown [Arabidopsis thaliana]
  misc_feature (49)..(222): Homolog of NCBI NO: 32395577 NR Description: seed specific protein Bn15D17A [Brassica napus]
  misc_feature (49)..(333): Homolog of NCBI NO: 34914608 NR Description: P0520B06.17 [Oryza sativa (japonica
IAHITSIHHHHHHPPLSSPSLSPRRHLLLLGLLACAGSSTYTQGPTTTMRLSCNGCRVLRKGCSEDCSIRPCLQWIKSPEAQANATVFLAKFYGRAGLMNLINAGTDDSLRPGIFRSLLYEACGRIVNPIYGSVGLLWSNNWQMCQAAVEAVLSGKPIVQVSSEDAAADRTPPLKAYDIRHVSTSPAADGRLHKVAKPGRTRFKRASSASSHHNPSSDSNNKPKPKPQPQTRAPTAEEELDRQHRKEMEEGASQRAPSHESSDSRHEDPVEPHCQQEASADTEAEAGSHVSQAEQEQEQSTEPAAEHAEEVEKEEDEELALELTLGFAPVAVRPAGFHLSVRTAAEPAFVGLRFL

SEQ ID NO: 68667 - protein, 307 aa, Triticum aestivum
  peptide (1)..(307): Ceres Seq. ID no. 14302301
  misc_feature (4)..(110): Pfam Name: Protein of unknown function DUF260 Pfam Description: Protein of unknown function DUF260
  misc_feature (3)..(216): Homolog of NCBI NO: 15240739 NR Description: lateral organ boundaries (LOB) domain protein 37
  misc_feature (3)..(192): Homolog of NCBI NO: 21553886 NR Description: unknown [Arabidopsis thaliana]
  misc_feature (3)..(192): Homolog of NCBI NO: 15229644 NR Description: lateral organ boundaries (LOB) domain protein,
  misc_feature (1)..(142): Homolog of NCBI NO: 15221429 NR Description: lateral organ boundaries (LOB) domain protein 42
  misc_feature (1)..(178): Homolog of NCBI NO: 15219829 NR Description: lateral organ boundaries (LOB) domain family
  misc_feature (1)..(281): Homolog of NCBI NO: 34895540 NR Description: unnamed protein product [Oryza sativa (japonica
  misc_feature (1)..(214): Homolog of NCBI NO: 18396229 NR Description: lateral organ boundaries (LOB) domain protein 41
  misc_feature (1)..(214): Homolog of NCBI NO: 21554191 NR Description: unknown [Arabidopsis thaliana]
  misc_feature (1)..(174): Homolog of NCBI NO: 32395577 NR Description: seed specific protein Bn15D17A [Brassica napus]
  misc_feature (1)..(285): Homolog of NCBI NO: 34914608 NR Description: P0520B06.17 [Oryza sativa (japonica
MRLSCNGCRVLRKGCSEDCSIRPCLQWIKSPEAQANATVFLAKFYGRAGLMNLINAGTDDSLRPGIFRSLLYEACGRIVNPIYGSVGLLWSNNWQMCQAAVEAVLSGKPIVQVSSEDAAADRTPPLKAYDIRHVSTSPAADGRLHKVAKPGRTRFKRASSASSHHNPSSDSNNKPKPKPQPQTRAPTAEEELDRQHRKEMEEGASQRAPSHESSDSRHEDPVEPHCQQEASADTEAEAGSHVSQAEQEQEQSTEPAAEHAEEVEKEEDEELALELTLGFAPVAVRPAGFHLSVRTAAEPAFVGLRFL

SEQ ID NO: 68668 - protein, 257 aa, Triticum aestivum
  peptide (1)..(257): Ceres Seq. ID no. 14302302
  misc_feature (1)..(60): Pfam Name: Protein of unknown function DUF260 Pfam Description: Protein of unknown function DUF260
  misc_feature (1)..(166): Homolog of NCBI NO: 15240739 NR Description: lateral organ boundaries (LOB) domain protein 37
  misc_feature (1)..(142): Homolog of NCBI NO: 21553886 NR Description: unknown [Arabidopsis thaliana]
  misc_feature (1)..(142): Homolog of NCBI NO: 15229644 NR Description: lateral organ boundaries (LOB) domain protein,
  misc_feature (1)..(92): Homolog of NCBI NO: 15221429 NR Description: lateral organ boundaries (LOB) domain protein 42
  misc_feature (1)..(128): Homolog of NCBI NO: 15219829 NR Description: lateral organ boundaries (LOB) domain family
  misc_feature (1)..(231): Homolog of NCBI NO: 34895540 NR Description: unnamed protein product [Oryza sativa (japonica
  misc_feature (1)..(164): Homolog of NCBI NO: 18396229 NR Description: lateral organ boundaries (LOB) domain protein 41
  misc_feature (1)..(164): Homolog of NCBI NO: 21554191 NR Description: unknown [Arabidopsis thaliana]
  misc_feature (1)..(124): Homolog of NCBI NO: 32395577 NR Description: seed specific protein Bn15D17A [Brassica napus]
  misc_feature (1)..(235): Homolog of NCBI NO: 34914608 NR Description: P0520B06.17 [Oryza sativa (japonica
MNLINAGTDDSLRPGIFRSLLYEACGRIVNPIYGSVGLLWSNNWQMCQAAVEAVLSGKPIVQVSSEDAAADRTPPLKAYDIRHVSTSPAADGRLHKVAKPGRTRFKRASSASSHHNPSSDSNNKPKPKPQPQTRAPTAEEELDRQHRKEMEEGASQRAPSHESSDSRHEDPVEPHCQQEASADTEAEAGSHVSQAEQEQEQSTEPAAEHAEEVEKEEDEELALELTLGFAPVAVRPAGFHLSVRTAAEPAFVGLRFL

SEQ ID NO: 68669 - DNA, 625 bp, Triticum aestivum
  misc_feature (1)..(625): Ceres Seq. ID no. 13596497
aaggagaaatctgctcgtcgtggtctctcttgtggagtgcggtttctaaattcgagagagaagagagtcctacccgctcctatctcctcttgcgagtccaatcgcgaggatagggatggagagctccaacggcaagccgccgcggggagaggaagaggggaaggcggcggggtcgatcggaggccacgagtcgctgcacaggctcctcgagtccaatctccctcccgagctcttcaaggaggcaagccggttgcttttggggttgaattgtgcacaccctcttgaggctatttccctgcctggggccaccactgatcttgctggagcgcataatttcgatgtgcaggcattccgttttaacgctgacaaagagcatatgagacagccgcggattgttcgagttggcttaattcagaactcaattgctgttccaacgacttgtcattttgctgatcaaaagaagtctatcatggagaaagtaaaaccccatcatagacgcagctgttgcttctggtgtcaatattttgtgcttacaggaagcctggannntgccatttgccttctgcacgcgtgaaaaacgatggtgtgagtttgctgagcctgttgatggagaatctactcagtt

SEQ ID NO: 68670 - protein, 152 aa, Triticum aestivum
  peptide (1)..(152): Ceres Seq. ID no. 13596498
  misc_feature (25)..(123): Homolog of NCBI NO: 19527212 NR Description: expressed sequence AI195023 [Mus musculus]
  misc_feature (25)..(123): Homolog of NCBI NO: 6288790 NR Description: beta-ureidopropionase [Homo sapiens]
  misc_feature (25)..(123): Homolog of NCBI NO: 7706509 NR Description: beta-ureidopropionase [Homo sapiens]
  misc_feature (25)..(123): Homolog of NCBI NO: 16758704 NR Description: ureidopropionase, beta [Rattus norvegicus]
  misc_feature (25)..(123): Homolog of NCBI NO: 3108075 NR Description: putative beta-ureidopropionase [Manduca sexta]
  misc_feature (25)..(123): Homolog of NCBI NO: 14334061 NR Description: beta-alanine synthase [Dictyostelium discoideum]
  misc_feature (25)..(123): Homolog of NCBI NO: 40215848 NR Description: LD13390p [Drosophila melanogaster]
  misc_feature (25)..(123): Homolog of NCBI NO: 21358471 NR Description: CG3027-PA [Drosophila melanogaster]
  misc_feature (14)..(124): Homolog of NCBI NO: 30698009 NR Description: beta-ureidopropionase [Arabidopsis thaliana]
  misc_feature (1)..(124): Homolog of NCBI NO: 22775671 NR Description: contains ESTs
  misc_feature (144)..(144): Xaa is any aa, unknown or other
  misc_feature (145)..(145): Xaa is any aa, unknown or other
MESSNGKPPRGEEEGKAAGSIGGHESLHRLLESNLPPELFKEASRLLLGLNCAHPLEAISLPGATTDLAGAHNFDVQAFRFNADKEHMRQPRIVRVGLIQNSIAVPTTCHFADQKKSIMEKVKPHHRRSCCFWCQYFVLTGSLXXAICLLHA

SEQ ID NO: 68671 - protein, 94 aa, Triticum aestivum
  peptide (1)..(94): Ceres Seq. ID no. 13596499
KEKSARRGLSCGVRFLNSREKRVLPAPISSCESNREDRDGELQRQAAAGRGRGEGGGVDRRPRVAAQAPRVQSPSRALQGGKPVAFGVELCTPS

SEQ ID NO: 68672 - DNA, 1641 bp, Triticum aestivum
  misc_feature (1)..(1641): Ceres Seq. ID no. 13596115
ccagctctccctctcgctcccggcggcggctgcctcgtcggagtcgcccctcgacggcggctagcctcgtcggacgcgctcctcgacggcggtgcgagcctccctgcgcggtctctggggattcttgcagaacttgagtacagtcctgttgggttcatcaccagctgttaaagagtgattcagtgatagagaccataacaggtggcagtggtaagcttagaggagatgtaccgtggtgggcttgaccgcttcaagaaagctcaggccttggagccgttctcggtgcagcagtctggttccggcgcaaagagcgtgccccctgcggtgaaagtgcagccagctccgttggtgccgccgcaaagctcacatcttggtcccagccagagtcagcatgctccgcagagtgctggctcaagcatgggcgggcaagaagctgctggggctcccagacccgccgggacacagtttggtggtgggcagtcgacgtggcaaccgccggactgggcaattgagccgcgccctggggtttactatcttgaggtgatgaaggatgggaatgccattgataggatcaatctggacaagaagaggcatatatttgggaggcaggtgcctgcttgcgagattgtcttggaccatcagtctgtctcacgccaacatgctgctgtcgttccacacaaaaatggaagcatctatgttatcgatttaggatctgtccatggtacatttgttgcaaacgagagattaaccaaggacaaccctgttgaacttgaagttggacagtcacttcgctttgctgcatcaaccagggcgtatgttctacgaaagaacacagctgcttttttccccactcaaagtctcccttcagatgtgagtttgccgtctcctccagactctgacgatgaagacgccgttgttgcatacaatacaatacttaatcgctatggtgttagcaaatcagacgtgccattgaagagaaaaggttcttctggggatgcttctgcttctgctgtaaatgatgacaaccaggcagtcggtagaccatcaaagagaatcagaaagcggagagtgtcatttagagatcaggttggtggagagcttattcaggtggttgggatttctgatggtgcagatgttgaaactgaaccaggcccagtaggtgtgaaggaaggcagtcttgttgggaagtacgagtctcttgtacaggtcactgtcataccaaaaggaaaggagcaaacttcgtcaaaggacagtgcctcccacagtggggtaacagataagctacaacatatgcttaacaaagttaaaagcacatccagaggtggtatgtatgatgacctttacggggactctgttccagcaaaactgggatcatcatgggcgtacaaatcagatggccagccagagcaagtcaaagttgttgatgaaaagaagtctagcagggacgttggtgcaaatccagctgatgatagtgatgatgacttgtttggcgactagttattttgtcacatttccagttagtagtgaattgccttgattacaaacacatggcagcagaaatgttatgtttgccttgggtattttgctttgttctacatgattgtatcctgctgtgaatcaaggtaatctcttttttgcctc

SEQ ID NO: 68673 - protein, 423 aa, Triticum aestivum
  peptide (1)..(423): Ceres Seq. ID no. 15221780
  misc_feature (123)..(191): Pfam Name: FHA domain Pfam Description: FHA domain
  misc_feature (91)..(286): Homolog of NCBI NO: 32766445 NR Description: Unknown (protein for MGC:63827) [Danio rerio]
  misc_feature (17)..(295): Homolog of NCBI NO: 34898708 NR Description: contains ESTs
  misc_feature (86)..(273): Homolog of NCBI NO: 19922418 NR Description: Nuclear inhibitor of PP1 CG8980-PA [Drosophila
  misc_feature (91)..(320): Homolog of NCBI NO: 38174471 NR Description: Unknown (protein for MGC:69160) [Xenopus laevis]
  misc_feature (77)..(286): Homolog of NCBI NO: 27807053 NR Description: protein phosphatase 1, regulatory (inhibitor)
  misc_feature (77)..(286): Homolog of NCBI NO: 22122685 NR Description: RIKEN cDNA 6330548N22 [Mus musculus]
  misc_feature (77)..(286): Homolog of NCBI NO: 13699256 NR Description: protein phosphatase 1 regulatory inhibitor
  misc_feature (77)..(286): Homolog of NCBI NO: 27732693 NR Description: similar to expressed sequence AU044684
  misc_feature (79)..(393): Homolog of NCBI NO: 15238804 NR Description: expressed protein [Arabidopsis thaliana]
  misc_feature (1)..(423): Homolog of NCBI NO: 24414059 NR Description: OJ1136_A10.4 [Oryza sativa (japonica
MYRGGLDRFKKAQALEPFSVQQSGSGAKSVPPAVKVQPAPLVPPQSSHLGPSQSQHAPQSAGSSMGGQEAAGAPRPAGTQFGGGQSTWQPPDWAIEPRPGVYYLEVMKDGNAIDRINLDKKRHIFGRQVPACEIVLDHQSVSRQHAAVVPHKNGSIYVIDLGSVHGTFVANERLTKDNPVELEVGQSLRFAASTRAYVLRKNTAAFFPTQSLPSDVSLPSPPDSDDEDAVVAYNTILNRYGVSKSDVPLKRKGSSGDASASAVNDDNQAVGRPSKRIRKRRVSFRDQVGGELIQVVGISDGADVETEPGPVGVKEGSLVGKYESLVQVTVIPKGKEQTSSKDSASHSGVTDKLQHMLNKVKSTSRGGMYDDLYGDSVPAKLGSSWAYKSDGQPEQVKVVDEKKSSRDVGANPADDSDDDLFGD

SEQ ID NO: 68674 - protein, 359 aa, Triticum aestivum
  peptide (1)..(359): Ceres Seq. ID no. 15221781
  misc_feature (59)..(127): Pfam Name: FHA domain Pfam Description: FHA domain
  misc_feature (27)..(222): Homolog of NCBI NO: 32766445 NR Description: Unknown (protein for MGC:63827) [Danio rerio]
  misc_feature (1)..(231): Homolog of NCBI NO: 34898708 NR Description: contains ESTs
  misc_feature (22)..(209): Homolog of NCBI NO: 19922418 NR Description: Nuclear inhibitor of PP1 CG8980-PA [Drosophila
  misc_feature (27)..(256): Homolog of NCBI NO: 38174471 NR Description: Unknown (protein for MGC:69160) [Xenopus laevis]
  misc_feature (13)..(222): Homolog of NCBI NO: 27807053 NR Description: protein phosphatase 1, regulatory (inhibitor)
  misc_feature (13)..(222): Homolog of NCBI NO: 22122685 NR Description: RIKEN cDNA 6330548N22 [Mus musculus]
  misc_feature (13)..(222): Homolog of NCBI NO: 13699256 NR Description: protein phosphatase 1 regulatory inhibitor
  misc_feature (13)..(222): Homolog of NCBI NO: 27732693 NR Description: similar to expressed sequence AU044684
  misc_feature (15)..(329): Homolog of NCBI NO: 15238804 NR Description: expressed protein [Arabidopsis thaliana]
  misc_feature (1)..(359): Homolog of NCBI NO: 24414059 NR Description: OJ1136_A10.4 [Oryza sativa (japonica
MGGQEAAGAPRPAGTQFGGGQSTWQPPDWAIEPRPGVYYLEVMKDGNAIDRINLDKKRHIFGRQVPACEIVLDHQSVSRQHAAVVPHKNGSIYVIDLGSVHGTFVANERLTKDNPVELEVGQSLRFAASTRAYVLRKNTAAFFPTQSLPSDVSLPSPPDSDDEDAVVAYNTILNRYGVSKSDVPLKRKGSSGDASASAVNDDNQAVGRPSKRIRKRRVSFRDQVGGELIQVVGISDGADVETEPGPVGVKEGSLVGKYESLVQVTVIPKGKEQTSSKDSASHSGVTDKLQHMLNKVKSTSRGGMYDDLYGDSVPAKLGSSWAYKSDGQPEQVKVVDEKKSSRDVGANPADDSDDDLFGD

SEQ ID NO: 68675 - protein, 317 aa, Triticum aestivum
  peptide (1)..(317): Ceres Seq. ID no. 15221782
  misc_feature (17)..(85): Pfam Name: FHA domain Pfam Description: FHA domain
  misc_feature (1)..(180): Homolog of NCBI NO: 32766445 NR Description: Unknown (protein for MGC:63827) [Danio rerio]
  misc_feature (1)..(189): Homolog of NCBI NO: 34898708 NR Description: contains ESTs
  misc_feature (1)..(167): Homolog of NCBI NO: 19922418 NR Description: Nuclear inhibitor of PP1 CG8980-PA [Drosophila
  misc_feature (1)..(214): Homolog of NCBI NO: 38174471 NR Description: Unknown (protein for MGC:69160) [Xenopus laevis]
  misc_feature (1)..(180): Homolog of NCBI NO: 27807053 NR Description: protein phosphatase 1, regulatory (inhibitor)
  misc_feature (1)..(180): Homolog of NCBI NO: 22122685 NR Description: RIKEN cDNA 6330548N22 [Mus musculus]
  misc_feature (1)..(180): Homolog of NCBI NO: 13699256 NR Description: protein phosphatase 1 regulatory inhibitor
  misc_feature (1)..(180): Homolog of NCBI NO: 27732693 NR Description: similar to expressed sequence AU044684
  misc_feature (1)..(287): Homolog of NCBI NO: 15238804 NR Description: expressed protein [Arabidopsis thaliana]
  misc_feature (1)..(317): Homolog of NCBI NO: 24414059 NR Description: OJ1136_A10.4 [Oryza sativa (japonica
MKDGNAIDRINLDKKRHIFGRQVPACEIVLDHQSVSRQHAAVVPHKNGSIYVIDLGSVHGTFVANERLTKDNPVELEVGQSLRFAASTRAYVLRKNTAAFFPTQSLPSDVSLPSPPDSDDEDAVVAYNTILNRYGVSKSDVPLKRKGSSGDASASAVNDDNQAVGRPSKRIRKRRVSFRDQVGGELIQVVGISDGADVETEPGPVGVKEGSLVGKYESLVQVTVIPKGKEQTSSKDSASHSGVTDKLQHMLNKVKSTSRGGMYDDLYGDSVPAKLGSSWAYKSDGQPEQVKVVDEKKSSRDVGANPADDSDDDLFGD

SEQ ID NO: 68676 - DNA, 1388 bp, Triticum aestivum
  misc_feature (1)..(1388): Ceres Seq. ID no. 13654715
atgcccttaggattcactcctgcgtgcgacacgccgaagcgagcaaccaaaagcaacctgaaatgttactcttgcttgcccaactcaagtcaaccatagctagctaaaatggtgctccactcagctatagctgcctagcaagctcagttccacgtctcgatctacctctctatatttaatttgcctccaaaatccatctatatatatatcgttttcgagctaaacaacacttcatccaaacaagcaaaggcaaatacccaagcggagctgcgaatagaaggctagaagccaacaatggcgccgctcgcacccgggaggccaccagcctgcctcctaacccttctctccgtcgtcgcggccctatccctggccgcgccgggcctggcggcggggaagaccggccaggtgacggtgttctggggacggaacaaggccgaggggtccctgcgcgaggcctgcgactccggcatgtacaccatggtcaccatctctttcctcgacgtcttcggcgccaacggaaagtaccaccttgacctctccggccacgacctctccgccgtcggcgccgacatcaagcactgccagtccaagggcgtccccgtctccctctccatcggcggctacggcgcccgctactcgctcccgtccaaccgctccgcgctcgacctcttcgaccacctctgggactcctacttcggcgggtccaagccgggcgtgccccgccccttgggcgacgcgtggctcgacggcgtcgacctcttcctggagcacggcacgccggcggaccgctacgacgtgctggcgctggagctggcgaagcacaacatccgcggcggcccggggaagccgctgcacctgacggcgacggtccggtgcgggtacccgccggcggcgcacgtggggcgagcgctggcgacggggatcttcgagcgcgtccacgtgaggatctacgaggagagcgacaaggcgtgcaaccagtacggggcgtgggaggaggcgtgggacaggtggacggcggcgtacccggccacccggttcttcatcgggctcacggcggacgacaagtcgtaccagtggatacaccccaagaacgtctactacggcatcacgccggtggtgcagaagaaggagaactatggcggggtcatgctctgggaccgatacttcgacaagcagagcgactacagtagctacatcaagtactacgcctgatcggagctatacttccacaagccacgctgcatgttgcatcaccgtcgatttgattttgatgtgttgttgcatacttgcaagcgagaataaagtgaggcttgtacttggataaataattgaacagattggtcgcacagttatggtttagttatcagctccatgactctctttttttc

SEQ ID NO: 68677 - protein, 305 aa, Triticum aestivum
  peptide (1)..(305): Ceres Seq. ID no. 13654716
  misc_feature (36)..(196): Pfam Name: Glycosyl hydrolases family 18 Pfam Description: Glycosyl hydrolases family 18
  misc_feature (23)..(303): Homolog of NCBI NO: 38346492 NR Description: OSJNBa0020I02.6 [Oryza sativa (japonica
  misc_feature (13)..(305): Homolog of NCBI NO: 4884518 NR Description: class III chitinase homologue (OsChib3H-c) [Oryza
  misc_feature (8)..(302): Homolog of NCBI NO: 7451380 NR Description: chitinase (EC 3.2.1.14) III C10923 - rice
  misc_feature (8)..(302): Homolog of NCBI NO: 4884516 NR Description: class III chitinase homologue (OsChib3H-b) [Oryza
  misc_feature (8)..(298): Homolog of NCBI NO: 7451381 NR Description: chitinase (EC 3.2.1.14) III C10150 - rice
  misc_feature (8)..(305): Homolog of NCBI NO: 18693099 NR Description: putative xylanase inhibitor protein
  misc_feature (4)..(299): Homolog of NCBI NO: 7451377 NR Description: chitinase (EC 3.2.1.14) III C00481 - rice
  misc_feature (4)..(305): Homolog of NCBI NO: 7451378 NR Description: chitinase (EC 3.2.1.14) III C10701 - rice
  misc_feature (16)..(305): Homolog of NCBI NO: 34913272 NR Description: putative xylanase inhibitor protein
  misc_feature (1)..(305): Homolog of NCBI NO: 20804336 NR Description: xylanase inhibitor protein I [Triticum aestivum]
MAPLAPGRPPACLLTLLSVVAALSLAAPGLAAGKTGQVTVFWGRNKAEGSLREACDSGMYTMVTISFLDVFGANGKYHLDLSGHDLSAVGADIKHCQSKGVPVSLSIGGYGARYSLPSNRSALDLFDHLWDSYFGGSKPGVPRPLGDAWLDGVDLFLEHGTPADRYDVLALELAKHNIRGGPGKPLHLTATVRCGYPPAAHVGRALATGIFERVHVRIYEESDKACNQYGAWEEAWDRWTAAYPATRFFIGLTADDKSYQWIHPKNVYYGITPVVQKKENYGGVMLWDRYFDKQSDYSSYIKYYA

SEQ ID NO: 68678 - protein, 247 aa, Triticum aestivum
  peptide (1)..(247): Ceres Seq. ID no. 13654717
  misc_feature (1)..(138): Pfam Name: Glycosyl hydrolases family 18 Pfam Description: Glycosyl hydrolases family 18
  misc_feature (1)..(245): Homolog of NCBI NO: 38346492 NR Description: OSJNBa0020I02.6 [Oryza sativa (japonica
  misc_feature (1)..(247): Homolog of NCBI NO: 4884518 NR Description: class III chitinase homologue (OsChib3H-c) [Oryza
  misc_feature (1)..(244): Homolog of NCBI NO: 7451380 NR Description: chitinase (EC 3.2.1.14) III C10923 - rice
  misc_feature (1)..(244): Homolog of NCBI NO: 4884516 NR Description: class III chitinase homologue (OsChib3H-b) [Oryza
  misc_feature (1)..(240): Homolog of NCBI NO: 7451381 NR Description: chitinase (EC 3.2.1.14) III C10150 - rice
  misc_feature (1)..(247): Homolog of NCBI NO: 18693099 NR Description: putative xylanase inhibitor protein
  misc_feature (1)..(241): Homolog of NCBI NO: 7451377 NR Description: chitinase (EC 3.2.1.14) III C00481 - rice
  misc_feature (1)..(247): Homolog of NCBI NO: 7451378 NR Description: chitinase (EC 3.2.1.14) III C10701 - rice
  misc_feature (1)..(247): Homolog of NCBI NO: 34913272 NR Description: putative xylanase inhibitor protein
  misc_feature (1)..(247): Homolog of NCBI NO: 20804336 NR Description: xylanase inhibitor protein I [Triticum aestivum]
MYTMVTISFLDVFGANGKYHLDLSGHDLSAVGADIKHCQSKGVPVSLSIGGYGARYSLPSNRSALDLFDHLWDSYFGGSKPGVPRPLGDAWLDGVDLFLEHGTPADRYDVLALELAKHNIRGGPGKPLHLTATVRCGYPPAAHVGRALATGIFERVHVRIYEESDKACNQYGAWEEAWDRWTAAYPATRFFIGLTADDKSYQWIHPKNVYYGITPVVQKKENYGGVMLWDRYFDKQSDYSSYIKYYA

SEQ ID NO: 68679 - protein, 244 aa, Triticum aestivum
  peptide (1)..(244): Ceres Seq. ID no. 13654718
  misc_feature (1)..(135): Pfam Name: Glycosyl hydrolases family 18 Pfam Description: Glycosyl hydrolases family 18
  misc_feature (1)..(242): Homolog of NCBI NO: 38346492 NR Description: OSJNBa0020I02.6 [Oryza sativa (japonica
  misc_feature (1)..(244): Homolog of NCBI NO: 4884518 NR Description: class III chitinase homologue (OsChib3H-c) [Oryza
  misc_feature (1)..(241): Homolog of NCBI NO: 7451380 NR Description: chitinase (EC 3.2.1.14) III C10923 - rice
  misc_feature (1)..(241): Homolog of NCBI NO: 4884516 NR Description: class III chitinase homologue (OsChib3H-b) [Oryza
  misc_feature (1)..(237): Homolog of NCBI NO: 7451381 NR Description: chitinase (EC 3.2.1.14) III C10150 - rice
  misc_feature (1)..(244): Homolog of NCBI NO: 18693099 NR Description: putative xylanase inhibitor protein
  misc_feature (1)..(238): Homolog of NCBI NO: 7451377 NR Description: chitinase (EC 3.2.1.14) III C00481 - rice
  misc_feature (1)..(244): Homolog of NCBI NO: 7451378 NR Description: chitinase (EC 3.2.1.14) III C10701 - rice
  misc_feature (1)..(244): Homolog of NCBI NO: 34913272 NR Description: putative xylanase inhibitor protein
  misc_feature (1)..(244): Homolog of NCBI NO: 20804336 NR Description: xylanase inhibitor protein I [Triticum aestivum]
MVTISFLDVFGANGKYHLDLSGHDLSAVGADIKHCQSKGVPVSLSIGGYGARYSLPSNRSALDLFDHLWDSYFGGSKPGVPRPLGDAWLDGVDLFLEHGTPADRYDVLALELAKHNIRGGPGKPLHLTATVRCGYPPAAHVGRALATGIFERVHVRIYEESDKACNQYGAWEEAWDRWTAAYPATRFFIGLTADDKSYQWIHPKNVYYGITPVVQKKENYGGVMLWDRYFDKQSDYSSYIKYYA

SEQ ID NO: 68680 - DNA, 1288 bp, Triticum aestivum
  misc_feature (1)..(1288): Ceres Seq. ID no. 13662420
ccaaagcagttggtcgctcgctcgctcgctcgccaccgccgcgttggacttttccctcgccggagaaaccgccgcgaccacagccgcaaccgccgcagccgcctccggaggaggagggtagtaccaccagggaaggaggaggccatggcggggaggtacgaccgcaaccccttcgacgaggatgacgtcaaccccttcgcgggaggaggtgtacctccggcttctaattctcggatgccacctcttcctcacgagcctgctggattctataatgatcgtgctgctaccgtggacatacctcttggttcatcgaaggacttgaagcaaaaggagaaagaactgcagtcgaaggaggctgagcttaacaaacgggaaagagaacttaaaagaagggaagaagctgcagctagagctggtattgtcattgaaaccaaaaactggccaccatttatgcccatcattcatcatgacatttcaaatgagataccaatccacctacaaaggatgcagtaccttgcattttgttcattgttgggattgacgttatgcctcttttggaacatcattgcaactaccgcagcatggattaaaggggcaggtgttgtcatctggttgctagcaatcatctacttcatctctggtgtccctggggcgtatgtgttatggtatcggccgctttataatgcaatgaggactgaaagcgctctgaagtttggatggttttttctgctgtacttgatccatataatattctgcatctggtcagctgtgtctcccccatttcctttcaaaggaaaatctatcgctgggtttttgcctgcaattgacgtcataggcagtaatgttattgtggggatattttattttgttggattcggactgttctgccttgaagcactgctcagcattgtggtgatccagcaagtatacatgtacttccgtggaagtggaaaggctgcgcagatgaggcaagaggcagcacgcggtgccatgagatcggccttctgatagagcggtctcgttgatgaatggatgagaataggatgtgccaatcgttgatggcgtcttgtctttgtacatccctatacatatctctgtgcgtggctgtctggctgagagagaatacttgtagctatagatcttcgtgcattcttgtaatatatatgagtgcttcatttctttcctaggccccagatccatgtgctttatatgtagcttaatcttttgggagatacaacttccaacatcactattctgacgagcttgcttgcaatgtcactgtattatg

SEQ ID NO: 68681 - protein, 335 aa, Triticum aestivum
  peptide (1)..(335): Ceres Seq. ID no. 13662421
  misc_feature (143)..(317): Pfam Name: SCAMP family Pfam Description: SCAMP family
  misc_feature (53)..(316): Homolog of NCBI NO: 38347080 NR Description: OSJNBa0006A01.21 [Oryza sativa (japonica
  misc_feature (49)..(316): Homolog of NCBI NO: 15222550 NR Description: secretory carrier membrane protein -related
  misc_feature (49)..(334): Homolog of NCBI NO: 25402653 NR Description: hypothetical protein [imported] - Arabidopsis
  misc_feature (52)..(334): Homolog of NCBI NO: 18379111 NR Description: expressed protein [Arabidopsis thaliana]
  misc_feature (49)..(334): Homolog of NCBI NO: 3941289 NR Description: similarity to SCAMP37 [Pisum sativum]
  misc_feature (52)..(334): Homolog of NCBI NO: 15226410 NR Description: secretory carrier-associated membrane protein
  misc_feature (49)..(334): Homolog of NCBI NO: 15220305 NR Description: secretory carrier membrane protein -related
  misc_feature (54)..(335): Homolog of NCBI NO: 34899754 NR Description: putative secretory carrier membrane protein
  misc_feature (49)..(334): Homolog of NCBI NO: 15219893 NR Description: secretory carrier membrane protein [Arabidopsis
  misc_feature (49)..(335): Homolog of NCBI NO: 7109232 NR Description: secretory carrier membrane protein [Oryza sativa]
PKQLVARSLARHRRVGLFPRRRNRRDHSRNRRSRLRRRRVVPPGKEEAMAGRYDRNPFDEDDVNPFAGGGVPPASNSRMPPLPHEPAGFYNDRAATVDIPLGSSKDLKQKEKELQSKEAELNKRERELKRREEAAARAGIVIETKNWPPFMPIIHHDISNEIPIHLQRMQYLAFCSLLGLTLCLFWNIIATTAAWIKGAGVVIWLLAIIYFISGVPGAYVLWYRPLYNAMRTESALKFGWFFLLYLIHIIFCIWSAVSPPFPFKGKSIAGFLPAIDVIGSNVIVGIFYFVGFGLFCLEALLSIVVIQQVYMYFRGSGKAAQMRQEAARGAMRSAF

SEQ ID NO: 68682 - protein, 287 aa, Triticum aestivum
  peptide (1)..(287): Ceres Seq. ID no. 13662422
  misc_feature (95)..(269): Pfam Name: SCAMP family Pfam Description: SCAMP family
  misc_feature (5)..(268): Homolog of NCBI NO: 38347080 NR Description: OSJNBa0006A01.21 [Oryza sativa (japonica
  misc_feature (1)..(268): Homolog of NCBI NO: 15222550 NR Description: secretory carrier membrane protein -related
  misc_feature (1)..(286): Homolog of NCBI NO: 25402653 NR Description: hypothetical protein [imported] - Arabidopsis
  misc_feature (4)..(286): Homolog of NCBI NO: 18379111 NR Description: expressed protein [Arabidopsis thaliana]
  misc_feature (1)..(286): Homolog of NCBI NO: 3941289 NR Description: similarity to SCAMP37 [Pisum sativum]
  misc_feature (4)..(286): Homolog of NCBI NO: 15226410 NR Description: secretory carrier-associated membrane protein
  misc_feature (1)..(286): Homolog of NCBI NO: 15220305 NR Description: secretory carrier membrane protein -related
  misc_feature (6)..(287): Homolog of NCBI NO: 34899754 NR Description: putative secretory carrier membrane protein
  misc_feature (1)..(286): Homolog of NCBI NO: 15219893 NR Description: secretory carrier membrane protein [Arabidopsis
  misc_feature (1)..(287): Homolog of NCBI NO: 7109232 NR Description: secretory carrier membrane protein [Oryza sativa]
MAGRYDRNPFDEDDVNPFAGGGVPPASNSRMPPLPHEPAGFYNDRAATVDIPLGSSKDLKQKEKELQSKEAELNKRERELKRREEAAARAGIVIETKNWPPFMPIIHHDISNEIPIHLQRMQYLAFCSLLGLTLCLFWNIIATTAAWIKGAGVVIWLLAIIYFISGVPGAYVLWYRPLYNAMRTESALKFGWFFLLYLIHIIFCIWSAVSPPFPFKGKSIAGFLPAIDVIGSNVIVGIFYFVGFGLFCLEALLSIVVIQQVYMYFRGSGKAAQMRQEAARGAMRSAF

SEQ ID NO: 68683 - protein, 257 aa, Triticum aestivum
  peptide (1)..(257): Ceres Seq. ID no. 13662423
  misc_feature (65)..(239): Pfam Name: SCAMP family Pfam Description: SCAMP family
  misc_feature (1)..(238): Homolog of NCBI NO: 38347080 NR Description: OSJNBa0006A01.21 [Oryza sativa (japonica
  misc_feature (1)..(238): Homolog of NCBI NO: 15222550 NR Description: secretory carrier membrane protein -related
  misc_feature (1)..(256): Homolog of NCBI NO: 25402653 NR Description: hypothetical protein [imported] - Arabidopsis
  misc_feature (1)..(256): Homolog of NCBI NO: 18379111 NR Description: expressed protein [Arabidopsis thaliana]
  misc_feature (1)..(256): Homolog of NCBI NO: 3941289 NR Description: similarity to SCAMP37 [Pisum sativum]
  misc_feature (1)..(256): Homolog of NCBI NO: 15226410 NR Description: secretory carrier-associated membrane protein
  misc_feature (1)..(256): Homolog of NCBI NO: 15220305 NR Description: secretory carrier membrane protein -related
  misc_feature (1)..(257): Homolog of NCBI NO: 34899754 NR Description: putative secretory carrier membrane protein
  misc_feature (1)..(256): Homolog of NCBI NO: 15219893 NR Description: secretory carrier membrane protein [Arabidopsis
  misc_feature (1)..(257): Homolog of NCBI NO: 7109232 NR Description: secretory carrier membrane protein [Oryza sativa]
MPPLPHEPAGFYNDRAATVDIPLGSSKDLKQKEKELQSKEAELNKRERELKRREEAAARAGIVIETKNWPPFMPIIHHDISNEIPIHLQRMQYLAFCSLLGLTLCLFWNIIATTAAWIKGAGVVIWLLAIIYFISGVPGAYVLWYRPLYNAMRTESALKFGWFFLLYLIHIIFCIWSAVSPPFPFKGKSIAGFLPAIDVIGSNVIVGIFYFVGFGLFCLEALLSIVVIQQVYMYFRGSGKAAQMRQEAARGAMRSAF

SEQ ID NO: 68684 - DNA, 1619 bp, Triticum aestivum
  misc_feature (1)..(1619): Ceres Seq. ID no. 13503499
acccacgccacgctcgcgctcaaagcctggtcggtaacagagccaaggtgccatttctcgacccccctctccacatacctctcctagctagctacccatccgcttccacttggccatttcccatcccacatcctgcttgcttccggagctcatcagcatcgcttggcctaaggctcgcttcaactgcctgctcttctcagctcatcccctgctggtgtagcatttggagtctcggagactttgaattggctcgccaagaacgagtcctatggaagaaagctccatgaaaagagaagccatgcctcgactcctggatctcatcccggacgagaaagaatggagcctgagaggaggagcgccagggcagggcaggtcaaaaaacacaggcttcgggagcgacgaggacgagaaactggagctgaagcttggccttccaggcctcgtacaagaggagccagcggccagctcaagagagaagagggtgcatcaggagagcccggccctctaccttgggtacccccctagacactccacggccaccacaacgacgaccaccaccggagcaaagagggggttcctggacacggttgaggccaaagcacaaggttatgagaaggagcaggcgagagcagcaacatgtgggaaggaactggcgatggaggaaaatacagaggccgtcggtgagaggaagaaagggtgctgtcccccaccaccaccagcacatgcccctcctgctacacctgcgcgcaacatcggcaacagaccgcaggcgcggggaagaggggctgcaggtccagtggtcggctggcctccaatccggtcattcaggagaaaccttgcaagcactagtgcatccaaacagccccctgaaccacaaatcggtgaagccgatgccaaggccgtgcttgactgcaagaaaagccctcttgtgaaaatcaacatggatgggatccccattggaaggaaagttgatcttgcagcatgtgacagctacgggagactttcattggctgtcaaagatctcttccacgggtttcttcaagtgcaaagggacccgtcgaaggttgaccgtacacagcaaggagcagatgaaaaaatattttcgcagttgctagacgggtccggtgaatatactctagtttacgaagacagtgaaggagacaggatgctggttggggatgtcccttggaatgtgtttgtttcaaccgctaaaaggctgagggttctgagaagctcagagctttcccatgatctgattggagctactcctgagagagcagcaaatggctgaaatggtgacaccttttcaaccatttggaatgttgctcactgaagccgtaaactaaaggaactcctaagaagcaggggagacctaaatcctgtggtcagtttggagatcgttatcctttttgaggattagtagtttggtaacctttttttcttgtagtgagatgaattagcataccgcagatgcatggagatatcctgcctattttgtaaattaggctaccttgtatttaacgctatagttctcgattcagttacatagatttggcgcctattttctctgacaaatttgtaacctgacatgcaaatctgttcatgacaaaagaggaccc

SEQ ID NO: 68685 - protein, 340 aa, Triticum aestivum
  peptide (1)..(340): Ceres Seq. ID no. 15223236
  misc_feature (49)..(333): Pfam Name: AUX/IAA family Pfam Description: AUX/IAA family
  misc_feature (50)..(334): Homolog of NCBI NO: 6136832 NR Description: CS-IAA2 [Cucumis sativus]
  misc_feature (50)..(334): Homolog of NCBI NO: 29465672 NR Description: Aux/IAA protein [Vitis vinifera]
  misc_feature (171)..(329): Homolog of NCBI NO: 15218080 NR Description: auxin-responsive protein IAA18 (Indoleacetic
  misc_feature (171)..(329): Homolog of NCBI NO: 21594025 NR Description: auxin regulated protein IAA18, putative
  misc_feature (171)..(329): Homolog of NCBI NO: 25296228 NR Description: auxin-induced protein IAA18
  misc_feature (152)..(329): Homolog of NCBI NO: 21593333 NR Description: phytochrome-associated protein 1 (PAP1)
  misc_feature (152)..(329): Homolog of NCBI NO: 15228226 NR Description: auxin-responsive protein (Indoleacetic
  misc_feature (152)..(329): Homolog of NCBI NO: 4093155 NR Description: phytochrome-associated protein 1 [Arabidopsis
  misc_feature (113)..(325): Homolog of NCBI NO: 34906394 NR Description: P0710E05.9 [Oryza sativa (japonica
  misc_feature (1)..(333): Homolog of NCBI NO: 34909384 NR Description: putative phytochrome-associated protein
MEESSMKREAMPRLLDLIPDEKEWSLRGGAPGQGRSKNTGFGSDEDEKLELKLGLPGLVQEEPAASSREKRVHQESPALYLGYPPRHSTATTTTTTTGAKRGFLDTVEAKAQGYEKEQARAATCGKELAMEENTEAVGERKKGCCPPPPPAHAPPATPARNIGNRPQARGRGAAGPVVGWPPIRSFRRNLASTSASKQPPEPQIGEADAKAVLDCKKSPLVKINMDGIPIGRKVDLAACDSYGRLSLAVKDLFHGFLQVQRDPSKVDRTQQGADEKIFSQLLDGSGEYTLVYEDSEGDRMLVGDVPWNVFVSTAKRLRVLRSSELSHDLIGATPERAANG

SEQ ID NO: 68686 - protein, 335 aa, Triticum aestivum
  peptide (1)..(335): Ceres Seq. ID no. 15223237
  misc_feature (44)..(328): Pfam Name: AUX/IAA family Pfam Description: AUX/IAA family
  misc_feature (45)..(329): Homolog of NCBI NO: 6136832 NR Description: CS-IAA2 [Cucumis sativus]
  misc_feature (45)..(329): Homolog of NCBI NO: 29465672 NR Description: Aux/IAA protein [Vitis vinifera]
  misc_feature (166)..(324): Homolog of NCBI NO: 15218080 NR Description: auxin-responsive protein IAA18 (Indoleacetic
  misc_feature (166)..(324): Homolog of NCBI NO: 21594025 NR Description: auxin regulated protein IAA18, putative
  misc_feature (166)..(324): Homolog of NCBI NO: 25296228 NR Description: auxin-induced protein IAA18
  misc_feature (147)..(324): Homolog of NCBI NO: 15228226 NR Description: auxin-responsive protein (Indoleacetic
  misc_feature (147)..(324): Homolog of NCBI NO: 21593333 NR Description: phytochrome-associated protein 1 (PAP1)
  misc_feature (147)..(324): Homolog of NCBI NO: 4093155 NR Description: phytochrome-associated protein 1 [Arabidopsis
  misc_feature (108)..(320): Homolog of NCBI NO: 34906394 NR Description: P0710E05.9 [Oryza sativa (japonica
  misc_feature (1)..(328): Homolog of NCBI NO: 34909384 NR Description: putative phytochrome-associated protein
MKREAMPRLLDLIPDEKEWSLRGGAPGQGRSKNTGFGSDEDEKLELKLGLPGLVQEEPAASSREKRVHQESPALYLGYPPRHSTATTTTTTTGAKRGFLDTVEAKAQGYEKEQARAATCGKELAMEENTEAVGERKKGCCPPPPPAHAPPATPARNIGNRPQARGRGAAGPVVGWPPIRSFRRNLASTSASKQPPEPQIGEADAKAVLDCKKSPLVKINMDGIPIGRKVDLAACDSYGRLSLAVKDLFHGFLQVQRDPSKVDRTQQGADEKIFSQLLDGSGEYTLVYEDSEGDRMLVGDVPWNVFVSTAKRLRVLRSSELSHDLIGATPERAANG

SEQ ID NO: 68687 - protein, 330 aa, Triticum aestivum
  peptide (1)..(330): Ceres Seq. ID no. 15223238
  misc_feature (39)..(323): Pfam Name: AUX/IAA family Pfam Description: AUX/IAA family
  misc_feature (40)..(324): Homolog of NCBI NO: 6136832 NR Description: CS-IAA2 [Cucumis sativus]
  misc_feature (40)..(324): Homolog of NCBI NO: 29465672 NR Description: Aux/IAA protein [Vitis vinifera]
  misc_feature (161)..(319): Homolog of NCBI NO: 15218080 NR Description: auxin-responsive protein IAA18 (Indoleacetic
  misc_feature (161)..(319): Homolog of NCBI NO: 21594025 NR Description: auxin regulated protein IAA18, putative
  misc_feature (161)..(319): Homolog of NCBI NO: 25296228 NR Description: auxin-induced protein IAA18
  misc_feature (142)..(319): Homolog of NCBI NO: 15228226 NR Description: auxin-responsive protein (Indoleacetic
  misc_feature (142)..(319): Homolog of NCBI NO: 21593333 NR Description: phytochrome-associated protein 1 (PAP1)
  misc_feature (142)..(319): Homolog of NCBI NO: 4093155 NR Description: phytochrome-associated protein 1 [Arabidopsis
  misc_feature (103)..(315): Homolog of NCBI NO: 34906394 NR Description: P0710E05.9 [Oryza sativa (japonica
  misc_feature (1)..(323): Homolog of NCBI NO: 34909384 NR Description: putative phytochrome-associated protein
MPRLLDLIPDEKEWSLRGGAPGQGRSKNTGFGSDEDEKLELKLGLPGLVQEEPAASSREKRVHQESPALYLGYPPRHSTATTTTTTTGAKRGFLDTVEAKAQGYEKEQARAATCGKELAMEENTEAVGERKKGCCPPPPPAHAPPATPARNIGNRPQARGRGAAGPVVGWPPIRSFRRNLASTSASKQPPEPQIGEADAKAVLDCKKSPLVKINMDGIPIGRKVDLAACDSYGRLSLAVKDLFHGFLQVQRDPSKVDRTQQGADEKIFSQLLDGSGEYTLVYEDSEGDRMLVGDVPWNVFVSTAKRLRVLRSSELSHDLIGATPERAANG

SEQ ID NO: 68688 - DNA, 1438 bp, Triticum aestivum
  misc_feature (1)..(1438): Ceres Seq. ID no. 14302283
ctacaaaacacacgccaccaccctattcctgcctctccactcctcccctctcccctcctcttctcttctctccactgcccaacttttgctatagacaagaaagaacctaagctaggtagctttcctccagagcagagcaatggccatgcatcctcttgcccaggggcacccgcaagcctggccatggggggtagccatgtacacgaacatacactaccaccaccagtacgagagagagcacctgttcgagaaatcctttacgcccagtgacgtgggcaagctcaacaggctggtgatccccaagcagcacgcggagaggtacttccccctcaacggcggagactcccccggtgacaaggacctgctcctgtctttcgaggacgaggccggcaagccgtggcggttccggtactcgtactggacgagcagccagagctacgttctcaccaagggctggagcaggtacgtcaaggagaagcagcttgacgccggagacatcgtgcacttcgagagggtgcgcggccttggcacaggcgaccggctcttcatccactgcaggcgccgtggcgagagcgcgccgccaccacctgtccgcgtacctccgcccgctctgaacgccggggagcagcagccttggagcccgatgtgctatagcacatcaggatcataccctaccagccctgccaactcccatgcctatcgccgctccgtggagcaagatcacagcgagatgctgcatgcaggtgactcgccgagagaggcagacccaagagcagcacggcatcggggccgccgtcgagacgtctacggctgtttggcgtcaacctcgactgcggtccggagccagaggcagaggcagcaacgccaatgtacggctacacccaccagagcccctacgctgcagcagtggccacggtgccaacttactggggcagttcataagatggtgaggtctgaagccatgctcgagtatcctaacaaccagcagtgaaactagtcactactcccaccagccagcctactagctatgctactctggactgagtgacaggcttgaattgaactctggaagaggaagtggaagtggaagatcccttgtttcccgggcaatcttccttccatccacagagtgccctttttttttcctgttttctttcttctggtcttccagagaccctattcgatcacagtacggggcccttagcaggtggcaggtttcaggaaacgtcaggttgaaaaggtgagggaagtgggagagatagagggatggtgacacacatgaaaaacaaaagggcatgcttagcaagcatgcatgtatgtatgtgtcatctgtatgtactgggtccaagaacaaaccatgaagttgatgtatcctctccagcctcctcaagaaacaaagtcatatcccccatgggccatggccatggagattttgtcc

SEQ ID NO: 68689 - protein, 283 aa, Triticum aestivum
  peptide (1)..(283): Ceres Seq. ID no. 14302284
  misc_feature (35)..(145): Pfam Name: B3 DNA binding domain Pfam Description: B3 DNA binding domain
  misc_feature (31)..(150): Homolog of NCBI NO: 18407193 NR Description: DNA-binding protein, putative [Arabidopsis
  misc_feature (31)..(169): Homolog of NCBI NO: 37536454 NR Description: putative DNA-binding protein
  misc_feature (31)..(150): Homolog of NCBI NO: 34902226 NR Description: Putative RAV-like B3 domain DNA binding protein
  misc_feature (31)..(184): Homolog of NCBI NO: 32492293 NR Description: OSJNBa0088A01.1 [Oryza sativa (japonica
  misc_feature (22)..(184): Homolog of NCBI NO: 15239984 NR Description: DNA-binding protein, putative [Arabidopsis
  misc_feature (31)..(146): Homolog of NCBI NO: 30686674 NR Description: DNA-binding protein, putative [Arabidopsis
  misc_feature (31)..(146): Homolog of NCBI NO: 30686669 NR Description: DNA-binding protein, putative [Arabidopsis
  misc_feature (31)..(146): Homolog of NCBI NO: 25408446 NR Description: probable RAV2-like DNA binding protein
  misc_feature (23)..(153): Homolog of NCBI NO: 30681791 NR Description: DNA-binding protein, putative [Arabidopsis
  misc_feature (23)..(199): Homolog of NCBI NO: 30681787 NR Description: DNA-binding protein, putative [Arabidopsis
MAMHPLAQGHPQAWPWGVAMYTNIHYHHQYEREHLFEKSFTPSDVGKLNRLVIPKQHAERYFPLNGGDSPGDKDLLLSFEDEAGKPWRFRYSYWTSSQSYVLTKGWSRYVKEKQLDAGDIVHFERVRGLGTGDRLFIHCRRRGESAPPPPVRVPPPALNAGEQQPWSPMCYSTSGSYPTSPANSHAYRRSVEQDHSEMLHAGDSPREADPRAARHRGRRRDVYGCLASTSTAVRSQRQRQQRQCTATPTRAPTLQQWPRCQLTGAVHKMVRSEAMLEYPNNQQ

SEQ ID NO: 68690 - protein, 281 aa, Triticum aestivum
  peptide (1)..(281): Ceres Seq. ID no. 14302285
  misc_feature (33)..(143): Pfam Name: B3 DNA binding domain Pfam Description: B3 DNA binding domain
  misc_feature (29)..(148): Homolog of NCBI NO: 18407193 NR Description: DNA-binding protein, putative [Arabidopsis
  misc_feature (29)..(167): Homolog of NCBI NO: 37536454 NR Description: putative DNA-binding protein
  misc_feature (29)..(148): Homolog of NCBI NO: 34902226 NR Description: Putative RAV-like B3 domain DNA binding protein
  misc_feature (29)..(182): Homolog of NCBI NO: 32492293 NR Description: OSJNBa0088A01.1 [Oryza sativa (japonica
  misc_feature (20)..(182): Homolog of NCBI NO: 15239984 NR Description: DNA-binding protein, putative [Arabidopsis
  misc_feature (29)..(144): Homolog of NCBI NO: 30686674 NR Description: DNA-binding protein, putative [Arabidopsis
  misc_feature (29)..(144): Homolog of NCBI NO: 30686669 NR Description: DNA-binding protein, putative [Arabidopsis
  misc_feature (29)..(144): Homolog of NCBI NO: 25408446 NR Description: probable RAV2-like DNA binding protein
  misc_feature (21)..(151): Homolog of NCBI NO: 30681791 NR Description: DNA-binding protein, putative [Arabidopsis
  misc_feature (21)..(197): Homolog of NCBI NO: 30681787 NR Description: DNA-binding protein, putative [Arabidopsis
MHPLAQGHPQAWPWGVAMYTNIHYHHQYEREHLFEKSFTPSDVGKLNRLVIPKQHAERYFPLNGGDSPGDKDLLLSFEDEAGKPWRFRYSYWTSSQSYVLTKGWSRYVKEKQLDAGDIVHFERVRGLGTGDRLFIHCRRRGESAPPPPVRVPPPALNAGEQQPWSPMCYSTSGSYPTSPANSHAYRRSVEQDHSEMLHAGDSPREADPRAARHRGRRRDVYGCLASTSTAVRSQRQRQQRQCTATPTRAPTLQQWPRCQLTGAVHKMVRSEAMLEYPNNQQ

SEQ ID NO: 68691 - protein, 264 aa, Triticum aestivum
  peptide (1)..(264): Ceres Seq. ID no. 14302286
  misc_feature (16)..(126): Pfam Name: B3 DNA binding domain Pfam Description: B3 DNA binding domain
  misc_feature (12)..(131): Homolog of NCBI NO: 18407193 NR Description: DNA-binding protein, putative [Arabidopsis
  misc_feature (12)..(150): Homolog of NCBI NO: 37536454 NR Description: putative DNA-binding protein
  misc_feature (12)..(131): Homolog of NCBI NO: 34902226 NR Description: Putative RAV-like B3 domain DNA binding protein
  misc_feature (12)..(165): Homolog of NCBI NO: 32492293 NR Description: OSJNBa0088A01.1 [Oryza sativa (japonica
  misc_feature (3)..(165): Homolog of NCBI NO: 15239984 NR Description: DNA-binding protein, putative [Arabidopsis
  misc_feature (12)..(127): Homolog of NCBI NO: 30686669 NR Description: DNA-binding protein, putative [Arabidopsis
  misc_feature (12)..(127): Homolog of NCBI NO: 30686674 NR Description: DNA-binding protein, putative [Arabidopsis
  misc_feature (12)..(127): Homolog of NCBI NO: 25408446 NR Description: probable RAV2-like DNA binding protein
  misc_feature (4)..(134): Homolog of NCBI NO: 30681791 NR Description: DNA-binding protein, putative [Arabidopsis
  misc_feature (4)..(180): Homolog of NCBI NO: 30681787 NR Description: DNA-binding protein, putative [Arabidopsis
MYTNIHYHHQYEREHLFEKSFTPSDVGKLNRLVIPKQHAERYFPLNGGDSPGDKDLLLSFEDEAGKPWRFRYSYWTSSQSYVLTKGWSRYVKEKQLDAGDIVHFERVRGLGTGDRLFIHCRRRGESAPPPPVRVPPPALNAGEQQPWSPMCYSTSGSYPTSPANSHAYRRSVEQDHSEMLHAGDSPREADPRAARHRGRRRDVYGCLASTSTAVRSQRQRQQRQCTATPTRAPTLQQWPRCQLTGAVHKMVRSEAMLEYPNNQQ

SEQ ID NO: 68692 - DNA, 1854 bp, Triticum aestivum
  misc_feature (1)..(1854): Ceres Seq. ID no. 15176087
attatcgagcttctgcttcccaccttcttctcatagtagctgtctgttcgatccgtcaaatccggccagccgatcttcaataagctgcaccactgccaactagtactgccaaccccacggacggatccaagagagagcggccggccatggaagacgccgtcctcctcaccgtggccaccaccgtgtccatcctctgctgcacgctactcctccgtgcagctcgctcccatcactccaagtccaagctcgtcaccaccgtcccgccgccttccccgtggcggctcccgctcgtgggcaacctgcaccagctcgcgggcggccgcctcccgcaccgcacgctgtccgccctcgccgccgcccacggccccgtcatgctcctccgcctcggccaggtcccggccgtcgtcgtgtcctcgcccgacgccgcgcgggaggtgatgctggagcaggaccacgtcttcgccacccgcccgtcgctcgccatcccctccaagctcttctacggctgcaccgacgtcgccttcgccccggacggcccctactggctgcacgcgcggaagacgtgcgtgctccacctcctcagccccgccagggtgcgggcctaccgcgccgtccgggaggaggaggtgggcgcgctcctggacaaggtccggcggcaggcgcgcgtcgtgaacctgagcgagctcctcgccgggtttgccaaggacgtgatcgggcggatcgtgttcggggcgagcgccgccacgcgcgccgacaggtggggcgccaaggtggacgcgctgctggaggagggcaacgcgctgctcggaacgttccacgtcggcgactacttcccgagactggcgtgggtcggcgccctggacggcaccgacgccaaggtcggcaaggcgttcgacaggatcgacgccgttctcgaggagatcgtcgacgccgcggagagacgaatgggccgagtccacggaggagacgcgctggggctgcacgacagcaccttcgtcgacgtgctgctgtctctcggcaacaacacctccggcaacggcaccggcggcgcgtccccggagcggcggttcacgagggacaacgtcaaggggctcctagcgaatctcttcggggcaggggcagactccaccatcatcgtgctcgaatgggccatggcagagctgctccgcaacaaggaggccatggagaagctacaagacgagctaaggagtagatccgtaagcaccaactccgatatgatcaccgaagaagatttacaggggatggtctacctgaaagcggtgataaaggagacaatgcggctgcaccctcccgggccgctgctgatcccccgcgaggccatggagtccgcgaggatccagcagtacgacgtgccgagcaagaccatggtgatcgtcaacgcgtgggccatcggaagggacccgggcagctgggagtctccggaggagttccgaccggagaggttcctcggcaccggcggcgaggtggacttccggggccggcatttccagctcgtgccgttcggttccgggaggagggtgtgcccggggatcaacttcaccatgtccatcatggaggttgcgattgccaacctcgtcggccggttcgactgggcgctgccggagggcgcggcagcggcggtggacatggaggaggcgcctgggatcacctcacggaagagggttccgcttcacgtcttggctacaccgcgggcgcaggcatcgtgcaatcacgacgtgtagttcggaattcatattgtgctcctccaaatggttctagcaatttgaaggctcatttctttaacaatactttttgtattaatatcaagaagatataagtatgcttgtcctcttc

SEQ ID NO: 68693 - protein, 531 aa, Triticum aestivum
  peptide (1)..(531): Ceres Seq. ID no. 15176088
  misc_feature (40)..(518): Pfam Name: Cytochrome P450 Pfam Description: Cytochrome P450
  misc_feature (307)..(521): Homolog of NCBI NO: 34904240 NR Description: putative cytochrome P-450LXXIA1 (cyp71A1) family
  misc_feature (40)..(300): Homolog of NCBI NO: 34904240 NR Description: putative cytochrome P-450LXXIA1 (cyp71A1) family
  misc_feature (5)..(522): Homolog of NCBI NO: 34904242 NR Description: putative cytochrome P-450LXXIA1 (cyp71A1) family
  misc_feature (58)..(521): Homolog of NCBI NO: 40645046 NR Description: cytochrome P450 [Asparagus officinalis]
  misc_feature (4)..(492): Homolog of NCBI NO: 117188 NR Description: CYTOCHROME P450 71A1 (CYPLXXIA1) (ARP-2)
  misc_feature (252)..(522): Homolog of NCBI NO: 15723953 NR Description: menthofuran synthase [Mentha x piperita]
  misc_feature (9)..(288): Homolog of NCBI NO: 15723953 NR Description: menthofuran synthase [Mentha x piperita]
  misc_feature (28)..(521): Homolog of NCBI NO: 584861 NR Description: Cytochrome P450 71A2 (CYPLXXIA2) (P-450EG4)
  misc_feature (14)..(521): Homolog of NCBI NO: 584863 NR Description: Cytochrome P450 71A4 (CYPLXXIA4) (P-450EG2)
  misc_feature (4)..(519): Homolog of NCBI NO: 25282608 NR Description: cytochrome P-450LXXIA1 [similarity] - avocado
MEDAVLLTVATTVSILCCTLLLRAARSHHSKSKLVTTVPPPSPWRLPLVGNLHQLAGGRLPHRTLSALAAAHGPVMLLRLGQVPAVVVSSPDAAREVMLEQDHVFATRPSLAIPSKLFYGCTDVAFAPDGPYWLHARKTCVLHLLSPARVRAYRAVREEEVGALLDKVRRQARVVNLSELLAGFAKDVIGRIVFGASAATRADRWGAKVDALLEEGNALLGTFHVGDYFPRLAWVGALDGTDAKVGKAFDRIDAVLEEIVDAAERRMGRVHGGDALGLHDSTFVDVLLSLGNNTSGNGTGGASPERRFTRDNVKGLLANLFGAGADSTIIVLEWAMAELLRNKEAMEKLQDELRSRSVSTNSDMITEEDLQGMVYLKAVIKETMRLHPPGPLLIPREAMESARIQQYDVPSKTMVIVNAWAIGRDPGSWESPEEFRPERFLGTGGEVDFRGRHFQLVPFGSGRRVCPGINFTMSIMEVAIANLVGRFDWALPEGAAAAVDMEEAPGITSRKRVPLHVLATPRAQASCNHDV

SEQ ID NO: 68694 - protein, 456 aa, Triticum aestivum
  peptide (1)..(456): Ceres Seq. ID no. 15176089
  misc_feature (1)..(443): Pfam Name: Cytochrome P450 Pfam Description: Cytochrome P450
  misc_feature (232)..(446): Homolog of NCBI NO: 34904240 NR Description: putative cytochrome P-450LXXIA1 (cyp71A1) family
  misc_feature (1)..(225): Homolog of NCBI NO: 34904240 NR Description: putative cytochrome P-450LXXIA1 (cyp71A1) family
  misc_feature (1)..(447): Homolog of NCBI NO: 34904242 NR Description: putative cytochrome P-450LXXIA1 (cyp71A1) family
  misc_feature (1)..(446): Homolog of NCBI NO: 40645046 NR Description: cytochrome P450 [Asparagus officinalis]
  misc_feature (1)..(417): Homolog of NCBI NO: 117188 NR Description: CYTOCHROME P450 71A1 (CYPLXXIA1) (ARP-2)
  misc_feature (177)..(447): Homolog of NCBI NO: 15723953 NR Description: menthofuran synthase [Mentha x piperita]
  misc_feature (1)..(213): Homolog of NCBI NO: 15723953 NR Description: menthofuran synthase [Mentha x piperita]
  misc_feature (1)..(446): Homolog of NCBI NO: 584861 NR Description: Cytochrome P450 71A2 (CYPLXXIA2) (P-450EG4)
  misc_feature (1)..(446): Homolog of NCBI NO: 584863 NR Description: Cytochrome P450 71A4 (CYPLXXIA4) (P-450EG2)
  misc_feature (1)..(444): Homolog of NCBI NO: 25282608 NR Description: cytochrome P-450LXXIA1 [similarity] - avocado
MLLRLGQVPAVVVSSPDAAREVMLEQDHVFATRPSLAIPSKLFYGCTDVAFAPDGPYWLHARKTCVLHLLSPARVRAYRAVREEEVGALLDKVRRQARVVNLSELLAGFAKDVIGRIVFGASAATRADRWGAKVDALLEEGNALLGTFHVGDYFPRLAWVGALDGTDAKVGKAFDRIDAVLEEIVDAAERRMGRVHGGDALGLHDSTFVDVLLSLGNNTSGNGTGGASPERRFTRDNVKGLLANLFGAGADSTIIVLEWAMAELLRNKEAMEKLQDELRSRSVSTNSDMITEEDLQGMVYLKAVIKETMRLHPPGPLLIPREAMESARIQQYDVPSKTMVIVNAWAIGRDPGSWESPEEFRPERFLGTGGEVDFRGRHFQLVPFGSGRRVCPGINFTMSIMEVAIANLVGRFDWALPEGAAAAVDMEEAPGITSRKRVPLHVLATPRAQASCNHDV

SEQ ID NO: 68695 - protein, 434 aa, Triticum aestivum
  peptide (1)..(434): Ceres Seq. ID no. 15176090
  misc_feature (1)..(421): Pfam Name: Cytochrome P450 Pfam Description: Cytochrome P450
  misc_feature (210)..(424): Homolog of NCBI NO: 34904240 NR Description: putative cytochrome P-450LXXIA1 (cyp71A1) family
  misc_feature (1)..(203): Homolog of NCBI NO: 34904240 NR Description: putative cytochrome P-450LXXIA1 (cyp71A1) family
  misc_feature (1)..(425): Homolog of NCBI NO: 34904242 NR Description: putative cytochrome P-450LXXIA1 (cyp71A1) family
  misc_feature (1)..(424): Homolog of NCBI NO: 40645046 NR Description: cytochrome P450 [Asparagus officinalis]
  misc_feature (1)..(395): Homolog of NCBI NO: 117188 NR Description: CYTOCHROME P450 71A1 (CYPLXXIA1) (ARP-2)
  misc_feature (155)..(425): Homolog of NCBI NO: 15723953 NR Description: menthofuran synthase [Mentha x piperita]
  misc_feature (1)..(191): Homolog of NCBI NO: 15723953 NR Description: menthofuran synthase [Mentha x piperita]
  misc_feature (1)..(424): Homolog of NCBI NO: 584861 NR Description: Cytochrome P450 71A2 (CYPLXXIA2) (P-450EG4)
  misc_feature (1)..(424): Homolog of NCBI NO: 584863 NR Description: Cytochrome P450 71A4 (CYPLXXIA4) (P-450EG2)
  misc_feature (1)..(422): Homolog of NCBI NO: 25282608 NR Description: cytochrome P-450LXXIA1 [similarity] - avocado
MLEQDHVFATRPSLAIPSKLFYGCTDVAFAPDGPYWLHARKTCVLHLLSPARVRAYRAVREEEVGALLDKVRRQARVVNLSELLAGFAKDVIGRIVFGASAATRADRWGAKVDALLEEGNALLGTFHVGDYFPRLAWVGALDGTDAKVGKAFDRIDAVLEEIVDAAERRMGRVHGGDALGLHDSTFVDVLLSLGNNTSGNGTGGASPERRFTRDNVKGLLANLFGAGADSTIIVLEWAMAELLRNKEAMEKLQDELRSRSVSTNSDMITEEDLQGMVYLKAVIKETMRLHPPGPLLIPREAMESARIQQYDVPSKTMVIVNAWAIGRDPGSWESPEEFRPERFLGTGGEVDFRGRHFQLVPFGSGRRVCPGINFTMSIMEVAIANLVGRFDWALPEGAAAAVDMEEAPGITSRKRVPLHVLATPRAQASCNHDV

SEQ ID NO: 68696 - DNA, 885 bp, Triticum aestivum
  misc_feature (1)..(885): Ceres Seq. ID no. 13585222
ccccacgactcaaatcgatccgcttcccctttcccgaatcgccaaatccgctcgccgccgtcgccgtaaaaaccctctccccgcctccgctaaccccaccgccgcggagagatggtgctgtgggagatcacggccatcaccgcctacttcctcggcctccgccgcacctaccgcctcgcgctccgcggccagcgccgcctcatcgggcccaaccaccccaggctccgcgacttcgtctacaggcggacacgttctatattcgacgtcgcagtctcagtgcacaagaacattcaggagagggacttggaagttggtcggaacgtcggaaacgcggtccttcgctggctcgaccgcatgaagccatcagcacagatccgcccccaccctccaggcccgccaggctcccccccggagcaactcaggcacctttcgaccatgaataaggccgtaggagctcagaagcctgcctcaaagacctcgacgcacgactcgagcggcaagatgctgttctcgcccctgaacatccggcccaagtccttccctatcctccccacgatgatgcagtccaccaggatcagcgcgagcaaccagtgcaggcgcctctccagctcgccgttcccgtccgtcaccgccaggaggaaggacatgatggagggtgtcttccggaaggacatcgcccagctaatggtgtaagggatgtctgtaggtagccgtactgctttctgtgactctgaatattgtttactcgactggaatttggcctggagcagaactcatcactagccctgtaataatggtggagtgctgaacataatcgctgttgctccgcctgttttgtggccaatatacattttctaacaaatcatcatacgatgagacttaggt

SEQ ID NO: 68697 - protein, 193 aa, Triticum aestivum
  peptide (1)..(193): Ceres Seq. ID no. 13585223
  misc_feature (45)..(193): Homolog of NCBI NO: 25370789 NR Description: hypothetical protein At2g35480 [imported] -
  misc_feature (1)..(193): Homolog of NCBI NO: 30686423 NR Description: expressed protein [Arabidopsis thaliana]
  misc_feature (1)..(192): Homolog of NCBI NO: 15222623 NR Description: expressed protein [Arabidopsis thaliana]
MVLWEITAITAYFLGLRRTYRLALRGQRRLIGPNHPRLRDFVYRRTRSIFDVAVSVHKNIQERDLEVGRNVGNAVLRWLDRMKPSAQIRPHPPGPPGSPPEQLRHLSTMNKAVGAQKPASKTSTHDSSGKMLFSPLNIRPKSFPILPTMMQSTRISASNQCRRLSSSPFPSVTARRKDMMEGVFRKDIAQLMV

SEQ ID NO: 68698 - protein, 146 aa, Triticum aestivum
  peptide (1)..(146): Ceres Seq. ID no. 13585224
PRLKSIRFPFPESPNPLAAVAVKTLSPPPLTPPPRRDGAVGDHGHHRLLPRPPPHLPPRAPRPAPPHRAQPPQAPRLRLQADTFYIRRRSLSAQEHSGEGLGSWSERRKRGPSLARPHEAISTDPPPPSRPARLPPGATQAPFDHE

SEQ ID NO: 68699 - protein, 118 aa, Triticum aestivum
  peptide (1)..(118): Ceres Seq. ID no. 13585225
  misc_feature (8)..(118): Homolog of NCBI NO: 32699068 NR Description: hypothetical protein FLJ35107 [Homo sapiens]
PTTQIDPLPLSRIAKSARRRRRKNPLPASANPTAAERWCCGRSRPSPPTSSASAAPTASRSAASAASSGPTTPGSATSSTGGHVLYSTSQSQCTRTFRRGTWKLVGTSETRSFAGSTA

SEQ ID NO: 68700 - DNA, 1643 bp, Triticum aestivum
  misc_feature (1)..(1643): Ceres Seq. ID no. 14313563
atgctacaagcagttctacaacactgtacggacgcaggaattcaatggcggttgactccatggaatcggtggccttcgtcgcggtgcccttcccggcgcagggccacctgaaccagctcatgcacctctccctgctggccgcgtcgcgggggctctccgtgcactacgcggcgcccgcggcgcacctccggcaggcccgctcgcgcctgcacggctgggatccgcaggccctcggctccctccagttccacgacctcggcgtctccacgttcgagtccccggcgcccgacccgaccgccccgtgccccttcccgaaccacctcatgtccatgtggcagaccttcaccaccgccgcgcgcgccccgctcgccgccctcctggagagcctctcggccacccaccgccgcgtggtcgtcgtgcacgacaggctcaactccttcgccgccgtcgaggcggcgcggctgagcaacggcgagtcgttcgcgctgcagtgcgtggccatctcgtacaacatcgggtggctggacaccgagcacccgctcctgcgcgacaacgacctccagttccaccccatcgacgcctgcatgtccaaggagttcctggagtacgtcttccagacggagaaggagatggaggaacaggggggcgtgcccaccgccggcatggtcatgaacacgtgccgcgcactcgagggcgacttcatggacgccattgcggcccacccggtgttcaaggaccagaagctcttcgcagttgggccactgaacccgctgctggacgcgagcgcccggacgccggcgacgacgcggcacgactgcatggagtggctcgacaagcagccgccgtcatcggtgctctacgtgtccttcgggacgacgtcgtctctcctgggagagcaaatcgcggagctggcagcggcactcaagggcagcaagcagaggttcatctgggtattgcgcgaggctgaccgtgccgacatattcaaggagcccggcgagagcctgcacgacaagctgctctctgagttcactaaagaaaccgaggggactgggctggtgatcaccgggtgggcgccgcagctggagatcctggcgcacggcgccacggcggcattcatgagccactgcggctggaactcgaccatggagagcctgagccacggcaagccgattctggcatggccaatgcattccgaccagccgtgggacgcggagcttctctgcaagtacctcaaggccgggctcctggtgaggccatgggagaagcacagcgaggtggtgccggcggcggccatccaggaggtgatcgaggaggcgatgctcacggacaaagggatggcggtgcggcagcgggcgaaggtgctcggcgaggccgttcgcgccgccgtggcagacggcggctcctcgagcaaaggcctcgacgacttcgttgcttacgtcacgaggtgatcagcgtatctgtgcgtgccatagacagatacgcattgggcggtttgatcattgcttcggatgtgtttgaaactttgaatcatgctttctacgaaagctggatttcagtatacaatgatttgtcgttttcaatgtattcatctactactcatttttaattacacacaagggccgagaagaaagatttggaggaac

SEQ ID NO: 68701 - protein, 481 aa, Triticum aestivum
  peptide (1)..(481): Ceres Seq. ID no. 14313564
  misc_feature (187)..(472): Homolog of NCBI NO: 13492674 NR Description: phenylpropanoid:glucosyltransferase 1 [Nicotiana
  misc_feature (208)..(476): Homolog of NCBI NO: 30725312 NR Description: At2g15490 [Arabidopsis thaliana]
  misc_feature (208)..(476): Homolog of NCBI NO: 15226537 NR Description: glucosyltransferase -related [Arabidopsis
  misc_feature (220)..(481): Homolog of NCBI NO: 34910204 NR Description: putative flavonol glucosyltransferase
  misc_feature (23)..(481): Homolog of NCBI NO: 20067054 NR Description: putative glucosyltransferase [Phaseolus lunatus]
  misc_feature (22)..(481): Homolog of NCBI NO: 34899110 NR Description: putative cis-zeatin O-glucosyltransferase
  misc_feature (20)..(481): Homolog of NCBI NO: 18568243 NR Description: putative cis-zeatin O-glucosyltransferase [Zea
  misc_feature (15)..(481): Homolog of NCBI NO: 19743738 NR Description: cis-zeatin O-glucosyltransferase 2 [Zea mays]
  misc_feature (15)..(481): Homolog of NCBI NO: 14091010 NR Description: cis-zeatin O-glucosyltransferase [Zea mays]
  misc_feature (15)..(481): Homolog of NCBI NO: 38345593 NR Description: OSJNBb0012E24.11 [Oryza sativa (japonica
ATSSSTTLYGRRNSMAVDSMESVAFVAVPFPAQGHLNQLMHLSLLAASRGLSVHYAAPAAHLRQARSRLHGWDPQALGSLQFHDLGVSTFESPAPDPTAPCPFPNHLMSMWQTFTTAARAPLAALLESLSATHRRVVVVHDRLNSFAAVEAARLSNGESFALQCVAISYNIGWLDTEHPLLRDNDLQFHPIDACMSKEFLEYVFQTEKEMEEQGGVPTAGMVMNTCRALEGDFMDAIAAHPVFKDQKLFAVGPLNPLLDASARTPATTRHDCMEWLDKQPPSSVLYVSFGTTSSLLGEQIAELAAALKGSKQRFIWVLREADRADIFKEPGESLHDKLLSEFTKETEGTGLVITGWAPQLEILAHGATAAFMSHCGWNSTMESLSHGKPILAWPMHSDQPWDAELLCKYLKAGLLVRPWEKHSEVVPAAAIQEVIEEAMLTDKGMAVRQRAKVLGEAVRAAVADGGSSSKGLDDFVAYVTR

SEQ ID NO: 68702 - protein, 467 aa, Triticum aestivum
  peptide (1)..(467): Ceres Seq. ID no. 14313565
  misc_feature (173)..(458): Homolog of NCBI NO: 13492674 NR Description: phenylpropanoid:glucosyltransferase 1 [Nicotiana
  misc_feature (194)..(462): Homolog of NCBI NO: 30725312 NR Description: At2g15490 [Arabidopsis thaliana]
  misc_feature (194)..(462): Homolog of NCBI NO: 15226537 NR Description: glucosyltransferase -related [Arabidopsis
  misc_feature (206)..(467): Homolog of NCBI NO: 34910204 NR Description: putative flavonol glucosyltransferase
  misc_feature (9)..(467): Homolog of NCBI NO: 20067054 NR Description: putative glucosyltransferase [Phaseolus lunatus]
  misc_feature (8)..(467): Homolog of NCBI NO: 34899110 NR Description: putative cis-zeatin O-glucosyltransferase
  misc_feature (6)..(467): Homolog of NCBI NO: 18568243 NR Description: putative cis-zeatin O-glucosyltransferase [Zea
  misc_feature (1)..(467): Homolog of NCBI NO: 19743738 NR Description: cis-zeatin O-glucosyltransferase 2 [Zea mays]
  misc_feature (1)..(467): Homolog of NCBI NO: 14091010 NR Description: cis-zeatin O-glucosyltransferase [Zea mays]
  misc_feature (1)..(467): Homolog of NCBI NO: 38345593 NR Description: OSJNBb0012E24.11 [Oryza sativa (japonica
MAVDSMESVAFVAVPFPAQGHLNQLMHLSLLAASRGLSVHYAAPAAHLRQARSRLHGWDPQALGSLQFHDLGVSTFESPAPDPTAPCPFPNHLMSMWQTFTTAARAPLAALLESLSATHRRVVVVHDRLNSFAAVEAARLSNGESFALQCVAISYNIGWLDTEHPLLRDNDLQFHPIDACMSKEFLEYVFQTEKEMEEQGGVPTAGMVMNTCRALEGDFMDAIAAHPVFKDQKLFAVGPLNPLLDASARTPATTRHDCMEWLDKQPPSSVLYVSFGTTSSLLGEQIAELAAALKGSKQRFIWVLREADRADIFKEPGESLHDKLLSEFTKETEGTGLVITGWAPQLEILAHGATAAFMSHCGWNSTMESLSHGKPILAWPMHSDQPWDAELLCKYLKAGLLVRPWEKHSEVVPAAAIQEVIEEAMLTDKGMAVRQRAKVLGEAVRAAVADGGSSSKGLDDFVAYVTR

SEQ ID NO: 68703 - protein, 462 aa, Triticum aestivum
  peptide (1)..(462): Ceres Seq. ID no. 14313566
  misc_feature (168)..(453): Homolog of NCBI NO: 13492674 NR Description: phenylpropanoid:glucosyltransferase 1 [Nicotiana
  misc_feature (189)..(457): Homolog of NCBI NO: 30725312 NR Description: At2g15490 [Arabidopsis thaliana]
  misc_feature (189)..(457): Homolog of NCBI NO: 15226537 NR Description: glucosyltransferase -related [Arabidopsis
  misc_feature (201)..(462): Homolog of NCBI NO: 34910204 NR Description: putative flavonol glucosyltransferase
  misc_feature (4)..(462): Homolog of NCBI NO: 20067054 NR Description: putative glucosyltransferase [Phaseolus lunatus]
  misc_feature (3)..(462): Homolog of NCBI NO: 34899110 NR Description: putative cis-zeatin O-glucosyltransferase
  misc_feature (1)..(462): Homolog of NCBI NO: 18568243 NR Description: putative cis-zeatin O-glucosyltransferase [Zea
  misc_feature (1)..(462): Homolog of NCBI NO: 19743738 NR Description: cis-zeatin O-glucosyltransferase 2 [Zea mays]
  misc_feature (1)..(462): Homolog of NCBI NO: 14091010 NR Description: cis-zeatin O-glucosyltransferase [Zea mays]
  misc_feature (1)..(462): Homolog of NCBI NO: 38345593 NR Description: OSJNBb0012E24.11 [Oryza sativa (japonica
MESVAFVAVPFPAQGHLNQLMHLSLLAASRGLSVHYAAPAAHLRQARSRLHGWDPQALGSLQFHDLGVSTFESPAPDPTAPCPFPNHLMSMWQTFTTAARAPLAALLESLSATHRRVVVVHDRLNSFAAVEAARLSNGESFALQCVAISYNIGWLDTEHPLLRDNDLQFHPIDACMSKEFLEYVFQTEKEMEEQGGVPTAGMVMNTCRALEGDFMDAIAAHPVFKDQKLFAVGPLNPLLDASARTPATTRHDCMEWLDKQPPSSVLYVSFGTTSSLLGEQIAELAAALKGSKQRFIWVLREADRADIFKEPGESLHDKLLSEFTKETEGTGLVITGWAPQLEILAHGATAAFMSHCGWNSTMESLSHGKPILAWPMHSDQPWDAELLCKYLKAGLLVRPWEKHSEVVPAAAIQEVIEEAMLTDKGMAVRQRAKVLGEAVRAAVADGGSSSKGLDDFVAYVTR

SEQ ID NO: 68704 - DNA, 1487 bp, Triticum aestivum
  misc_feature (1)..(1487): Ceres Seq. ID no. 13596167
cccccctcccgttccaactttattgtgtttaaacatccatcgcttcttccccgaggaagaaaggaaccgccatggcggaggagtgctgcagcgcggacctgctggagtggatcggccctgacgtctcagcatgcgtcttcggccgccttgaccaccccgccgaccttgtccgcgccgccgctgtctccagaacctggcgcagatgcgtggtcgagagcggcttgagcaagagcctttgcctgcggctgtgccccgaggtcgccaccgtcgccgcggcggcagaggtgaccagatcgccgccttcaaccgcctcccccgagtcaggccacgagagggactacaggatatactccaacctcgccggcgcctacgtctccgactccggcgagccctccgcggaatgcatcttgcactgtatcggcgcctcaagcaccgacgacttcccaattgagaccatggagaacaccctcgacgaggaggagataatcaatttccgcccgtcctattggtcgagcggcggggcggacgaccccgaggcgccggagagccttacctacaggctcaactctgacatctgcattgtcgatgaggttcgggtgcgaccgtaccaagccttttttcaggatggtgaccctatatactcttcaaagatggtgcgatttcggatgggccattacaagcttccgcgaggatcagagacgtttgtaatggatgattatgagaataagatggtaaatactgatgaaaaatatatgtggacttacacttcgccagagttccctatgttacagaaaaacgaactacaatccttcaagctcccacgcccagtcctttgcattggtggtgtggtgatgattgaactcttgggcagagtacagaaacaagaagcagatgatatgtactacatatgtgtttgccatgctgaagtgatggggcgttcactctcaccacttttcatggttgacatctcggatcctgaaggttattcaatcctcaagtacttaccgggtgccaaagacctatccatcgatgactttttgcaagatgataccaaagactcgccggagtggcactatcttgttgatagatacaggcagatgaatcacagagcagtagtagtgagtgcacttctggagcctgtacattacatgcatgatgtaggtggcatctcagacgatgatcatgaggatgatgtaggtggcatctcagacgatgattatcttgagtagatttgcgtgctggactgcagctacaactctgccgtggttttactctttgtagtttagtgaacacctctgaactctgcaagcctttgttgcaaacatttctgaagcctcggttctcgaacctagaggacctgatcgagacaagttgcgcttatggtttgcaactctgctcaagcttgcttgtgttttctcttgtgtttttcgtttagtggtgaatatttgtcatatactacttttcaaataaatgccgtttgcggatgg

SEQ ID NO: 68705 - protein, 385 aa, Triticum aestivum
  peptide (1)..(385): Ceres Seq. ID no. 13596168
  misc_feature (231)..(318): Homolog of NCBI NO: 28850404 NR Description: hypothetical protein [Dictyostelium discoideum]
  misc_feature (119)..(203): Homolog of NCBI NO: 28850404 NR Description: hypothetical protein [Dictyostelium discoideum]
  misc_feature (232)..(298): Homolog of NCBI NO: 18308222 NR Description: unknown protein [Oryza sativa]
  misc_feature (46)..(203): Homolog of NCBI NO: 7452420 NR Description: hypothetical protein A_TM018A10.10 - Arabidopsis
  misc_feature (143)..(382): Homolog of NCBI NO: 28393062 NR Description: putative F-box protein [Arabidopsis thaliana]
  misc_feature (9)..(382): Homolog of NCBI NO: 18411435 NR Description: F-box protein family [Arabidopsis thaliana]
MAEECCSADLLEWIGPDVSACVFGRLDHPADLVRAAAVSRTWRRCVVESGLSKSLCLRLCPEVATVAAAAEVTRSPPSTASPESGHERDYRIYSNLAGAYVSDSGEPSAECILHCIGASSTDDFPIETMENTLDEEEIINFRPSYWSSGGADDPEAPESLTYRLNSDICIVDEVRVRPYQAFFQDGDPIYSSKMVRFRMGHYKLPRGSETFVMDDYENKMVNTDEKYMWTYTSPEFPMLQKNELQSFKLPRPVLCIGGVVMIELLGRVQKQEADDMYYICVCHAEVMGRSLSPLFMVDISDPEGYSILKYLPGAKDLSIDDFLQDDTKDSPEWHYLVDRYRQMNHRAVVVSALLEPVHYMHDVGGISDDDHEDDVGGISDDDYLE

SEQ ID NO: 68706 - protein, 257 aa, Triticum aestivum
  peptide (1)..(257): Ceres Seq. ID no. 13596169
  misc_feature (103)..(190): Homolog of NCBI NO: 28850404 NR Description: hypothetical protein [Dictyostelium discoideum]
  misc_feature (1)..(75): Homolog of NCBI NO: 28850404 NR Description: hypothetical protein [Dictyostelium discoideum]
  misc_feature (104)..(170): Homolog of NCBI NO: 18308222 NR Description: unknown protein [Oryza sativa]
  misc_feature (1)..(75): Homolog of NCBI NO: 7452420 NR Description: hypothetical protein A_TM018A10.10 - Arabidopsis
  misc_feature (15)..(254): Homolog of NCBI NO: 28393062 NR Description: putative F-box protein [Arabidopsis thaliana]
  misc_feature (1)..(254): Homolog of NCBI NO: 18411435 NR Description: F-box protein family [Arabidopsis thaliana]
MENTLDEEEIINFRPSYWSSGGADDPEAPESLTYRLNSDICIVDEVRVRPYQAFFQDGDPIYSSKMVRFRMGHYKLPRGSETFVMDDYENKMVNTDEKYMWTYTSPEFPMLQKNELQSFKLPRPVLCIGGVVMIELLGRVQKQEADDMYYICVCHAEVMGRSLSPLFMVDISDPEGYSILKYLPGAKDLSIDDFLQDDTKDSPEWHYLVDRYRQMNHRAVVVSALLEPVHYMHDVGGISDDDHEDDVGGISDDDYLE

SEQ ID NO: 68707 - protein, 192 aa, Triticum aestivum
  peptide (1)..(192): Ceres Seq. ID no. 13596170
  misc_feature (38)..(125): Homolog of NCBI NO: 28850404 NR Description: hypothetical protein [Dictyostelium discoideum]
  misc_feature (39)..(105): Homolog of NCBI NO: 18308222 NR Description: unknown protein [Oryza sativa]
  misc_feature (1)..(189): Homolog of NCBI NO: 28393062 NR Description: putative F-box protein [Arabidopsis thaliana]
  misc_feature (1)..(189): Homolog of NCBI NO: 18411435 NR Description: F-box protein family [Arabidopsis thaliana]
MVRFRMGHYKLPRGSETFVMDDYENKMVNTDEKYMWTYTSPEFPMLQKNELQSFKLPRPVLCIGGVVMIELLGRVQKQEADDMYYICVCHAEVMGRSLSPLFMVDISDPEGYSILKYLPGAKDLSIDDFLQDDTKDSPEWHYLVDRYRQMNHRAVVVSALLEPVHYMHDVGGISDDDHEDDVGGISDDDYLE

SEQ ID NO: 68708 - DNA, 719 bp, Triticum aestivum
  misc_feature (1)..(719): Ceres Seq. ID no. 15172660
tagaacatcctaaccgaaaataccgcagccgccacacacgacgaacaccggaacgaagcagatcggcggcgcgtcactccaatcaccggttcataaaatggcgacggtttcggattctctggtctgggagctcgtcaggaagaacaactgcttcctgatcaagcagttcggcaacagcaatgccaaggtccagttcagcaaggagcccaacaacctctacaatgtccactcctacaagtactctggcctggcaaacaagaagactgtgacagtgcagccagctgctgagaaggagatgactgtggtcctctccacaaccaagtcaaagaagcagaacaagcctgccgcgttcacccacaagactgtcatgcgcaaggagttccgcaagatggccaaggctgtcaagaaccaggtcagtgataactactataggcctgacttgaccaagcctgctcttgcaagactgagtgcagtttaccgcagcctccaggttgccaagtccggtgtcaagaagaagaacaggcagtaagcactgaggggccaatgagcttgttttgtggatccgttggtttatgtttccagctttttagatttgttctaaaagtatggaggttgaatatgatgaatggtgtgtgctgcatactggcacaagttttctcagtaggttctatatctgtacccatgactatgttgtgaagcctcttgaaatcatttccacg

SEQ ID NO: 68709 - protein, 143 aa, Triticum aestivum
  peptide (1)..(143): Ceres Seq. ID no. 15172661
  misc_feature (6)..(137): Pfam Name: Ribosomal L28e protein family Pfam Description: Ribosomal L28e protein family
  misc_feature (4)..(143): Homolog of NCBI NO: 32450198 NR Description: Unknown (protein for MGC:64430) [Xenopus laevis]
  misc_feature (5)..(135): Homolog of NCBI NO: 31212979 NR Description: ENSANGP00000014265 [Anopheles gambiae]
  misc_feature (4)..(135): Homolog of NCBI NO: 24418650 NR Description: 60S ribosomal protein L28
  misc_feature (1)..(139): Homolog of NCBI NO: 38047791 NR Description: similar to Drosophila melanogaster CG12740
  misc_feature (1)..(139): Homolog of NCBI NO: 24656625 NR Description: CG12740-PA [Drosophila melanogaster]
  misc_feature (1)..(139): Homolog of NCBI NO: 20976820 NR Description: GH04183p [Drosophila melanogaster]
  misc_feature (1)..(142): Homolog of NCBI NO: 32411169 NR Description: predicted protein [Neurospora crassa]
  misc_feature (1)..(143): Homolog of NCBI NO: 15233567 NR Description: 60S ribosomal protein L28 (RPL28C) [Arabidopsis
  misc_feature (1)..(143): Homolog of NCBI NO: 15224835 NR Description: 60S ribosomal protein L28 (RPL28A) [Arabidopsis
  misc_feature (1)..(143): Homolog of NCBI NO: 34910390 NR Description: ribosomal protein L28-like
MATVSDSLVWELVRKNNCFLIKQFGNSNAKVQFSKEPNNLYNVHSYKYSGLANKKTVTVQPAAEKEMTVVLSTTKSKKQNKPAAFTHKTVMRKEFRKMAKAVKNQVSDNYYRPDLTKPALARLSAVYRSLQVAKSGVKKKNRQ

SEQ ID NO: 68710 - protein, 77 aa, Triticum aestivum
  peptide (1)..(77): Ceres Seq. ID no. 15172662
  misc_feature (1)..(71): Pfam Name: Ribosomal L28e protein family Pfam Description: Ribosomal L28e protein family
  misc_feature (1)..(77): Homolog of NCBI NO: 32450198 NR Description: Unknown (protein for MGC:64430) [Xenopus laevis]
  misc_feature (1)..(69): Homolog of NCBI NO: 31212979 NR Description: ENSANGP00000014265 [Anopheles gambiae]
  misc_feature (1)..(69): Homolog of NCBI NO: 24418650 NR Description: 60S ribosomal protein L28
  misc_feature (1)..(73): Homolog of NCBI NO: 38047791 NR Description: similar to Drosophila melanogaster CG12740
  misc_feature (1)..(73): Homolog of NCBI NO: 24656625 NR Description: CG12740-PA [Drosophila melanogaster]
  misc_feature (1)..(73): Homolog of NCBI NO: 20976820 NR Description: GH04183p [Drosophila melanogaster]
  misc_feature (1)..(76): Homolog of NCBI NO: 32411169 NR Description: predicted protein [Neurospora crassa]
  misc_feature (1)..(77): Homolog of NCBI NO: 15233567 NR Description: 60S ribosomal protein L28 (RPL28C) [Arabidopsis
  misc_feature (1)..(77): Homolog of NCBI NO: 15224835 NR Description: 60S ribosomal protein L28 (RPL28A) [Arabidopsis
  misc_feature (1)..(77): Homolog of NCBI NO: 34910390 NR Description: ribosomal protein L28-like
MTVVLSTTKSKKQNKPAAFTHKTVMRKEFRKMAKAVKNQVSDNYYRPDLTKPALARLSAVYRSLQVAKSGVKKKNRQ

SEQ ID NO: 68711 - DNA, 688 bp, Triticum aestivum
  misc_feature (1)..(688): Ceres Seq. ID no. 13662405
cactttccccacctctcaggccaagcaaacgcacaccaggcgaggcaacgcaaagaagcaggcaggcagccatgtcgtactacgaccggcgcggggagtcgtcggtgctggaggcgttcacgctgtcgccgctgccgtacccggtgatcctgatcctgatgatggtgacgctgctgctgggggcgtcgtggttcttctcgtacgaggacttcatggaggaggcgtcggagcagttcagctggttcctgctgggcgtgcccatcgcgctcgtcctcctcatccgctggatctcctccgtcgacaccttcgagggctacttcgggttctaccccaccgagagccgctggagggggtacccggccgcgccctccgagggcagctccccctggggcgtcgccatggtcgtcgtcctcctgctcctcctcgccagcttccactccaccttccaggacatgtggaagccttgatggaatgatcgatgctccgatccatacctcgtatgtacgtgtatgtgtgtatgtatgtaattccatcgtatcgatctgtagtacacctacgaatgattgttgcttccaccttccaggcggttgctgcacctgcacgtatgtgtgccttgcttttcctcctgtactgtacatagatgaaggttatattctgctagctgaaaaactatagagcttgagtgtcg

SEQ ID NO: 68712 - protein, 157 aa, Triticum aestivum
  peptide (1)..(157): Ceres Seq. ID no. 13662406
TFPTSQAKQTHTRRGNAKKQAGSHVVLRPARGVVGAGGVHAVAAAVPGDPDPDDGDAAAGGVVVLLVRGLHGGGVGAVQLVPAGRAHRARPPHPLDLLRRHLRGLLRVLPHREPLEGVPGRALRGQLPLGRRHGRRPPAPPRQLPLHLPGHVEALME

SEQ ID NO: 68713 - protein, 154 aa, Triticum aestivum
  peptide (1)..(154): Ceres Seq. ID no. 13662407
  misc_feature (45)..(154): Homolog of NCBI NO: 37531542 NR Description: hypothetical protein [Oryza sativa (japonica
  misc_feature (43)..(151): Homolog of NCBI NO: 25408197 NR Description: hypothetical protein At2g31940 [imported] -
  misc_feature (43)..(154): Homolog of NCBI NO: 18402822 NR Description: expressed protein [Arabidopsis thaliana]
  misc_feature (33)..(154): Homolog of NCBI NO: 18420057 NR Description: expressed protein [Arabidopsis thaliana]
  misc_feature (24)..(152): Homolog of NCBI NO: 18399613 NR Description: expressed protein [Arabidopsis thaliana]
LSPPLRPSKRTPGEATQRSRQAAMSYYDRRGESSVLEAFTLSPLPYPVILILMMVTLLLGASWFFSYEDFMEEASEQFSWFLLGVPIALVLLIRWISSVDTFEGYFGFYPTESRWRGYPAAPSEGSSPWGVAMVVVLLLLLASFHSTFQDMWKP

SEQ ID NO: 68714 - protein, 131 aa, Triticum aestivum
  peptide (1)..(131): Ceres Seq. ID no. 13662408
  misc_feature (22)..(131): Homolog of NCBI NO: 37531542 NR Description: hypothetical protein [Oryza sativa (japonica
  misc_feature (20)..(128): Homolog of NCBI NO: 25408197 NR Description: hypothetical protein At2g31940 [imported] -
  misc_feature (20)..(131): Homolog of NCBI NO: 18402822 NR Description: expressed protein [Arabidopsis thaliana]
  misc_feature (10)..(131): Homolog of NCBI NO: 18420057 NR Description: expressed protein [Arabidopsis thaliana]
  misc_feature (1)..(129): Homolog of NCBI NO: 18399613 NR Description: expressed protein [Arabidopsis thaliana]
MSYYDRRGESSVLEAFTLSPLPYPVILILMMVTLLLGASWFFSYEDFMEEASEQFSWFLLGVPIALVLLIRWISSVDTFEGYFGFYPTESRWRGYPAAPSEGSSPWGVAMVVVLLLLLASFHSTFQDMWKP

SEQ ID NO: 68715 - DNA, 709 bp, Triticum aestivum
  misc_feature (1)..(709): Ceres Seq. ID no. 13598351
aacgccccgagaacgagaactcctgtgctgtgctgcccctctctctctccccccactgagtctcctgtgctgcccccgctgacctgcggccaccgacggcgagtggaggcggacgacgggttcccgccgcgggctcttcggcggcgccgcgtcagggctcgcgcgggctggtgctgatttgagggagattcggggccggggccggagccggcgcggcctctggggatggggtggctttcctgctgcaagcggtcgaacggggcccaacccggcaggaagaagaagaaggacacgacatggcggatcttctcactcaaggagcttcagttggcgaccaacaatttcaactacgataacaagcttggtgaaggtggattcggcagtgtctactggggccagctctgggacggatcacagattgcggtgaaaaggctcaagagttggagcaacaaggctgaaaaggagtctgctgtcgaggtcgaggttttggcacgagtgcggcataagagcctcttgagcttacgtggatattgcgctgaaggccaggagcgcctgatagtctacgactatatgcagaacctgagcttgcactctcacctgcacggacagcatgcagctgaatgccatcttggttgggagcgaagaatgaacatcgccattgattcggcnnnaggcatcgcttatcttcatcaccatgcgatcccacata

SEQ ID NO: 68716 - protein, 161 aa, Triticum aestivum
  peptide (1)..(161): Ceres Seq. ID no. 13598352
  misc_feature (25)..(160): Homolog of NCBI NO: 30678150 NR Description: protein kinase family [Arabidopsis thaliana]
  misc_feature (25)..(160): Homolog of NCBI NO: 15223428 NR Description: protein kinase family [Arabidopsis thaliana]
  misc_feature (22)..(160): Homolog of NCBI NO: 34902334 NR Description: Putative serine/threonine protein kinase
  misc_feature (25)..(160): Homolog of NCBI NO: 15234142 NR Description: protein kinase family [Arabidopsis thaliana]
  misc_feature (1)..(160): Homolog of NCBI NO: 34894174 NR Description: putative protein kinase [Oryza sativa (japonica
  misc_feature (6)..(160): Homolog of NCBI NO: 34898392 NR Description: ESTs C22458(C62866),C22459(C62866) correspond to region of the predicted gene.~Similar to genomic sequence of
  misc_feature (17)..(160): Homolog of NCBI NO: 25287618 NR Description: hypothetical protein F6D8.24 [imported] -
  misc_feature (6)..(160): Homolog of NCBI NO: 30695267 NR Description: protein kinase, putative [Arabidopsis thaliana]
  misc_feature (5)..(160): Homolog of NCBI NO: 21593950 NR Description: protein kinase, putative [Arabidopsis thaliana]
  misc_feature (5)..(160): Homolog of NCBI NO: 18400939 NR Description: protein kinase family [Arabidopsis thaliana]
  misc_feature (148)..(148): Xaa is any aa, unknown or other
  misc_feature (149)..(149): Xaa is any aa, unknown or other
MGWLSCCKRSNGAQPGRKKKKDTTWRIFSLKELQLATNNFNYDNKLGEGGFGSVYWGQLWDGSQIAVKRLKSWSNKAEKESAVEVEVLARVRHKSLLSLRGYCAEGQERLIVYDYMQNLSLHSHLHGQHAAECHLGWERRMNIAIDSXXGIAYLHHHAIPH

SEQ ID NO: 68717 - DNA, 1474 bp, Triticum aestivum
  misc_feature (1)..(1474): Ceres Seq. ID no. 13654329
atttcttgtattttgtggattgttggcccaataaacccaatgagagggagcgtgggcgtcatctccgtccaataaaaaaaggatgcgtgggcgaagaggagaatcaaagcaactactcctggcagcagcagctagccagctacccctgcttgctttgctttgcttccccgtcgaggaagaagaagatggggggcgtgggcgtctcccttgcgctgctcgccgccgtcgtcctctccgccgctgctgctgccccgcagctagcgggagcagccaaggcagagcattccctaggaatcatccagaaggacatcattcagacggtcaacaagcatcccaatgccgggtggacggctggacacaacccctacttcgcaaactacactattgagcaattcaagcatatcctgggtgtgaagccaacgcctccgggtttgctcgctggtgttccaatccaaacccatccagaatcagtggatctccccaaggagtttgacgctagaactcaatggtccagttgcagcacaattgggaacatacttgatcaaggtcactgtggtgcctgttgggcctttgctgccgtggaagctctccaggatcgtttctgtattcatctcaacatgagcgtcacactttcggtcaatgacctactggcttgctgtggttttctgtgtggtagcggttgtaatggaggatatcctatcagcgcatggcgctacttccgtcgcagtggtatcgtcactgaggagtgcgatccatacttcgatcagactggttgccagcatcctggatgcgagccagcttatcctacaccaaaatgtcaaaggaaatgcaaggtgcagaaccaagtgtggaaggaaaagaagcatttcagtgttaatgcgtacagagtacattctgatccccatgacatcatggcagaggtctacaaaaatggccctgtagaagttgctttcaccgtttatgaggacttcgcacactacaagtcaggagtgtacaagcacatcacaggtggcgtgatgggaggtcacgccgtcaagttgattggttggggaaccagtgatgctggcgaggattactggcttcttgcaaatcagtggaacagaggctggggtgatgacgggtacttcaagatcataaggggcaagaatgaatgtggcatcgaagaagatgttactgccggtatgccctcgacaaagaacacggccagaaacaatgatgtcgcctttggaacggccatactttgagcagcgccctggttacaaacacggttgaagttagctgtttgcatgtcaaatgaagccagtaaattagctttgatggttccaggatactgtattatgtacactagcgcaaacgctgatatgttgctgaaacaacaccttgttcagaaacaaaagggagtaataataataccaacaaaaccataaggctgtcatctcgaaaaaaaaaawaavgctgtcatctcgataccgtc

SEQ ID NO: 68718 - protein, 413 aa, Triticum aestivum
  peptide (1)..(413): Ceres Seq. ID no. 15219643
  misc_feature (159)..(394): Pfam Name: Papain family cysteine protease Pfam Description: Papain family cysteine protease
  misc_feature (69)..(399): Homolog of NCBI NO: 6165885 NR Description: cathepsin B-like cysteine proteinase [Ipomoea
  misc_feature (69)..(399): Homolog of NCBI NO: 14582576 NR Description: cathepsin B-like cysteine proteinase [Ipomoea
  misc_feature (71)..(407): Homolog of NCBI NO: 2129942 NR Description: cathepsin B-like cysteine proteinase (EC
  misc_feature (71)..(402): Homolog of NCBI NO: 18378947 NR Description: expressed protein [Arabidopsis thaliana]
  misc_feature (71)..(407): Homolog of NCBI NO: 609175 NR Description: cathepsin B-like cysteine proteinase [Nicotiana
  misc_feature (69)..(413): Homolog of NCBI NO: 38639325 NR Description: cathepsin B-like cysteine proteinase [Solanum
  misc_feature (103)..(401): Homolog of NCBI NO: 7435783 NR Description: cathepsin B-like cysteine proteinase (EC
  misc_feature (62)..(401): Homolog of NCBI NO: 40643250 NR Description: cathepsin B [Hordeum vulgare subsp. vulgare]
  misc_feature (62)..(370): Homolog of NCBI NO: 21695 NR Description: cathepsin B [Triticum aestivum]
  misc_feature (62)..(413): Homolog of NCBI NO: 7435782 NR Description: cathepsin B-like cysteine proteinase (EC
FLYFVDCWPNKPNERERGRHLRPIKKGCVGEEENQSNYSWQQQLASYPCLLCFASPSRKKKMGGVGVSLALLAAVVLSAAAAAPQLAGAAKAEHSLGIIQKDIIQTVNKHPNAGWTAGHNPYFANYTIEQFKHILGVKPTPPGLLAGVPIQTHPESVDLPKEFDARTQWSSCSTIGNILDQGHCGACWAFAAVEALQDRFCIHLNMSVTLSVNDLLACCGFLCGSGCNGGYPISAWRYFRRSGIVTEECDPYFDQTGCQHPGCEPAYPTPKCQRKCKVQNQVWKEKKHFSVNAYRVHSDPHDIMAEVYKNGPVEVAFTVYEDFAHYKSGVYKHITGGVMGGHAVKLIGWGTSDAGEDYWLLANQWNRGWGDDGYFKIIRGKNECGIEEDVTAGMPSTKNTARNNDVAFGTAIL

SEQ ID NO: 68719 - protein, 352 aa, Triticum aestivum
  peptide (1)..(352): Ceres Seq. ID no. 15219644
  misc_feature (98)..(333): Pfam Name: Papain family cysteine protease Pfam Description: Papain family cysteine protease
  misc_feature (8)..(338): Homolog of NCBI NO: 6165885 NR Description: cathepsin B-like cysteine proteinase [Ipomoea
  misc_feature (8)..(338): Homolog of NCBI NO: 14582576 NR Description: cathepsin B-like cysteine proteinase [Ipomoea
  misc_feature (10)..(346): Homolog of NCBI NO: 2129942 NR Description: cathepsin B-like cysteine proteinase (EC
  misc_feature (10)..(341): Homolog of NCBI NO: 18378947 NR Description: expressed protein [Arabidopsis thaliana]
  misc_feature (10)..(346): Homolog of NCBI NO: 609175 NR Description: cathepsin B-like cysteine proteinase [Nicotiana
  misc_feature (8)..(352): Homolog of NCBI NO: 38639325 NR Description: cathepsin B-like cysteine proteinase [Solanum
  misc_feature (42)..(340): Homolog of NCBI NO: 7435783 NR Description: cathepsin B-like cysteine proteinase (EC
  misc_feature (1)..(340): Homolog of NCBI NO: 40643250 NR Description: cathepsin B [Hordeum vulgare subsp. vulgare]
  misc_feature (1)..(309): Homolog of NCBI NO: 21695 NR Description: cathepsin B [Triticum aestivum]
  misc_feature (1)..(352): Homolog of NCBI NO: 7435782 NR Description: cathepsin B-like cysteine proteinase (EC
MGGVGVSLALLAAVVLSAAAAAPQLAGAAKAEHSLGIIQKDIIQTVNKHPNAGWTAGHNPYFANYTIEQFKHILGVKPTPPGLLAGVPIQTHPESVDLPKEFDARTQWSSCSTIGNILDQGHCGACWAFAAVEALQDRFCIHLNMSVTLSVNDLLACCGFLCGSGCNGGYPISAWRYFRRSGIVTEECDPYFDQTGCQHPGCEPAYPTPKCQRKCKVQNQVWKEKKHFSVNAYRVHSDPHDIMAEVYKNGPVEVAFTVYEDFAHYKSGVYKHITGGVMGGHAVKLIGWGTSDAGEDYWLLANQWNRGWGDDGYFKIIRGKNECGIEEDVTAGMPSTKNTARNNDVAFGTAIL

SEQ ID NO: 68720 - protein, 208 aa, Triticum aestivum
  peptide (1)..(208): Ceres Seq. ID no. 15219645
  misc_feature (1)..(189): Pfam Name: Papain family cysteine protease Pfam Description: Papain family cysteine protease
  misc_feature (1)..(194): Homolog of NCBI NO: 6165885 NR Description: cathepsin B-like cysteine proteinase [Ipomoea
  misc_feature (1)..(194): Homolog of NCBI NO: 14582576 NR Description: cathepsin B-like cysteine proteinase [Ipomoea
  misc_feature (1)..(202): Homolog of NCBI NO: 2129942 NR Description: cathepsin B-like cysteine proteinase (EC
  misc_feature (1)..(197): Homolog of NCBI NO: 18378947 NR Description: expressed protein [Arabidopsis thaliana]
  misc_feature (1)..(202): Homolog of NCBI NO: 609175 NR Description: cathepsin B-like cysteine proteinase [Nicotiana
  misc_feature (1)..(208): Homolog of NCBI NO: 38639325 NR Description: cathepsin B-like cysteine proteinase [Solanum
  misc_feature (1)..(196): Homolog of NCBI NO: 7435783 NR Description: cathepsin B-like cysteine proteinase (EC
  misc_feature (1)..(196): Homolog of NCBI NO: 40643250 NR Description: cathepsin B [Hordeum vulgare subsp. vulgare]
  misc_feature (1)..(165): Homolog of NCBI NO: 21695 NR Description: cathepsin B [Triticum aestivum]
  misc_feature (1)..(208): Homolog of NCBI NO: 7435782 NR Description: cathepsin B-like cysteine proteinase (EC
MSVTLSVNDLLACCGFLCGSGCNGGYPISAWRYFRRSGIVTEECDPYFDQTGCQHPGCEPAYPTPKCQRKCKVQNQVWKEKKHFSVNAYRVHSDPHDIMAEVYKNGPVEVAFTVYEDFAHYKSGVYKHITGGVMGGHAVKLIGWGTSDAGEDYWLLANQWNRGWGDDGYFKIIRGKNECGIEEDVTAGMPSTKNTARNNDVAFGTAIL

SEQ ID NO: 68721 - DNA, 1451 bp, Triticum aestivum
  misc_feature (1)..(1451): Ceres Seq. ID no. 13596433
tccacctcgcctcgtcgtccgcccacggtctaatccgattcaaacgcaccgcttcctcgtgtccgaactaagccccaatcccgtcaccaccgccgctggtgctcggcgcgatggcgcagaaggacgccgccaatggcaacggcgccaccacgcgcccgccgcccactccctcccccatccgcttctccaagttcttccaggccaacatgcggatcctggtcaccggcggagctggcttcatcggctcgcacctcgtcgacaagctcatggagaacgagaagaacgaggtcattgttgctgacaactttttcactgggtcaaaagacaacctgaagaagtggatcggacaccctagatttgaactcatccgtcacgatgtcaccgaaccactgctcgtggaggttgaccaaatctaccaccttgcttgtcctgcctcaccaatcttctacaagcacaaccctgtcaagaccatcaagacgaatgtcattggaaccttgaacatgcttggacttgcaaagagagttggagctagaatattgttgacttcgacctctgaagtttatggtgatccccttgagcatcctcagacggaggcatactggggcaatgttaacccaattggagtcaggagctgctacgatgagggtaagcgtgtagctgagacactgatgttcgactaccacaggcagcatggcattgagatccgtattgccaggattttcaacacctacggacctaggatgaacattgatgatggccgtgttgttagtaacttcattgctcaggccattcgtggtgaagcactgactgtccagaagcctggaacacagactaggagcttctgctacgtcgctgatatggtcaatggtcttatgaagctgatgaatggagacaacaccggacccattaacattgggaacccaggtgaattcaccatgctggaacttgccgagaatgtgaaggagttgatcaacccagaagtgacagtgacgatgactgagaacactcctgatgaccctcgccagaggaagcctgacatcaccaaggccaaggaggttctcgactgggagcccaaggtcgtcctgcgcgacggcttggtgctcatggaggacgatttcagggagcgcttggcagtgcccaagaagaccaaggcctaagccccctccccgcgtttggcgtacaacatcaccaatttgccagagcatactcatagttgggtgggttcgtcaatattcgttgctgcgtttcgttacggaatttgagttccaataaaccaattacaccttcgttgttcacttgaaagattgtattattagaaacttcatacaaggcctggctgtttgtattaccgtctctttttgtggaacttgtgctccttacgttttagcctatgcacttccctaaatcaattatagcaatgttggtgccattttgggtttgttattaatttg

SEQ ID NO: 68722 - protein, 348 aa, Triticum aestivum
  peptide (1)..(348): Ceres Seq. ID no. 15221872
  misc_feature (35)..(340): Pfam Name: NAD dependent epimerase/dehydratase family Pfam Description: NAD dependent epimerase/dehydratase family
  misc_feature (34)..(340): Homolog of NCBI NO: 25396402 NR Description: UDP-glucuronic acid decarboxylase
  misc_feature (82)..(344): Homolog of NCBI NO: 2351580 NR Description: thymidine diphospho-glucose 4-6-dehydratase
  misc_feature (13)..(344): Homolog of NCBI NO: 14030703 NR Description: AT5g59290/mnc17_180 [Arabidopsis thaliana]
  misc_feature (5)..(344): Homolog of NCBI NO: 13591616 NR Description: UDP-D-glucuronate carboxy-lyase [Pisum sativum]
  misc_feature (13)..(344): Homolog of NCBI NO: 15237853 NR Description: NAD-dependent epimerase/dehydratase family
  misc_feature (6)..(344): Homolog of NCBI NO: 15231432 NR Description: NAD-dependent epimerase/dehydratase family
  misc_feature (5)..(345): Homolog of NCBI NO: 11270075 NR Description: dTDPglucose 4,6-dehydratase (EC 4.2.1.46)
  misc_feature (5)..(345): Homolog of NCBI NO: 15226950 NR Description: NAD-dependent epimerase/dehydratase family
  misc_feature (1)..(348): Homolog of NCBI NO: 11121508 NR Description: d-TDP-glucose dehydratase [Phragmites australis]
  misc_feature (1)..(348): Homolog of NCBI NO: 18447934 NR Description: UDP-glucuronic acid decarboxylase
MAQKDAANGNGATTRPPPTPSPIRFSKFFQANMRILVTGGAGFIGSHLVDKLMENEKNEVIVADNFFTGSKDNLKKWIGHPRFELIRHDVTEPLLVEVDQIYHLACPASPIFYKHNPVKTIKTNVIGTLNMLGLAKRVGARILLTSTSEVYGDPLEHPQTEAYWGNVNPIGVRSCYDEGKRVAETLMFDYHRQHGIEIRIARIFNTYGPRMNIDDGRVVSNFIAQAIRGEALTVQKPGTQTRSFCYVADMVNGLMKLMNGDNTGPINIGNPGEFTMLELAENVKELINPEVTVTMTENTPDDPRQRKPDITKAKEVLDWEPKVVLRDGLVLMEDDFRERLAVPKKTKA

SEQ ID NO: 68723 - protein, 316 aa, Triticum aestivum
  peptide (1)..(316): Ceres Seq. ID no. 15221873
  misc_feature (3)..(308): Pfam Name: NAD dependent epimerase/dehydratase family Pfam Description: NAD dependent epimerase/dehydratase family
  misc_feature (2)..(308): Homolog of NCBI NO: 25396402 NR Description: UDP-glucuronic acid decarboxylase
  misc_feature (50)..(312): Homolog of NCBI NO: 2351580 NR Description: thymidine diphospho-glucose 4-6-dehydratase
  misc_feature (1)..(312): Homolog of NCBI NO: 14030703 NR Description: AT5g59290/mnc17_180 [Arabidopsis thaliana]
  misc_feature (1)..(312): Homolog of NCBI NO: 13591616 NR Description: UDP-D-glucuronate carboxy-lyase [Pisum sativum]
  misc_feature (1)..(312): Homolog of NCBI NO: 15237853 NR Description: NAD-dependent epimerase/dehydratase family
  misc_feature (1)..(312): Homolog of NCBI NO: 15231432 NR Description: NAD-dependent epimerase/dehydratase family
  misc_feature (1)..(313): Homolog of NCBI NO: 11270075 NR Description: dTDPglucose 4,6-dehydratase (EC 4.2.1.46)
  misc_feature (1)..(313): Homolog of NCBI NO: 15226950 NR Description: NAD-dependent epimerase/dehydratase family
  misc_feature (1)..(316): Homolog of NCBI NO: 11121508 NR Description: d-TDP-glucose dehydratase [Phragmites australis]
  misc_feature (1)..(316): Homolog of NCBI NO: 18447934 NR Description: UDP-glucuronic acid decarboxylase
MRILVTGGAGFIGSHLVDKLMENEKNEVIVADNFFTGSKDNLKKWIGHPRFELIRHDVTEPLLVEVDQIYHLACPASPIFYKHNPVKTIKTNVIGTLNMLGLAKRVGARILLTSTSEVYGDPLEHPQTEAYWGNVNPIGVRSCYDEGKRVAETLMFDYHRQHGIEIRIARIFNTYGPRMNIDDGRVVSNFIAQAIRGEALTVQKPGTQTRSFCYVADMVNGLMKLMNGDNTGPINIGNPGEFTMLELAENVKELINPEVTVTMTENTPDDPRQRKPDITKAKEVLDWEPKVVLRDGLVLMEDDFRERLAVPKKTKA

SEQ ID NO: 68724 - protein, 296 aa, Triticum aestivum
  peptide (1)..(296): Ceres Seq. ID no. 15221874
  misc_feature (1)..(288): Pfam Name: NAD dependent epimerase/dehydratase family Pfam Description: NAD dependent epimerase/dehydratase family
  misc_feature (1)..(288): Homolog of NCBI NO: 25396402 NR Description: UDP-glucuronic acid decarboxylase
  misc_feature (30)..(292): Homolog of NCBI NO: 2351580 NR Description: thymidine diphospho-glucose 4-6-dehydratase
  misc_feature (1)..(292): Homolog of NCBI NO: 14030703 NR Description: AT5g59290/mnc17_180 [Arabidopsis thaliana]
  misc_feature (1)..(292): Homolog of NCBI NO: 13591616 NR Description: UDP-D-glucuronate carboxy-lyase [Pisum sativum]
  misc_feature (1)..(292): Homolog of NCBI NO: 15237853 NR Description: NAD-dependent epimerase/dehydratase family
  misc_feature (1)..(292): Homolog of NCBI NO: 15231432 NR Description: NAD-dependent epimerase/dehydratase family
  misc_feature (1)..(293): Homolog of NCBI NO: 11270075 NR Description: dTDPglucose 4,6-dehydratase (EC 4.2.1.46)
  misc_feature (1)..(293): Homolog of NCBI NO: 15226950 NR Description: NAD-dependent epimerase/dehydratase family
  misc_feature (1)..(296): Homolog of NCBI NO: 11121508 NR Description: d-TDP-glucose dehydratase [Phragmites australis]
  misc_feature (1)..(296): Homolog of NCBI NO: 18447934 NR Description: UDP-glucuronic acid decarboxylase
MENEKNEVIVADNFFTGSKDNLKKWIGHPRFELIRHDVTEPLLVEVDQIYHLACPASPIFYKHNPVKTIKTNVIGTLNMLGLAKRVGARILLTSTSEVYGDPLEHPQTEAYWGNVNPIGVRSCYDEGKRVAETLMFDYHRQHGIEIRIARIFNTYGPRMNIDDGRVVSNFIAQAIRGEALTVQKPGTQTRSFCYVADMVNGLMKLMNGDNTGPINIGNPGEFTMLELAENVKELINPEVTVTMTENTPDDPRQRKPDITKAKEVLDWEPKVVLRDGLVLMEDDFRERLAVPKKTKA

SEQ ID NO: 68725 - DNA, 1410 bp, Triticum aestivum
  misc_feature (1)..(1410): Ceres Seq. ID no. 14316032
tgagttcccagcgccctcagagccacagactcgagcgcgcccccatcctgctccccaaccaagaagcgagacgacggtgaccagtccccagaggccagagcgcactcccatcccatggatctgcagaccttcgtgctgagggtgaccatccactgccatggctgcaagaagaaggtccggaaggtgctcaagagcgtcgaaggcgtgcaggacgtgaaggtggatgcccagctgcacaaggtgatggtgaccggcaccgtggacgccgagacgctcatcaagaggctcaacaagtctggcaagcaggccctgccatggcaacacacgcctgccaagaatcccgaccctgcgccagccgacgcccccgcgccggccgaggacggcagcaaggatgctgctgtggccgacaagaagccggcggaggagccgcaggccgacagctcagacaagaagccggagcaggagacggcctcggagaagaagccggagcaggagacggcctcggagaagaagcctgagacggagaaggaagcagagtctgagaagaaggctgacaaggaggaggcgaaaccaagcgacgaggcaaagaaagacggcggcgagggcgcggcggccgagcccaaacccaaagcaaagggcaccgagcccgccgccgctgcaaaggaggccggcgatgacgagggcgaggcgaagaagaaacagagcaagcccaaggacgcggataggtccctggccccagcgccggcgccggcccatgcgccgaggtacgcgcaccaggaattcaacgcgccgcagccggtgatgagctacaacatggcgcagccgagagcgagcgtgtcccactacgcgccgcagccggagcagggctactcgcagcagcagcaggccgggtactcctcctcctcctccatgatggtgacgcagcacccaccgccaccggcgcagcaggcctactcccagcaggcgcagccaatgcagcaatggtcgccgtcctacctctacatgccgtacccgcacgcgtcgccggagtcctactaccaggactactacagcccgcccgggacgcacgcgtcgccgccgcccccgccgccgctccaggactcgtaccgcctattcgacgacgagaaccccaactcgtgcagcgtcatgtgatctgatcacggctccggccaccggcggaaaagtagaggcggccgtcctcataatcgtaatagagacggacctctctggttgtaggtagagtagcttgttactctcttcgattgggaggtcaaagctctccttgaccaatcctttttcttctcacttcttcctctttaatttcttcttttgttattgctactattactgttctaaatagagcatgtaattgtaatttacatgtagaatagtagcatcaatgagatctcc

SEQ ID NO: 68726 - protein, 345 aa, Triticum aestivum
  peptide (1)..(345): Ceres Seq. ID no. 14316033
  misc_feature (23)..(231): Pfam Name: Brain acid soluble protein 1 (BASP1 protein) Pfam Description: Brain acid soluble protein 1 (BASP1 protein)
  misc_feature (1)..(175): Homolog of NCBI NO: 12083536 NR Description: hypothetical protein [Oryza sativa]
  misc_feature (246)..(345): Homolog of NCBI NO: 18404283 NR Description: heavy-metal-associated domain-containing protein
  misc_feature (1)..(162): Homolog of NCBI NO: 18404283 NR Description: heavy-metal-associated domain-containing protein
  misc_feature (1)..(248): Homolog of NCBI NO: 33146848 NR Description: copper chaperone (CCH)-related protein-like
  misc_feature (246)..(345): Homolog of NCBI NO: 25408515 NR Description: probable farnesylated protein [imported] -
  misc_feature (1)..(162): Homolog of NCBI NO: 25408515 NR Description: probable farnesylated protein [imported] -
  misc_feature (78)..(322): Homolog of NCBI NO: 33146848 NR Description: copper chaperone (CCH)-related protein-like
  misc_feature (1)..(316): Homolog of NCBI NO: 21536659 NR Description: unknown [Arabidopsis thaliana]
  misc_feature (1)..(316): Homolog of NCBI NO: 18405728 NR Description: copper chaperone (CCH)-related [Arabidopsis
  misc_feature (1)..(316): Homolog of NCBI NO: 27754505 NR Description: putative copper chaperone (CCH) protein
MDLQTFVLRVTIHCHGCKKKVRKVLKSVEGVQDVKVDAQLHKVMVTGTVDAETLIKRLNKSGKQALPWQHTPAKNPDPAPADAPAPAEDGSKDAAVADKKPAEEPQADSSDKKPEQETASEKKPEQETASEKKPETEKEAESEKKADKEEAKPSDEAKKDGGEGAAAEPKPKAKGTEPAAAAKEAGDDEGEAKKKQSKPKDADRSLAPAPAPAHAPRYAHQEFNAPQPVMSYNMAQPRASVSHYAPQPEQGYSQQQQAGYSSSSSMMVTQHPPPPAQQAYSQQAQPMQQWSPSYLYMPYPHASPESYYQDYYSPPGTHASPPPPPPLQDSYRLFDDENPNSCSVM

SEQ ID NO: 68727 - protein, 302 aa, Triticum aestivum
  peptide (1)..(302): Ceres Seq. ID no. 14316034
  misc_feature (1)..(188): Pfam Name: Brain acid soluble protein 1 (BASP1 protein) Pfam Description: Brain acid soluble protein 1 (BASP1 protein)
  misc_feature (1)..(132): Homolog of NCBI NO: 12083536 NR Description: hypothetical protein [Oryza sativa]
  misc_feature (203)..(302): Homolog of NCBI NO: 18404283 NR Description: heavy-metal-associated domain-containing protein
  misc_feature (1)..(119): Homolog of NCBI NO: 18404283 NR Description: heavy-metal-associated domain-containing protein
  misc_feature (1)..(205): Homolog of NCBI NO: 33146848 NR Description: copper chaperone (CCH)-related protein-like
  misc_feature (203)..(302): Homolog of NCBI NO: 25408515 NR Description: probable farnesylated protein [imported] -
  misc_feature (1)..(119): Homolog of NCBI NO: 25408515 NR Description: probable farnesylated protein [imported] -
  misc_feature (35)..(279): Homolog of NCBI NO: 33146848 NR Description: copper chaperone (CCH)-related protein-like
  misc_feature (1)..(273): Homolog of NCBI NO: 21536659 NR Description: unknown [Arabidopsis thaliana]
  misc_feature (1)..(273): Homolog of NCBI NO: 18405728 NR Description: copper chaperone (CCH)-related [Arabidopsis
  misc_feature (1)..(273): Homolog of NCBI NO: 27754505 NR Description: putative copper chaperone (CCH) protein
MVTGTVDAETLIKRLNKSGKQALPWQHTPAKNPDPAPADAPAPAEDGSKDAAVADKKPAEEPQADSSDKKPEQETASEKKPEQETASEKKPETEKEAESEKKADKEEAKPSDEAKKDGGEGAAAEPKPKAKGTEPAAAAKEAGDDEGEAKKKQSKPKDADRSLAPAPAPAHAPRYAHQEFNAPQPVMSYNMAQPRASVSHYAPQPEQGYSQQQQAGYSSSSSMMVTQHPPPPAQQAYSQQAQPMQQWSPSYLYMPYPHASPESYYQDYYSPPGTHASPPPPPPLQDSYRLFDDENPNSCSVM

SEQ ID NO: 68728 - DNA, 1211 bp, Triticum aestivum
  misc_feature (1)..(1211): Ceres Seq. ID no. 14303535
actttggtcttccacgcccacttccagttccccacactcgcctccatcttcttctcttcgagatgcttcttaggattgcgtcgtctccggccgccgtcgccgcggctagccagctctctgcgtcaagcccggcccacggttatgcgaggctgccgccgttagcgaaagtgtcgtcgacggcgtgcagggccgcggggaaggggaaaaaagaggaggtactcctcagcggtgtgatgttccagccgttcgaggagctcaagggggagctttcgctcgtgccgcaggccgagggccagtcgctcgccaggcaaaagttcgtcgacgaatgcgaggccgccatcaacgagcagatcaatgtggagtacaatgcctcgtacgcgtaccactccctctacgcctacttcgaccgggacaatgttgctctcaagggctttgccaagttctttagggaatcgagcgacgaggagagggaacacgcggagatgcttatggagtaccagaacagacgtggagggcgggtgaggctccagtctatcgtgaccccattgacagagttcgaccactctgagaaaggggatgctctgtatgcaatggagttggctctagctcttgaaaagctcgtgaatgagaagctgcacaacctgcactctgtggcaacaaggtgcaacgatcctcagctgagcgactttgttgagagtcaatttcttcaggagcaggttgtcgccgtgaagaagatctccgagtacgtgacgcagcttaggagaatcggcaaagggcacggggtgtggcactttgatcggatgctgctcgaagaagaggcctagagatcaggccatgaatatgcattgctgctcaggggaagatgcatgtaggtcacaactcacaactgtcaagtagtggatcagccaaccactgtggatgtgtttcttgggtttttcagtgggtttattgagtcgtatgtaaggttttgcgtcctccaaaagaacatggcgcactgaaagtacttcctccgttccaaactactcgtcgcagaaatggatgtatttagaactaaaatacatctagatacacccatacctgcgacaagtaattcggaacggagggagtagtaagtagtagaacatgtgaactatgttacttctgtgcatgtgctgccagtggatacatttgaaattcgcaataaagccaggactatatgtagggtcttgggt

SEQ ID NO: 68729 - protein, 273 aa, Triticum aestivum
  peptide (1)..(273): Ceres Seq. ID no. 14303536
  misc_feature (110)..(255): Pfam Name: Ferritin-like domain Pfam Description: Ferritin-like domain
  misc_feature (33)..(271): Homolog of NCBI NO: 29839287 NR Description: Ferritin 2, chloroplast precursor
  misc_feature (21)..(273): Homolog of NCBI NO: 29840837 NR Description: Ferritin 2, chloroplast precursor (ZmFer2)
  misc_feature (20)..(273): Homolog of NCBI NO: 82688 NR Description: ferritin 2 precursor (clone FM2) - maize
  misc_feature (21)..(273): Homolog of NCBI NO: 1103630 NR Description: ferritin [Zea mays]
  misc_feature (24)..(273): Homolog of NCBI NO: 14091661 NR Description: ferritin [Oryza sativa]
  misc_feature (21)..(273): Homolog of NCBI NO: 29840836 NR Description: Ferritin 1, chloroplast precursor (ZmFer1)
  misc_feature (24)..(273): Homolog of NCBI NO: 21686528 NR Description: ferritin [Oryza sativa (japonica cultivar-group)]
  misc_feature (28)..(273): Homolog of NCBI NO: 21686526 NR Description: ferritin [Oryza sativa (japonica cultivar-group)]
  misc_feature (21)..(273): Homolog of NCBI NO: 1103628 NR Description: ferritin [Zea mays]
  misc_feature (6)..(273): Homolog of NCBI NO: 82687 NR Description: ferritin 1 precursor (clone FM1) - maize
FGLPRPLPVPHTRLHLLLFEMLLRIASSPAAVAAASQLSASSPAHGYARLPPLAKVSSTACRAAGKGKKEEVLLSGVMFQPFEELKGELSLVPQAEGQSLARQKFVDECEAAINEQINVEYNASYAYHSLYAYFDRDNVALKGFAKFFRESSDEEREHAEMLMEYQNRRGGRVRLQSIVTPLTEFDHSEKGDALYAMELALALEKLVNEKLHNLHSVATRCNDPQLSDFVESQFLQEQVVAVKKISEYVTQLRRIGKGHGVWHFDRMLLEEEA

SEQ ID NO: 68730 - protein, 253 aa, Triticum aestivum
  peptide (1)..(253): Ceres Seq. ID no. 14303537
  misc_feature (90)..(235): Pfam Name: Ferritin-like domain Pfam Description: Ferritin-like domain
  misc_feature (13)..(251): Homolog of NCBI NO: 29839287 NR Description: Ferritin 2, chloroplast precursor
  misc_feature (1)..(253): Homolog of NCBI NO: 29840837 NR Description: Ferritin 2, chloroplast precursor (ZmFer2)
  misc_feature (1)..(253): Homolog of NCBI NO: 82688 NR Description: ferritin 2 precursor (clone FM2) - maize
  misc_feature (1)..(253): Homolog of NCBI NO: 1103630 NR Description: ferritin [Zea mays]
  misc_feature (4)..(253): Homolog of NCBI NO: 14091661 NR Description: ferritin [Oryza sativa]
  misc_feature (1)..(253): Homolog of NCBI NO: 29840836 NR Description: Ferritin 1, chloroplast precursor (ZmFer1)
  misc_feature (4)..(253): Homolog of NCBI NO: 21686528 NR Description: ferritin [Oryza sativa (japonica cultivar-group)]
  misc_feature (8)..(253): Homolog of NCBI NO: 21686526 NR Description: ferritin [Oryza sativa (japonica cultivar-group)]
  misc_feature (1)..(253): Homolog of NCBI NO: 1103628 NR Description: ferritin [Zea mays]
  misc_feature (1)..(253): Homolog of NCBI NO: 82687 NR Description: ferritin 1 precursor (clone FM1) - maize
MLLRIASSPAAVAAASQLSASSPAHGYARLPPLAKVSSTACRAAGKGKKEEVLLSGVMFQPFEELKGELSLVPQAEGQSLARQKFVDECEAAINEQINVEYNASYAYHSLYAYFDRDNVALKGFAKFFRESSDEEREHAEMLMEYQNRRGGRVRLQSIVTPLTEFDHSEKGDALYAMELALALEKLVNEKLHNLHSVATRCNDPQLSDFVESQFLQEQVVAVKKISEYVTQLRRIGKGHGVWHFDRMLLEEEA

SEQ ID NO: 68731 - protein, 196 aa, Triticum aestivum
  peptide (1)..(196): Ceres Seq. ID no. 14303538
  misc_feature (33)..(178): Pfam Name: Ferritin-like domain Pfam Description: Ferritin-like domain
  misc_feature (1)..(194): Homolog of NCBI NO: 29839287 NR Description: Ferritin 2, chloroplast precursor
  misc_feature (1)..(196): Homolog of NCBI NO: 29840837 NR Description: Ferritin 2, chloroplast precursor (ZmFer2)
  misc_feature (1)..(196): Homolog of NCBI NO: 82688 NR Description: ferritin 2 precursor (clone FM2) - maize
  misc_feature (1)..(196): Homolog of NCBI NO: 1103630 NR Description: ferritin [Zea mays]
  misc_feature (1)..(196): Homolog of NCBI NO: 14091661 NR Description: ferritin [Oryza sativa]
  misc_feature (1)..(196): Homolog of NCBI NO: 29840836 NR Description: Ferritin 1, chloroplast precursor (ZmFer1)
  misc_feature (1)..(196): Homolog of NCBI NO: 21686528 NR Description: ferritin [Oryza sativa (japonica cultivar-group)]
  misc_feature (1)..(196): Homolog of NCBI NO: 21686526 NR Description: ferritin [Oryza sativa (japonica cultivar-group)]
  misc_feature (1)..(196): Homolog of NCBI NO: 1103628 NR Description: ferritin [Zea mays]
  misc_feature (1)..(196): Homolog of NCBI NO: 82687 NR Description: ferritin 1 precursor (clone FM1) - maize
MFQPFEELKGELSLVPQAEGQSLARQKFVDECEAAINEQINVEYNASYAYHSLYAYFDRDNVALKGFAKFFRESSDEEREHAEMLMEYQNRRGGRVRLQSIVTPLTEFDHSEKGDALYAMELALALEKLVNEKLHNLHSVATRCNDPQLSDFVESQFLQEQVVAVKKISEYVTQLRRIGKGHGVWHFDRMLLEEEA

SEQ ID NO: 68732 - DNA, 1241 bp, Triticum aestivum
  misc_feature (1)..(1241): Ceres Seq. ID no. 13654605
gttaccaccatcctcggcttctctgacgcgccatctccaccgtccgccgtcaatccccaccgcgccacagccgccgcccagatggccgcggctggcggcttctcccccctctccggcaccctcctccgccgccgcatacccctccaccatcaccgccgcttcctctccatcgcggccgctgcctcggaagcccccgcgcctgcccccaccccgtcccagccgccgccgccgccgcgtccacgcggaaaggggtacttccccaagaagaacgagatcctcgagctgacctgcgaggggctcgccttcaaggggaagggcgtctgcaaggtcgacggctcctccttcgtcctgctctgcgacggcgctctccccggcgagcgcctcgtggctcgcgtccgtcgcctccgccgcggcgccttcgccgaggccgccaagctcaagaccctctcgccccaccacgacgccgtcgaggccccctgccccctcgccgccgactgcggcggctgcaagagccagtccctcgcctactctgcgcaaatccaccacaagtacgtccaggtccgcgacctgctggtaaatttcggcaagtttgaccccaggaagctggagagctcggattcagacgccgtccttaagcccatcgtgccgtgcgacgagatatttcggtacaggaacaagatggagttctcgtttgggacgaagaggtggatgaaaagggagtggaaggaggagaaagaggaggtgtcgaagggggaagagttggagactgatggttattcacttggcctccatgcaccagggttctttgacaaggtgcttcacgtcgagacgtgcttgctgcacagtgagccggcagataagactaaagatgaagctagtgaagcaaatgaaaaaggagacatgggctttgatggagaatatgcacatgacactggtgatggtgaaacaatagaaggtggctatgactatgctgattacaacaacgatggctatgctgatggtggtgatgctggagcctacgaggattacgatgggattgattactaatatagtactaaaattctgagaaaacagcccaacaaaataagtcttggtcaaccggaaggggtttatttggacaatgtattatactacctccgtaccaaaatattagctgtttctttaggcgagttttgtagcacaaagaagttccaattaatgatataccgaggcactgcacagtgaagtactccctccgtccc

SEQ ID NO: 68733 - protein, 348 aa, Triticum aestivum
  peptide (1)..(348): Ceres Seq. ID no. 15219686
  misc_feature (175)..(287): Pfam Name: tRNA (Uracil-5-)-methyltransferase Pfam Description: tRNA (Uracil-5-)-methyltransferase
  misc_feature (88)..(240): Homolog of NCBI NO: 23136902 NR Description: hypothetical protein [Cytophaga hutchinsonii]
  misc_feature (88)..(234): Homolog of NCBI NO: 16077741 NR Description: alternate gene name: yerS~similar to RNA
  misc_feature (100)..(303): Homolog of NCBI NO: 29346053 NR Description: RNA methyltransferase [Bacteroides
  misc_feature (93)..(289): Homolog of NCBI NO: 34540828 NR Description: RNA methyltransferase, TrmA family [Porphyromonas
  misc_feature (89)..(234): Homolog of NCBI NO: 15613250 NR Description: RNA methyltransferase [Bacillus halodurans]
  misc_feature (88)..(299): Homolog of NCBI NO: 21672850 NR Description: RNA methyltransferase, TrmA family [Chlorobium
  misc_feature (85)..(286): Homolog of NCBI NO: 19310570 NR Description: unknown protein [Arabidopsis thaliana]
  misc_feature (85)..(286): Homolog of NCBI NO: 15232519 NR Description: expressed protein [Arabidopsis thaliana]
  misc_feature (85)..(286): Homolog of NCBI NO: 9280234 NR Description: RNA methyltransferase-like protein [Arabidopsis
  misc_feature (22)..(287): Homolog of NCBI NO: 34903506 NR Description: putative RNA methyltransferase
VTTILGFSDAPSPPSAVNPHRATAAAQMAAAGGFSPLSGTLLRRRIPLHHHRRFLSIAAAASEAPAPAPTPSQPPPPPRPRGKGYFPKKNEILELTCEGLAFKGKGVCKVDGSSFVLLCDGALPGERLVARVRRLRRGAFAEAAKLKTLSPHHDAVEAPCPLAADCGGCKSQSLAYSAQIHHKYVQVRDLLVNFGKFDPRKLESSDSDAVLKPIVPCDEIFRYRNKMEFSFGTKRWMKREWKEEKEEVSKGEELETDGYSLGLHAPGFFDKVLHVETCLLHSEPADKTKDEASEANEKGDMGFDGEYAHDTGDGETIEGGYDYADYNNDGYADGGDAGAYEDYDGIDY

SEQ ID NO: 68734 - protein, 321 aa, Triticum aestivum
  peptide (1)..(321): Ceres Seq. ID no. 15219687
  misc_feature (148)..(260): Pfam Name: tRNA (Uracil-5-)-methyltransferase Pfam Description: tRNA (Uracil-5-)-methyltransferase
  misc_feature (61)..(213): Homolog of NCBI NO: 23136902 NR Description: hypothetical protein [Cytophaga hutchinsonii]
  misc_feature (61)..(207): Homolog of NCBI NO: 16077741 NR Description: alternate gene name: yerS~similar to RNA
  misc_feature (73)..(276): Homolog of NCBI NO: 29346053 NR Description: RNA methyltransferase [Bacteroides
  misc_feature (66)..(262): Homolog of NCBI NO: 34540828 NR Description: RNA methyltransferase, TrmA family [Porphyromonas
  misc_feature (62)..(207): Homolog of NCBI NO: 15613250 NR Description: RNA methyltransferase [Bacillus halodurans]
  misc_feature (61)..(272): Homolog of NCBI NO: 21672850 NR Description: RNA methyltransferase, TrmA family [Chlorobium
  misc_feature (58)..(259): Homolog of NCBI NO: 15232519 NR Description: expressed protein [Arabidopsis thaliana]
  misc_feature (58)..(259): Homolog of NCBI NO: 19310570 NR Description: unknown protein [Arabidopsis thaliana]
  misc_feature (58)..(259): Homolog of NCBI NO: 9280234 NR Description: RNA methyltransferase-like protein [Arabidopsis
  misc_feature (1)..(260): Homolog of NCBI NO: 34903506 NR Description: putative RNA methyltransferase
MAAAGGFSPLSGTLLRRRIPLHHHRRFLSIAAAASEAPAPAPTPSQPPPPPRPRGKGYFPKKNEILELTCEGLAFKGKGVCKVDGSSFVLLCDGALPGERLVARVRRLRRGAFAEAAKLKTLSPHHDAVEAPCPLAADCGGCKSQSLAYSAQIHHKYVQVRDLLVNFGKFDPRKLESSDSDAVLKPIVPCDEIFRYRNKMEFSFGTKRWMKREWKEEKEEVSKGEELETDGYSLGLHAPGFFDKVLHVETCLLHSEPADKTKDEASEANEKGDMGFDGEYAHDTGDGETIEGGYDYADYNNDGYADGGDAGAYEDYDGIDY

SEQ ID NO: 68735 - DNA, 958 bp, Triticum aestivum
  misc_feature (1)..(958): Ceres Seq. ID no. 12614289
cagcgactagaatatcccggcccgaaacagcaaggtctctctctcgcgctcgcctctctcctcctcgtcttcggcggcggcgacggcggtggcgatgctgtccggcgacgttcccccgaaccagaccgtctacttcaggaacctcaacgagaaggtcaagaaagaagagctgaagagatcactttatgcattgtgctctcagtatggaaggatagtggatgttgtggccttgaaaactcataaactgagggggcaagcctgggtggcattcagtgaaattacagcggctaccaacgctttccggggcctacaggacttcgatttttacggcaaaaaaatgcgggtacaatatgcaaaaacaaagtctgactgttttgcaaaagcagatgggtcttatgctcctaaagagaaaaggaagaagcaagaggagaaagctgctgagaaaaaacggcgaactgaagatgggcaacaacctggtgctagtgctcctgttgccccaagcaatggaactggtcatcaaccttctcgttttgccaagcctccgcaagagccagctgctccgccgaacaacatcctcttcctccagaacatgccggaccagaccacgagcatgatgctccagatcctgttccagcaataccctggtttccgggaggtgcggatgatcgaagccaagccaggcattgcttttgtggagtacgaggatgagaaccagtccatggttgcaatggaagccctccagggtttcaagatcagcccagagaacccaatggccatctcatacgccaaaaagtgaaaacgatccatgtgatctcggaaccggccaaaagaaatctgtaactgtaagattttccaccttaagctttcaagctgctgtgctgtgcttgtgctggctttctaaccctgtatttcttggaagtgacttgcttgttgtttaagaagttaaaaagtatgtgct

SEQ ID NO: 68736 - protein, 233 aa, Triticum aestivum; identical to SEQ ID NO: 52006
  peptide (1)..(233): Ceres Seq. ID no. 12614290
  misc_feature (161)..(228): Pfam Name: RNA recognition motif. (a.k.a. RRM, RBD, or RNP domain) Pfam Description: RNA recognition motif. (a.k.a. RRM, RBD, or RNP
  misc_feature (5)..(233): Homolog of NCBI NO: 15226631 NR Description: small nuclear ribonucleoprotein U1A
  misc_feature (1)..(233): Homolog of NCBI NO: 34897622 NR Description: putative small nuclear ribonucleoprotein U1A
  misc_feature (4)..(233): Homolog of NCBI NO: 2119045 NR Description: small nuclear ribonucleoprotein U1A - potato
  misc_feature (1)..(233): Homolog of NCBI NO: 25294325 NR Description: hypothetical protein [imported] - Arabidopsis
  misc_feature (1)..(233): Homolog of NCBI NO: 19347861 NR Description: putative spliceosomal protein (U2B) [Arabidopsis
  misc_feature (1)..(233): Homolog of NCBI NO: 21593001 NR Description: putative small nuclear ribonucleoprotein U2B
  misc_feature (1)..(233): Homolog of NCBI NO: 30679892 NR Description: small nuclear ribonucleoprotein U2B (spliceosomal
  misc_feature (1)..(233): Homolog of NCBI NO: 30679897 NR Description: small nuclear ribonucleoprotein U2B (spliceosomal
  misc_feature (1)..(233): Homolog of NCBI NO: 15227729 NR Description: small nuclear ribonucleoprotein U2B, putative
  misc_feature (1)..(233): Homolog of NCBI NO: 421960 NR Description: small nuclear ribonucleoprotein U2B'' - potato

SEQ ID NO: 68737 - protein, 152 aa, Triticum aestivum; identical to SEQ ID NO: 52007
  peptide (1)..(152): Ceres Seq. ID no. 12614291
  misc_feature (80)..(147): Pfam Name: RNA recognition motif. (a.k.a. RRM, RBD, or RNP domain) Pfam Description: RNA recognition motif. (a.k.a. RRM, RBD, or RNP
  misc_feature (1)..(152): Homolog of NCBI NO: 15226631 NR Description: small nuclear ribonucleoprotein U1A
  misc_feature (1)..(152): Homolog of NCBI NO: 34897622 NR Description: putative small nuclear ribonucleoprotein U1A
  misc_feature (1)..(152): Homolog of NCBI NO: 2119045 NR Description: small nuclear ribonucleoprotein U1A - potato
  misc_feature (1)..(152): Homolog of NCBI NO: 25294325 NR Description: hypothetical protein [imported] - Arabidopsis
  misc_feature (1)..(152): Homolog of NCBI NO: 19347861 NR Description: putative spliceosomal protein (U2B) [Arabidopsis
  misc_feature (1)..(152): Homolog of NCBI NO: 21593001 NR Description: putative small nuclear ribonucleoprotein U2B
  misc_feature (1)..(152): Homolog of NCBI NO: 30679892 NR Description: small nuclear ribonucleoprotein U2B (spliceosomal
  misc_feature (1)..(152): Homolog of NCBI NO: 30679897 NR Description: small nuclear ribonucleoprotein U2B (spliceosomal
  misc_feature (1)..(152): Homolog of NCBI NO: 15227729 NR Description: small nuclear ribonucleoprotein U2B, putative
  misc_feature (1)..(152): Homolog of NCBI NO: 421960 NR Description: small nuclear ribonucleoprotein U2B'' - potato

SEQ ID NO: 68738 - DNA, 984 bp, Triticum aestivum
  misc_feature (1)..(984): Ceres Seq. ID no. 13596420
acaccaaccaccacctcctccgaggcacgaagtccaccacgcccccgcccgccccgcagccggccggcgacgatgtgcaccctggagcggcgcggccgggtcttcgtcctcaccctgacgggcgaggaccagcaccggctgggccacccgctcatcgccgccatccgctccgcgctggccgaggtcctggccgcggcccaggcccagccgcagggcccgggggcggccctggtgacggtcgccgagggccgcttcttctccaacgggctcgacatcgggtgggcgggcacctcccgcgcgcggctcggggagctcgtcgacgcgctccgccccgtcgccgccgacctgctggccctccccatgcccaccgtcgccgccgtcacgggccacgcctccgccgccggcttcctcctcgcgctctgccacgactaccgcgtcatgcgcgccgaccgcggcgtgctctacatgagcgaggtcgacatcggcctccccctcccgccctacttcgtgcacgtgctccgcgccaagatctcccaggcgcaggccctgcgggacgtggtgctgcgcgggaagaagctccgggcgcccgaggccagggagatgggcgtcgtcgacgtcgtctgccccggcgcccccgagaccgccgccgaggccctcaagctcgccgagcagctcgccgccaggaagtgggacggcgccgtgtacgcgtcgattaggatgtccatgttccccgatgcgtgcagggccgtcgggatcgccgtggagagcgacgaggagaagagcaggcacttcgcctccaggctctgatcaggacacagattggagagtgtctatgtaacctgaaatctctcttggtattctgcacctgtacattgatcagccatcggtgctctgtatgaagcaagcagtacatacttctgcagacgttgtatctccttgctttgggagcatgaaataaacacaacgcttgtgtacgactgttgg

SEQ ID NO: 68739 - protein, 268 aa, Triticum aestivum
  peptide (1)..(268): Ceres Seq. ID no. 13596421
  misc_feature (36)..(205): Pfam Name: Enoyl-CoA hydratase/isomerase family Pfam Description: Enoyl-CoA hydratase/isomerase family
  misc_feature (46)..(226): Homolog of NCBI NO: 23017529 NR Description: hypothetical protein [Thermobifida fusca]
  misc_feature (27)..(248): Homolog of NCBI NO: 40739395 NR Description: hypothetical protein AN6767.2 [Aspergillus
  misc_feature (46)..(215): Homolog of NCBI NO: 21230604 NR Description: conserved hypothetical protein
  misc_feature (33)..(250): Homolog of NCBI NO: 15828352 NR Description: possible enoyl-CoA hydratase [Mycobacterium
  misc_feature (12)..(250): Homolog of NCBI NO: 23017142 NR Description: hypothetical protein [Thermobifida fusca]
  misc_feature (25)..(268): Homolog of NCBI NO: 15218713 NR Description: enoyl-CoA hydratase/isomerase family [Arabidopsis
  misc_feature (23)..(245): Homolog of NCBI NO: 34903766 NR Description: unnamed protein product [Oryza sativa (japonica
  misc_feature (25)..(256): Homolog of NCBI NO: 15236499 NR Description: enoyl-CoA hydratase/isomerase family [Arabidopsis
  misc_feature (25)..(252): Homolog of NCBI NO: 15236498 NR Description: enoyl-CoA hydratase/isomerase family [Arabidopsis
  misc_feature (25)..(252): Homolog of NCBI NO: 21555734 NR Description: carnitine racemase like protein [Arabidopsis
TPTTTSSEARSPPRPRPPRSRPATMCTLERRGRVFVLTLTGEDQHRLGHPLIAAIRSALAEVLAAAQAQPQGPGAALVTVAEGRFFSNGLDIGWAGTSRARLGELVDALRPVAADLLALPMPTVAAVTGHASAAGFLLALCHDYRVMRADRGVLYMSEVDIGLPLPPYFVHVLRAKISQAQALRDVVLRGKKLRAPEAREMGVVDVVCPGAPETAAEALKLAEQLAARKWDGAVYASIRMSMFPDACRAVGIAVESDEEKSRHFASRL

SEQ ID NO: 68740 - protein, 244 aa, Triticum aestivum
  peptide (1)..(244): Ceres Seq. ID no. 13596422
  misc_feature (12)..(181): Pfam Name: Enoyl-CoA hydratase/isomerase family Pfam Description: Enoyl-CoA hydratase/isomerase family
  misc_feature (22)..(202): Homolog of NCBI NO: 23017529 NR Description: hypothetical protein [Thermobifida fusca]
  misc_feature (3)..(224): Homolog of NCBI NO: 40739395 NR Description: hypothetical protein AN6767.2 [Aspergillus
  misc_feature (22)..(191): Homolog of NCBI NO: 21230604 NR Description: conserved hypothetical protein
  misc_feature (9)..(226): Homolog of NCBI NO: 15828352 NR Description: possible enoyl-CoA hydratase [Mycobacterium
  misc_feature (1)..(226): Homolog of NCBI NO: 23017142 NR Description: hypothetical protein [Thermobifida fusca]
  misc_feature (1)..(244): Homolog of NCBI NO: 15218713 NR Description: enoyl-CoA hydratase/isomerase family [Arabidopsis
  misc_feature (1)..(221): Homolog of NCBI NO: 34903766 NR Description: unnamed protein product [Oryza sativa (japonica
  misc_feature (1)..(232): Homolog of NCBI NO: 15236499 NR Description: enoyl-CoA hydratase/isomerase family [Arabidopsis
  misc_feature (1)..(228): Homolog of NCBI NO: 15236498 NR Description: enoyl-CoA hydratase/isomerase family [Arabidopsis
  misc_feature (1)..(228): Homolog of NCBI NO: 21555734 NR Description: carnitine racemase like protein [Arabidopsis
MCTLERRGRVFVLTLTGEDQHRLGHPLIAAIRSALAEVLAAAQAQPQGPGAALVTVAEGRFFSNGLDIGWAGTSRARLGELVDALRPVAADLLALPMPTVAAVTGHASAAGFLLALCHDYRVMRADRGVLYMSEVDIGLPLPPYFVHVLRAKISQAQALRDVVLRGKKLRAPEAREMGVVDVVCPGAPETAAEALKLAEQLAARKWDGAVYASIRMSMFPDACRAVGIAVESDEEKSRHFASRL

SEQ ID NO: 68741 - protein, 237 aa, Triticum aestivum
  peptide (1)..(237): Ceres Seq. ID no. 13596423
  misc_feature (24)..(232): Pfam Name: HlyD family secretion protein Pfam Description: HlyD family secretion protein
  misc_feature (15)..(173): Homolog of NCBI NO: 25989119 NR Description: unknown [Streptomyces aureofaciens]
  misc_feature (62)..(235): Homolog of NCBI NO: 23104656 NR Description: hypothetical protein [Azotobacter vinelandii]
  misc_feature (7)..(237): Homolog of NCBI NO: 25143299 NR Description: pre-mRNA splicing SR protein related RSR-1 (68.2
  misc_feature (8)..(232): Homolog of NCBI NO: 23018055 NR Description: hypothetical protein [Thermobifida fusca]
  misc_feature (14)..(231): Homolog of NCBI NO: 23105938 NR Description: hypothetical protein [Azotobacter vinelandii]
  misc_feature (16)..(229): Homolog of NCBI NO: 23104656 NR Description: hypothetical protein [Azotobacter vinelandii]
  misc_feature (90)..(237): Homolog of NCBI NO: 18958209 NR Description: subtilisin-like protease PR1G
  misc_feature (6)..(231): Homolog of NCBI NO: 29247944 NR Description: GLP_26_54603_52153 [Giardia lamblia ATCC 50803]
  misc_feature (27)..(233): Homolog of NCBI NO: 23018055 NR Description: hypothetical protein [Thermobifida fusca]
  misc_feature (7)..(237): Homolog of NCBI NO: 29247944 NR Description: GLP_26_54603_52153 [Giardia lamblia ATCC 50803]
TNHHLLRGTKSTTPPPAPQPAGDDVHPGAARPGLRPHPDGRGPAPAGPPAHRRHPLRAGRGPGRGPGPAAGPGGGPGDGRRGPLLLQRARHRVGGHLPRAARGARRRAPPRRRRPAGPPHAHRRRRHGPRLRRRLPPRALPRLPRHARRPRRALHERGRHRPPPPALLRARAPRQDLPGAGPAGRGAAREEAPGARGQGDGRRRRRLPRRPRDRRRGPQARRAARRQEVGRRRVRVD

SEQ ID NO: 68742 - DNA, 1421 bp, Triticum aestivum
  misc_feature (1)..(1421): Ceres Seq. ID no. 13598353
aaaaaaaaaaaaagtatttttcccgtcgttacttcacttccggtgttccctcccctgctggcggctgccggggagcgcagccgcaccagccagccatgaagcgcttcttccagcccgtactcaaggacggatcccccgccaagaagaggcccgccggagccgcgatctctgactgcgttgatggccgcgcccccaccgcggccgacgccggcggggacggccctcccggcgaggagccacgcaggttcatcacgtggaacgccaacagccttctgctccggatgaagagcgactggcccgcgttctgtcagttcgtcgcccgcctcgaccccgacgtcatctgcgtccaggaagtgcggatgccagcagctggttccaaaggggcacctaaaaatcctagtgagctaaaagacgacacaacgtcgtcacgcgaagaaaaacagacagtgctgcgtgctttgtcgagctcacctttcaaagactaccgtgtgtggtggtccctttcagattcaaaatatgcaggcacagctgtgtttatgaagaagaagtttgaaccaaagaaagtgtcattcaacttggatagaacatctactaagcatgatgcagacggtcgtgtcatcattgtggaatttgaatcattcttgttgctaaacacatatgctccaaacaacgggtggaaagaggaggaaaattcatttcaaagaagaagaaagtgggataaaagaatgtcggagtttgttcaacaagtagacaagcccttaatctggtgcggagacctgaacgttagtcatgacgaaatcgatgtcagccatcctgatttttttagcgatgctaagctcaatggatatatccctccaaataaagaggactgtggacagccaggattcacccttgcagagagacagcgctttggcaatatattgtcccagggaaagctggtagatgcttacagatacctgcacaaagaaaaagacatggagtgtggcttctcttggtctgggaatccagttgggaagtaccgaggaaagagaatgcggattgactattttgttatttcagaagggttgaaagacagaattgtttcatgtgaaatgcatggtcatggaattgaactggaaggattttatggaagtgatcactgtcctgtttcacttgtgctctccaaagaagcagcggaagcaccagaatcgaagagctccagctaacttctgtgtttttctcgaaccggacaccatggattattagattattattaggtcagttgaagcgcttggcctatcatgagctatttaaacattttttatgacctgtaggccactactgcggcgcaccctctagtccggatctggattggaattagagttcaactcttactgtgatcagctattggtatctaagttcagatttctaagagttgttcc

SEQ ID NO: 68743 - protein, 400 aa, Triticum aestivum
  peptide (1)..(400): Ceres Seq. ID no. 13598354
  misc_feature (147)..(386): Pfam Name: Endonuclease/Exonuclease/phosphatase family Pfam Description: Endonuclease/Exonuclease/phosphatase family
  misc_feature (130)..(389): Homolog of NCBI NO: 23957727 NR Description: AP endonuclease (DNA-(apurinic or apyrimidinic
  misc_feature (77)..(163): Homolog of NCBI NO: 23490314 NR Description: putative AP endonuclease-related [Plasmodium
  misc_feature (149)..(384): Homolog of NCBI NO: 23490314 NR Description: putative AP endonuclease-related [Plasmodium
  misc_feature (336)..(393): Homolog of NCBI NO: 14578320 NR Description: PV1H14200_P [Plasmodium vivax]
  misc_feature (49)..(319): Homolog of NCBI NO: 14578320 NR Description: PV1H14200_P [Plasmodium vivax]
  misc_feature (32)..(147): Homolog of NCBI NO: 18408629 NR Description: endonuclease/exonuclease/phosphatase family
  misc_feature (136)..(400): Homolog of NCBI NO: 18408629 NR Description: endonuclease/exonuclease/phosphatase family
  misc_feature (31)..(400): Homolog of NCBI NO: 7487536 NR Description: hypothetical protein T29H11.60 - Arabidopsis
  misc_feature (32)..(118): Homolog of NCBI NO: 18481705 NR Description: putative T29H11.60 protein [Sorghum bicolor]
  misc_feature (147)..(395): Homolog of NCBI NO: 18481705 NR Description: putative T29H11.60 protein [Sorghum bicolor]
KKKKYFSRRYFTSGVPSPAGGCRGAQPHQPAMKRFFQPVLKDGSPAKKRPAGAAISDCVDGRAPTAADAGGDGPPGEEPRRFITWNANSLLLRMKSDWPAFCQFVARLDPDVICVQEVRMPAAGSKGAPKNPSELKDDTTSSREEKQTVLRALSSSPFKDYRVWWSLSDSKYAGTAVFMKKKFEPKKVSFNLDRTSTKHDADGRVIIVEFESFLLLNTYAPNNGWKEEENSFQRRRKWDKRMSEFVQQVDKPLIWCGDLNVSHDEIDVSHPDFFSDAKLNGYIPPNKEDCGQPGFTLAERQRFGNILSQGKLVDAYRYLHKEKDMECGFSWSGNPVGKYRGKRMRIDYFVISEGLKDRIVSCEMHGHGIELEGFYGSDHCPVSLVLSKEAAEAPESKSSS

SEQ ID NO: 68744 - protein, 369 aa, Triticum aestivum
  peptide (1)..(369): Ceres Seq. ID no. 13598355
  misc_feature (116)..(355): Pfam Name: Endonuclease/Exonuclease/phosphatase family Pfam Description: Endonuclease/Exonuclease/phosphatase family
  misc_feature (99)..(358): Homolog of NCBI NO: 23957727 NR Description: AP endonuclease (DNA-(apurinic or apyrimidinic
  misc_feature (46)..(132): Homolog of NCBI NO: 23490314 NR Description: putative AP endonuclease-related [Plasmodium
  misc_feature (118)..(353): Homolog of NCBI NO: 23490314 NR Description: putative AP endonuclease-related [Plasmodium
  misc_feature (305)..(362): Homolog of NCBI NO: 14578320 NR Description: PV1H14200_P [Plasmodium vivax]
  misc_feature (18)..(288): Homolog of NCBI NO: 14578320 NR Description: PV1H14200_P [Plasmodium vivax]
  misc_feature (1)..(116): Homolog of NCBI NO: 18408629 NR Description: endonuclease/exonuclease/phosphatase family
  misc_feature (105)..(369): Homolog of NCBI NO: 18408629 NR Description: endonuclease/exonuclease/phosphatase family
  misc_feature (1)..(369): Homolog of NCBI NO: 7487536 NR Description: hypothetical protein T29H11.60 - Arabidopsis
  misc_feature (1)..(87): Homolog of NCBI NO: 18481705 NR Description: putative T29H11.60 protein [Sorghum bicolor]
  misc_feature (116)..(364): Homolog of NCBI NO: 18481705 NR Description: putative T29H11.60 protein [Sorghum bicolor]
MKRFFQPVLKDGSPAKKRPAGAAISDCVDGRAPTAADAGGDGPPGEEPRRFITWNANSLLLRMKSDWPAFCQFVARLDPDVICVQEVRMPAAGSKGAPKNPSELKDDTTSSREEKQTVLRALSSSPFKDYRVWWSLSDSKYAGTAVFMKKKFEPKKVSFNLDRTSTKHDADGRVIIVEFESFLLLNTYAPNNGWKEEENSFQRRRKWDKRMSEFVQQVDKPLIWCGDLNVSHDEIDVSHPDFFSDAKLNGYIPPNKEDCGQPGFTLAERQRFGNILSQGKLVDAYRYLHKEKDMECGFSWSGNPVGKYRGKRMRIDYFVISEGLKDRIVSCEMHGHGIELEGFYGSDHCPVSLVLSKEAAEAPESKSSS

SEQ ID NO: 68745 - protein, 307 aa, Triticum aestivum
  peptide (1)..(307): Ceres Seq. ID no. 13598356
  misc_feature (54)..(293): Pfam Name: Endonuclease/Exonuclease/phosphatase family Pfam Description: Endonuclease/Exonuclease/phosphatase family
  misc_feature (37)..(296): Homolog of NCBI NO: 23957727 NR Description: AP endonuclease (DNA-(apurinic or apyrimidinic
  misc_feature (1)..(70): Homolog of NCBI NO: 23490314 NR Description: putative AP endonuclease-related [Plasmodium
  misc_feature (56)..(291): Homolog of NCBI NO: 23490314 NR Description: putative AP endonuclease-related [Plasmodium
  misc_feature (243)..(300): Homolog of NCBI NO: 14578320 NR Description: PV1H14200_P [Plasmodium vivax]
  misc_feature (1)..(226): Homolog of NCBI NO: 14578320 NR Description: PV1H14200_P [Plasmodium vivax]
  misc_feature (1)..(54): Homolog of NCBI NO: 18408629 NR Description: endonuclease/exonuclease/phosphatase family
  misc_feature (43)..(307): Homolog of NCBI NO: 18408629 NR Description: endonuclease/exonuclease/phosphatase family
  misc_feature (1)..(307): Homolog of NCBI NO: 7487536 NR Description: hypothetical protein T29H11.60 - Arabidopsis
  misc_feature (1)..(25): Homolog of NCBI NO: 18481705 NR Description: putative T29H11.60 protein [Sorghum bicolor]
  misc_feature (54)..(302): Homolog of NCBI NO: 18481705 NR Description: putative T29H11.60 protein [Sorghum bicolor]
MKSDWPAFCQFVARLDPDVICVQEVRMPAAGSKGAPKNPSELKDDTTSSREEKQTVLRALSSSPFKDYRVWWSLSDSKYAGTAVFMKKKFEPKKVSFNLDRTSTKHDADGRVIIVEFESFLLLNTYAPNNGWKEEENSFQRRRKWDKRMSEFVQQVDKPLIWCGDLNVSHDEIDVSHPDFFSDAKLNGYIPPNKEDCGQPGFTLAERQRFGNILSQGKLVDAYRYLHKEKDMECGFSWSGNPVGKYRGKRMRIDYFVISEGLKDRIVSCEMHGHGIELEGFYGSDHCPVSLVLSKEAAEAPESKSSS

SEQ ID NO: 68746 - DNA, 1728 bp, Triticum aestivum
  misc_feature (1)..(1728): Ceres Seq. ID no. 13662416
agcgttctactcctctcttttgtttcccctcgacggcggcggcggcggcggcaaccagggtttagaggaggagaagcttgctcggcgcaaaaccctagccccgcaccttcatctacggattcatcgcgcctctgcagcgcatccttgccgagtgccccgcctcgctgcatcggcggtcgcgatgagggtgaaggtgatatcgcgctcgaccgacgacttcacgcgcgagcgcagccaggacctgcagaaagtattccgcaattatgatccagcactccgtagtcaagagaaagctgttgagtacactcgagcccttaatgctgcaaagttagagaagatatttgccaggccatttattggagcaatggatggtcacattgatgctgtttcgtgcatggcgaagaactccaattatgtgaaagctatgttttctggctcgatggatggggatattcgactatgggacattgctgcaaggaagacagtctgccagttccctggacaccagggtgctgtgagaggtttggcaacatctaccgacggcgatcttctgatatcctgtggtgttgattgcactgttcgactctggaaagatcctatgcgtaagatgatggacactaatgatgctattggagatgcttcccagccgtcagcagtctatacatggaagcatgcattttggggtgttgaccaccagtgggatcgtaatgttttcgcaactgtaggtgctcaggtagatatatgggaccataacaggtcggagccaataaataccttcgaatggggtaaagatacagttctttctgtgcggtttaatcctggagaacctgatgttttacttacatcatctagtgatcggagtttaacactttttgacctgcgcatgtcatccccagctagaaagttaatcatgaagacaaggtgcaattcagtttgctggaaccctagggagcccatgaacttcactgctgcaaacgaagatacaaactgttattcttttgatgctagaaagctgaatgaagccaaggttgttcacaagggtcatgtttcagcagtgatggatgttgattacaacccaacaggacgggaatttgttactggttcctacgatagaacggtacggatcttcaattataacggtgatcatagcagggagatataccatactaagaggatgcaaagggtgttttgtgtgaaatacacatatgatgggacctatctagtttctggcagtgatgacacaaatcttcgtctgtggaagtccaaagcttcagaacaattgggagttattcttccaagggaacgcaaaaagcaagaatatcttgatgctgtcaaggcgcggtataatcaccttccagaaatcaggcggattgacaaacataagcacttgcccaagccgatctacaaggcaggcaagataaggcgcgccatgattgaagcagaaagccggaaagaagaaagaaggcgagcgcacagtgctccagggagcaggactatgcagcccttcagaaagagaaggctcatcacagaagttgagtagggtgggatctgaccatcgcgaggccaaacaaagtggcattacgttggagtattatttttggtcgagtgtgagtgatgggaagctgggaacatatttattatgtgtagtgtcatgttgttacttgcaaaccttggacaacgtaccggattacttttgagaaggaaataaagaggacttgttgtatgggc

SEQ ID NO: 68747 - protein, 512 aa, Triticum aestivum
  peptide (1)..(512): Ceres Seq. ID no. 13662417
  misc_feature (61)..(512): Homolog of NCBI NO: 39595100 NR Description: Hypothetical protein CBG03683 [Caenorhabditis
  misc_feature (62)..(510): Homolog of NCBI NO: 40740135 NR Description: hypothetical protein AN4226.2 [Aspergillus
  misc_feature (61)..(512): Homolog of NCBI NO: 27769416 NR Description: Similar to DKFZP564O0463 protein [Xenopus laevis]
  misc_feature (61)..(512): Homolog of NCBI NO: 19913460 NR Description: DKFZP564O0463 protein [Homo sapiens]
  misc_feature (61)..(512): Homolog of NCBI NO: 38348458 NR Description: Unknown (protein for MGC:65348) [Mus musculus]
  misc_feature (55)..(512): Homolog of NCBI NO: 22760354 NR Description: unnamed protein product [Homo sapiens]
  misc_feature (84)..(512): Homolog of NCBI NO: 30687972 NR Description: transducin / WD-40 repeat protein family
  misc_feature (61)..(512): Homolog of NCBI NO: 17065094 NR Description: SOF1 protein-like protein [Arabidopsis thaliana]
  misc_feature (61)..(512): Homolog of NCBI NO: 13937179 NR Description: AT4g28450/F20O9_130 [Arabidopsis thaliana]
  misc_feature (61)..(512): Homolog of NCBI NO: 34904476 NR Description: putative DKFZP564O0463 protein
AFYSSLLFPLDGGGGGGNQGLEEEKLARRKTLAPHLHLRIHRASAAHPCRVPRLAASAVAMRVKVISRSTDDFTRERSQDLQKVFRNYDPALRSQEKAVEYTRALNAAKLEKIFARPFIGAMDGHIDAVSCMAKNSNYVKAMFSGSMDGDIRLWDIAARKTVCQFPGHQGAVRGLATSTDGDLLISCGVDCTVRLWKDPMRKMMDTNDAIGDASQPSAVYTWKHAFWGVDHQWDRNVFATVGAQVDIWDHNRSEPINTFEWGKDTVLSVRFNPGEPDVLLTSSSDRSLTLFDLRMSSPARKLIMKTRCNSVCWNPREPMNFTAANEDTNCYSFDARKLNEAKVVHKGHVSAVMDVDYNPTGREFVTGSYDRTVRIFNYNGDHSREIYHTKRMQRVFCVKYTYDGTYLVSGSDDTNLRLWKSKASEQLGVILPRERKKQEYLDAVKARYNHLPEIRRIDKHKHLPKPIYKAGKIRRAMIEAESRKEERRRAHSAPGSRTMQPFRKRRLITEVE

SEQ ID NO: 68748 - protein, 452 aa, Triticum aestivum
  peptide (1)..(452): Ceres Seq. ID no. 13662418
  misc_feature (1)..(452): Homolog of NCBI NO: 39595100 NR Description: Hypothetical protein CBG03683 [Caenorhabditis
  misc_feature (2)..(450): Homolog of NCBI NO: 40740135 NR Description: hypothetical protein AN4226.2 [Aspergillus
  misc_feature (1)..(452): Homolog of NCBI NO: 27769416 NR Description: Similar to DKFZP564O0463 protein [Xenopus laevis]
  misc_feature (1)..(452): Homolog of NCBI NO: 19913460 NR Description: DKFZP564O0463 protein [Homo sapiens]
  misc_feature (1)..(452): Homolog of NCBI NO: 38348458 NR Description: Unknown (protein for MGC:65348) [Mus musculus]
  misc_feature (1)..(452): Homolog of NCBI NO: 22760354 NR Description: unnamed protein product [Homo sapiens]
  misc_feature (24)..(452): Homolog of NCBI NO: 30687972 NR Description: transducin / WD-40 repeat protein family
  misc_feature (1)..(452): Homolog of NCBI NO: 17065094 NR Description: SOF1 protein-like protein [Arabidopsis thaliana]
  misc_feature (1)..(452): Homolog of NCBI NO: 13937179 NR Description: AT4g28450/F20O9_130 [Arabidopsis thaliana]
  misc_feature (1)..(452): Homolog of NCBI NO: 34904476 NR Description: putative DKFZP564O0463 protein
MRVKVISRSTDDFTRERSQDLQKVFRNYDPALRSQEKAVEYTRALNAAKLEKIFARPFIGAMDGHIDAVSCMAKNSNYVKAMFSGSMDGDIRLWDIAARKTVCQFPGHQGAVRGLATSTDGDLLISCGVDCTVRLWKDPMRKMMDTNDAIGDASQPSAVYTWKHAFWGVDHQWDRNVFATVGAQVDIWDHNRSEPINTFEWGKDTVLSVRFNPGEPDVLLTSSSDRSLTLFDLRMSSPARKLIMKTRCNSVCWNPREPMNFTAANEDTNCYSFDARKLNEAKVVHKGHVSAVMDVDYNPTGREFVTGSYDRTVRIFNYNGDHSREIYHTKRMQRVFCVKYTYDGTYLVSGSDDTNLRLWKSKASEQLGVILPRERKKQEYLDAVKARYNHLPEIRRIDKHKHLPKPIYKAGKIRRAMIEAESRKEERRRAHSAPGSRTMQPFRKRRLITEVE

SEQ ID NO: 68749 - protein, 391 aa, Triticum aestivum
  peptide (1)..(391): Ceres Seq. ID no. 13662419
  misc_feature (1)..(391): Homolog of NCBI NO: 39595100 NR Description: Hypothetical protein CBG03683 [Caenorhabditis
  misc_feature (1)..(389): Homolog of NCBI NO: 40740135 NR Description: hypothetical protein AN4226.2 [Aspergillus
  misc_feature (1)..(391): Homolog of NCBI NO: 27769416 NR Description: Similar to DKFZP564O0463 protein [Xenopus laevis]
  misc_feature (1)..(391): Homolog of NCBI NO: 19913460 NR Description: DKFZP564O0463 protein [Homo sapiens]
  misc_feature (1)..(391): Homolog of NCBI NO: 38348458 NR Description: Unknown (protein for MGC:65348) [Mus musculus]
  misc_feature (1)..(391): Homolog of NCBI NO: 22760354 NR Description: unnamed protein product [Homo sapiens]
  misc_feature (1)..(391): Homolog of NCBI NO: 30687972 NR Description: transducin / WD-40 repeat protein family
  misc_feature (1)..(391): Homolog of NCBI NO: 17065094 NR Description: SOF1 protein-like protein [Arabidopsis thaliana]
  misc_feature (1)..(391): Homolog of NCBI NO: 13937179 NR Description: AT4g28450/F20O9_130 [Arabidopsis thaliana]
  misc_feature (1)..(391): Homolog of NCBI NO: 34904476 NR Description: putative DKFZP564O0463 protein
MDGHIDAVSCMAKNSNYVKAMFSGSMDGDIRLWDIAARKTVCQFPGHQGAVRGLATSTDGDLLISCGVDCTVRLWKDPMRKMMDTNDAIGDASQPSAVYTWKHAFWGVDHQWDRNVFATVGAQVDIWDHNRSEPINTFEWGKDTVLSVRFNPGEPDVLLTSSSDRSLTLFDLRMSSPARKLIMKTRCNSVCWNPREPMNFTAANEDTNCYSFDARKLNEAKVVHKGHVSAVMDVDYNPTGREFVTGSYDRTVRIFNYNGDHSREIYHTKRMQRVFCVKYTYDGTYLVSGSDDTNLRLWKSKASEQLGVILPRERKKQEYLDAVKARYNHLPEIRRIDKHKHLPKPIYKAGKIRRAMIEAESRKEERRRAHSAPGSRTMQPFRKRRLITEVE

SEQ ID NO: 68750 - DNA, 1370 bp, Triticum aestivum
  misc_feature (1)..(1370): Ceres Seq. ID no. 13596227
atcaccagtaaagcagcaagtaattccactctcgccgccgcagccagccagcctccggcgctctctcggacgctcccgcatacgtacaagcaaaagcaaccagagccagccatgtgccccggggcgccggtcgcggcggcggcgtcggacaagagcgtgtgcgtgatggacgcgtccggcccgctgggccacgcgctcgtgcaccgcctcctccgccggggctacaccgtccacgccgccacctacggccactcgctcgacgcgctcgcgctgctcgccgccgccggccacgacgaggaccggctcaagctcttccgcgccgaccccttcgactaccacaccatcgccgacgccgtccgcggctgctccggcctcttctgcatgttcaacacccacgaggaccaggcgggctgcgacgaggttatggtggaggtggaggtccgggcggcgcagaacgtgctggaggcgtgcgcgcagacggtgaccatggagagggtggtcttcacctcctccgtcaccgccgtcgtctggaaggacgaccacaagctggtcgacgcctttgacgagaggaactggagcgacctcaacctctgcaggaaacgcaagttgtggcacgctctggcaaagacgctgtcggagaagacggcctgggccttggccatggacagaggggtggacatggtggccatcaacgccggcctgctcaccgggccggggctctcctccgcccacccctgcctcaagggggtcccggagatgtacgagcacggcgtcctcgtcaccgtcgacgccgacttcctcgccgacgcccacgtggctgcctacgagtgccccacggcgttcggccgctacctctgcttcaacaatgtcgtgtgcaggcctgaggacgccctccagttcgctcagatgctcaccccgtccgctccatgctacccgccaagtgacgagctgaaggtgatcccgcagaggattcagaacaagaagctgaacaacctgatggtggagtttgccagtgccatatacggggacttggattagggattccattattcattcgtttacctcacaagggcagctagggttgtattctttatgtacctaaatatctgtattctttttcctcctgaaaagggaaatatggttggtcagatgtacaaatctgtacgaggccaagcatgccgcatgtattccactcttaccaggctggtaagagcatttgagccagtgcttagcaaggtagtaatccttaggtccaccaaaagggaaaataagtctgcagttatgttactgccttgtacagcagcaatatatgaatatatgatggtgaacaaatgttgaaaaaaaaaaaaaaaaaagcttatcgataccgt

SEQ ID NO: 68751 - protein, 345 aa, Triticum aestivum
  peptide (1)..(345): Ceres Seq. ID no. 15221812
  misc_feature (47)..(304): Homolog of NCBI NO: 34911590 NR Description: putative cinnamoyl CoA reductase
  misc_feature (41)..(336): Homolog of NCBI NO: 3242328 NR Description: cinnamoyl-CoA reductase [Zea mays]
  misc_feature (51)..(339): Homolog of NCBI NO: 17978649 NR Description: cinnamoyl-CoA reductase [Pinus taeda]
  misc_feature (41)..(336): Homolog of NCBI NO: 3341511 NR Description: cinnamoyl-CoA reductase [Saccharum officinarum]
  misc_feature (50)..(339): Homolog of NCBI NO: 21553548 NR Description: cinnamoyl-CoA reductase-like protein [Arabidopsis
  misc_feature (50)..(339): Homolog of NCBI NO: 15234751 NR Description: cinnamoyl-CoA reductase-related [Arabidopsis
  misc_feature (54)..(333): Homolog of NCBI NO: 21553382 NR Description: putative cinnamoyl CoA reductase [Arabidopsis
  misc_feature (54)..(333): Homolog of NCBI NO: 18400407 NR Description: cinnamoyl-CoA reductase-related [Arabidopsis
  misc_feature (54)..(333): Homolog of NCBI NO: 25412171 NR Description: probable cinnamoyl CoA reductase [imported] -
  misc_feature (51)..(345): Homolog of NCBI NO: 37537132 NR Description: putative cinnamoyl-CoA reductase
ITSKAASNSTLAAAASQPPALSRTLPHTYKQKQPEPAMCPGAPVAAAASDKSVCVMDASGPLGHALVHRLLRRGYTVHAATYGHSLDALALLAAAGHDEDRLKLFRADPFDYHTIADAVRGCSGLFCMFNTHEDQAGCDEVMVEVEVRAAQNVLEACAQTVTMERVVFTSSVTAVVWKDDHKLVDAFDERNWSDLNLCRKRKLWHALAKTLSEKTAWALAMDRGVDMVAINAGLLTGPGLSSAHPCLKGVPEMYEHGVLVTVDADFLADAHVAAYECPTAFGRYLCFNNVVCRPEDALQFAQMLTPSAPCYPPSDELKVIPQRIQNKKLNNLMVEFASAIYGDLD

SEQ ID NO: 68752 - protein, 308 aa, Triticum aestivum
  peptide (1)..(308): Ceres Seq. ID no. 15221813
  misc_feature (10)..(267): Homolog of NCBI NO: 34911590 NR Description: putative cinnamoyl CoA reductase
  misc_feature (4)..(299): Homolog of NCBI NO: 3242328 NR Description: cinnamoyl-CoA reductase [Zea mays]
  misc_feature (14)..(302): Homolog of NCBI NO: 17978649 NR Description: cinnamoyl-CoA reductase [Pinus taeda]
  misc_feature (4)..(299): Homolog of NCBI NO: 3341511 NR Description: cinnamoyl-CoA reductase [Saccharum officinarum]
  misc_feature (13)..(302): Homolog of NCBI NO: 21553548 NR Description: cinnamoyl-CoA reductase-like protein [Arabidopsis
  misc_feature (13)..(302): Homolog of NCBI NO: 15234751 NR Description: cinnamoyl-CoA reductase-related [Arabidopsis
  misc_feature (17)..(296): Homolog of NCBI NO: 21553382 NR Description: putative cinnamoyl CoA reductase [Arabidopsis
  misc_feature (17)..(296): Homolog of NCBI NO: 18400407 NR Description: cinnamoyl-CoA reductase-related [Arabidopsis
  misc_feature (17)..(296): Homolog of NCBI NO: 25412171 NR Description: probable cinnamoyl CoA reductase [imported] -
  misc_feature (14)..(308): Homolog of NCBI NO: 37537132 NR Description: putative cinnamoyl-CoA reductase
MCPGAPVAAAASDKSVCVMDASGPLGHALVHRLLRRGYTVHAATYGHSLDALALLAAAGHDEDRLKLFRADPFDYHTIADAVRGCSGLFCMFNTHEDQAGCDEVMVEVEVRAAQNVLEACAQTVTMERVVFTSSVTAVVWKDDHKLVDAFDERNWSDLNLCRKRKLWHALAKTLSEKTAWALAMDRGVDMVAINAGLLTGPGLSSAHPCLKGVPEMYEHGVLVTVDADFLADAHVAAYECPTAFGRYLCFNNVVCRPEDALQFAQMLTPSAPCYPPSDELKVIPQRIQNKKLNNLMVEFASAIYGDLD

SEQ ID NO: 68753 - protein, 290 aa, Triticum aestivum
  peptide (1)..(290): Ceres Seq. ID no. 15221814
  misc_feature (1)..(249): Homolog of NCBI NO: 34911590 NR Description: putative cinnamoyl CoA reductase
  misc_feature (1)..(281): Homolog of NCBI NO: 3242328 NR Description: cinnamoyl-CoA reductase [Zea mays]
  misc_feature (1)..(284): Homolog of NCBI NO: 17978649 NR Description: cinnamoyl-CoA reductase [Pinus taeda]
  misc_feature (1)..(281): Homolog of NCBI NO: 3341511 NR Description: cinnamoyl-CoA reductase [Saccharum officinarum]
  misc_feature (1)..(284): Homolog of NCBI NO: 21553548 NR Description: cinnamoyl-CoA reductase-like protein [Arabidopsis
  misc_feature (1)..(284): Homolog of NCBI NO: 15234751 NR Description: cinnamoyl-CoA reductase-related [Arabidopsis
  misc_feature (1)..(278): Homolog of NCBI NO: 21553382 NR Description: putative cinnamoyl CoA reductase [Arabidopsis
  misc_feature (1)..(278): Homolog of NCBI NO: 18400407 NR Description: cinnamoyl-CoA reductase-related [Arabidopsis
  misc_feature (1)..(278): Homolog of NCBI NO: 25412171 NR Description: probable cinnamoyl CoA reductase [imported] -
  misc_feature (1)..(290): Homolog of NCBI NO: 37537132 NR Description: putative cinnamoyl-CoA reductase
MDASGPLGHALVHRLLRRGYTVHAATYGHSLDALALLAAAGHDEDRLKLFRADPFDYHTIADAVRGCSGLFCMFNTHEDQAGCDEVMVEVEVRAAQNVLEACAQTVTMERVVFTSSVTAVVWKDDHKLVDAFDERNWSDLNLCRKRKLWHALAKTLSEKTAWALAMDRGVDMVAINAGLLTGPGLSSAHPCLKGVPEMYEHGVLVTVDADFLADAHVAAYECPTAFGRYLCFNNVVCRPEDALQFAQMLTPSAPCYPPSDELKVIPQRIQNKKLNNLMVEFASAIYGDLD

SEQ ID NO: 68754 - DNA, 1264 bp, Triticum aestivum
  misc_feature (1)..(1264): Ceres Seq. ID no. 13596436
aaaaacaaaatccacaaaagatcttgcagaaattaaaaataggaaacggaaacgcccccctctctctcttccagctcctcctccacgccaccccgattcgatcactccccgagcagaatccccccgattcgatcaccggcgaggagaggagggaggggatgaggaagcgggagcgggagaacccgtgcgggatctgcgggcactaccacaagtacgaggagggggagccgtgcggggtgtgcggccaccgcccgccggcgctggggcccgccgggccggcggccgcgccgcggcaggagtcggcgttcccctcggagatactcaaggacttcctcttcctcggcagctacgacaacgcctcccgctccgagctcctcaagaccatcggcatctcccacatcctcaacactgtacccttatgccaaaacctttaccggaactcttttacttatcactgccttcaagacgacaagactttgcagtttgatgatgcaatccaattcctagaacaatgcgagagggataaagcacgagtgctagtccattgcatgtcagggaaaagtaggtcagctgcatttgttgtagccttcttgatgaagtccagaggctggcgacttgcacaatgttttcagtgggtgaaagaacggaggccacaagtgcaactggctgatgcggcacagcagcagttgattgagtatgagcagaagcttttcagttgcaatgttgctccaacggattcattcccttctcttggatttggttttccgaagccgtctggtgatgtccaggtgcctatctttaaccagcaggctccagggtccatctttgagcgggtcagcccgaataacatcccgagtaatttcacatttggggccaccgaagctaagctcccggatggcagtaacttcggtgtggtcaacttggctgggactgatagcatgatggacagctcctaggttactactattgcaatgctataaacggatgagctgcccatttagtcagatttcttggaacattttgaatttctgggaaggaaggttgcattctttgtacgaggcttcttacaatatgtgcaagcattttggccgttgtgatgttctgcagtttaacatgcacgtgcgcttttgttcaactttgtagagtaattcaggtgaactgaaattacgctagaaagtttgagtagaagtatcatatgtggctgttaaattgtacagattcgtgtgtcaagaaagtacagctcaaaatctatacatgttgcccc

SEQ ID NO: 68755 - protein, 317 aa, Triticum aestivum
  peptide (1)..(317): Ceres Seq. ID no. 13596437
  misc_feature (96)..(284): Homolog of NCBI NO: 28892737 NR Description: dual specificity phosphatase 4 [Mus musculus]
  misc_feature (96)..(284): Homolog of NCBI NO: 25742822 NR Description: MAP kinase phosphatase [Rattus norvegicus]
  misc_feature (96)..(284): Homolog of NCBI NO: 1083719 NR Description: dual specificity phosphatase (EC 3.1.3.-) HVH2 -
  misc_feature (79)..(240): Homolog of NCBI NO: 4758206 NR Description: dual specificity phosphatase 2
  misc_feature (103)..(252): Homolog of NCBI NO: 28317042 NR Description: RE08706p [Drosophila melanogaster]
  misc_feature (103)..(252): Homolog of NCBI NO: 24666604 NR Description: Mitogen-activated protein kinase phosphatase 3
  misc_feature (84)..(249): Homolog of NCBI NO: 16950652 NR Description: dual specificity phosphatase 4 isoform 2
  misc_feature (94)..(283): Homolog of NCBI NO: 30851156 NR Description: Unknown (protein for MGC:55423) [Danio rerio]
  misc_feature (53)..(316): Homolog of NCBI NO: 15228155 NR Description: protein phosphatase -related [Arabidopsis
  misc_feature (53)..(304): Homolog of NCBI NO: 28393745 NR Description: putative protein phosphatase [Arabidopsis
KQNPQKILQKLKIGNGNAPLSLFQLLLHATPIRSLPEQNPPDSITGEERREGMRKRERENPCGICGHYHKYEEGEPCGVCGHRPPALGPAGPAAAPRQESAFPSEILKDFLFLGSYDNASRSELLKTIGISHILNTVPLCQNLYRNSFTYHCLQDDKTLQFDDAIQFLEQCERDKARVLVHCMSGKSRSAAFVVAFLMKSRGWRLAQCFQWVKERRPQVQLADAAQQQLIEYEQKLFSCNVAPTDSFPSLGFGFPKPSGDVQVPIFNQQAPGSIFERVSPNNIPSNFTFGATEAKLPDGSNFGVVNLAGTDSMMDSS

SEQ ID NO: 68756 - protein, 265 aa, Triticum aestivum
  peptide (1)..(265): Ceres Seq. ID no. 13596438
  misc_feature (44)..(232): Homolog of NCBI NO: 28892737 NR Description: dual specificity phosphatase 4 [Mus musculus]
  misc_feature (44)..(232): Homolog of NCBI NO: 25742822 NR Description: MAP kinase phosphatase [Rattus norvegicus]
  misc_feature (44)..(232): Homolog of NCBI NO: 1083719 NR Description: dual specificity phosphatase (EC 3.1.3.-) HVH2 -
  misc_feature (27)..(188): Homolog of NCBI NO: 4758206 NR Description: dual specificity phosphatase 2
  misc_feature (51)..(200): Homolog of NCBI NO: 28317042 NR Description: RE08706p [Drosophila melanogaster]
  misc_feature (51)..(200): Homolog of NCBI NO: 24666604 NR Description: Mitogen-activated protein kinase phosphatase 3
  misc_feature (32)..(197): Homolog of NCBI NO: 16950652 NR Description: dual specificity phosphatase 4 isoform 2
  misc_feature (42)..(231): Homolog of NCBI NO: 30851156 NR Description: Unknown (protein for MGC:55423) [Danio rerio]
  misc_feature (1)..(264): Homolog of NCBI NO: 15228155 NR Description: protein phosphatase -related [Arabidopsis
  misc_feature (1)..(252): Homolog of NCBI NO: 28393745 NR Description: putative protein phosphatase [Arabidopsis
MRKRERENPCGICGHYHKYEEGEPCGVCGHRPPALGPAGPAAAPRQESAFPSEILKDFLFLGSYDNASRSELLKTIGISHILNTVPLCQNLYRNSFTYHCLQDDKTLQFDDAIQFLEQCERDKARVLVHCMSGKSRSAAFVVAFLMKSRGWRLAQCFQWVKERRPQVQLADAAQQQLIEYEQKLFSCNVAPTDSFPSLGFGFPKPSGDVQVPIFNQQAPGSIFERVSPNNIPSNFTFGATEAKLPDGSNFGVVNLAGTDSMMDSS

SEQ ID NO: 68757 - protein, 161 aa, Triticum aestivum
  peptide (1)..(161): Ceres Seq. ID no. 13596439
KTKSTKDLAEIKNRKRKRPPLSLPAPPPRHPDSITPRAESPRFDHRRGEEGGDEEAGAGEPVRDLRALPQVRGGGAVRGVRPPPAGAGARRAGGRAAAGVGVPLGDTQGLPLPRQLRQRLPLRAPQDHRHLPHPQHCTLMPKPLPELFYLSLPSRRQDFAV

SEQ ID NO: 68758 - DNA, 1344 bp, Triticum aestivum
  misc_feature (1)..(1344): Ceres Seq. ID no. 13598319
aaaaactcaccaagcaaacacttgagctaaccatatctagtccatatcctctcccaagctagctcgaagcagcaatggcgaaatctttcaccttattagcgctacttagcgcactggttgtcctctcacttcttgtgagccccattgcttgttcccgcaagctccccaggcctgcaaccaaggcccacaagaaccacaccgctgctaccccttcgtcgtctgccgcttatggctccggcggctggttagccggcggcgcgacgtattacggcgcccccaacggcgacggaagcgacggtggcgcgtgtggctaccagagcgctgtcggcaaccggccgttctcgtcgatgatcgccgccggcaacccgtcgctctacagagatggcaagggctgcggagcgtgctacgaggttaaatgcacaggcaaccaggcatgctccggccagccggcgaccgtcgtcatcaccgacgagtgccccgccggggccgcttgcctcggtgaggccgcccacttcgacatgagcggcacctccatgggcgccatggcgaagcctggcatggccgacaaactccgggccggcggtatcatcaagatccagtacaagagggtgccatgcaagtaccctggcatgaacattgccttcaaggtggaccagggctccaacccctactacctggaggtcctgatcgaattcgaggacgacgacggcgacctcaacgccgtggacctcatggaggccaactgcggcacctggacgcccatggcgcagaactggggcgcgctgtaccgcctcaactccaacaccggcaagccgctgcgcgggcccttctcgctccggctcacctccgactccggcaggaagctcgtcgtcaacaacgtcatccccgccagctggaaggccggagccacctaccgctccttggttaactacccctaagttacagcctcatcaactttttttcactgcgccgtacgtgcttggctagtaaccaagaagtgcagtgcagagtgtggtcgtggtaatttagaaccgcgggttaatttctaccgcggggattgtatttatacgaatatgcgtccgggaacggcaggaggctgtgtcagaggaggaggagcaggccatgcaaagattgtgccagctcttccctccatggtctctcggcgctcccctagtgatgcgtgtcgtcgatttgtatgtattttgtttctcttcctctgttttgtcgatgaggagaaaagcttgtagtgcagtgcaaactaaagttgcacgccgatgtatcaagttgtgtgagtgtgtttttggagcccaatccttgagagaaatgaacttttaccatcagatc

SEQ ID NO: 68759 - protein, 287 aa, Triticum aestivum
  peptide (1)..(287): Ceres Seq. ID no. 13598320
  misc_feature (188)..(271): Pfam Name: Pollen allergen Pfam Description: Pollen allergen
  misc_feature (56)..(281): Homolog of NCBI NO: 16517017 NR Description: beta-expansin [Oryza sativa]
  misc_feature (56)..(281): Homolog of NCBI NO: 16303233 NR Description: beta-expansin [Oryza sativa]
  misc_feature (1)..(286): Homolog of NCBI NO: 1076486 NR Description: cim1 protein - soybean
  misc_feature (57)..(286): Homolog of NCBI NO: 21666630 NR Description: beta-expansin [Oryza sativa]
  misc_feature (1)..(286): Homolog of NCBI NO: 34101047 NR Description: beta-expansin 1 precursor [Hordeum vulgare]
  misc_feature (30)..(286): Homolog of NCBI NO: 8118428 NR Description: beta-expansin [Oryza sativa]
  misc_feature (30)..(286): Homolog of NCBI NO: 16303229 NR Description: beta-expansin 5 [Oryza sativa]
  misc_feature (23)..(287): Homolog of NCBI NO: 14193767 NR Description: beta-expansin 4 [Zea mays]
  misc_feature (1)..(287): Homolog of NCBI NO: 40363749 NR Description: putative beta-expansin [Triticum aestivum]
  misc_feature (1)..(286): Homolog of NCBI NO: 16517013 NR Description: beta-expansin [Oryza sativa]
MAKSFTLLALLSALVVLSLLVSPIACSRKLPRPATKAHKNHTAATPSSSAAYGSGGWLAGGATYYGAPNGDGSDGGACGYQSAVGNRPFSSMIAAGNPSLYRDGKGCGACYEVKCTGNQACSGQPATVVITDECPAGAACLGEAAHFDMSGTSMGAMAKPGMADKLRAGGIIKIQYKRVPCKYPGMNIAFKVDQGSNPYYLEVLIEFEDDDGDLNAVDLMEANCGTWTPMAQNWGALYRLNSNTGKPLRGPFSLRLTSDSGRKLVVNNVIPASWKAGATYRSLVNYP

SEQ ID NO: 68760 - protein, 196 aa, Triticum aestivum
  peptide (1)..(196): Ceres Seq. ID no. 13598321
  misc_feature (97)..(180): Pfam Name: Pollen allergen Pfam Description: Pollen allergen
  misc_feature (1)..(190): Homolog of NCBI NO: 16517017 NR Description: beta-expansin [Oryza sativa]
  misc_feature (1)..(190): Homolog of NCBI NO: 16303233 NR Description: beta-expansin [Oryza sativa]
  misc_feature (1)..(195): Homolog of NCBI NO: 1076486 NR Description: cim1 protein - soybean
  misc_feature (1)..(195): Homolog of NCBI NO: 21666630 NR Description: beta-expansin [Oryza sativa]
  misc_feature (1)..(195): Homolog of NCBI NO: 34101047 NR Description: beta-expansin 1 precursor [Hordeum vulgare]
  misc_feature (1)..(195): Homolog of NCBI NO: 8118428 NR Description: beta-expansin [Oryza sativa]
  misc_feature (1)..(195): Homolog of NCBI NO: 16303229 NR Description: beta-expansin 5 [Oryza sativa]
  misc_feature (1)..(196): Homolog of NCBI NO: 14193767 NR Description: beta-expansin 4 [Zea mays]
  misc_feature (1)..(196): Homolog of NCBI NO: 40363749 NR Description: putative beta-expansin [Triticum aestivum]
  misc_feature (1)..(195): Homolog of NCBI NO: 16517013 NR Description: beta-expansin [Oryza sativa]
MIAAGNPSLYRDGKGCGACYEVKCTGNQACSGQPATVVITDECPAGAACLGEAAHFDMSGTSMGAMAKPGMADKLRAGGIIKIQYKRVPCKYPGMNIAFKVDQGSNPYYLEVLIEFEDDDGDLNAVDLMEANCGTWTPMAQNWGALYRLNSNTGKPLRGPFSLRLTSDSGRKLVVNNVIPASWKAGATYRSLVNYP

SEQ ID NO: 68761 - DNA, 1753 bp, Triticum aestivum
  misc_feature (1)..(1753): Ceres Seq. ID no. 13590666
atttttccactctcactccccgcagtcccccgctcgaagcctccaaaaccctaccgaactccgccccgccagccatggcgccgccccccacctccggcccgcagcagcggcggctcctccaggcggcggccgacggcgacctccgcctcttcaagagcatcgcgagcgcgctggacggcgggaagggccgcgtcaaggaggcggtggaggccgtcaggaattgcggcgccggggcgctgcacaccgccgccggccgcgggaggaccccgatgtgcgcgtacttggtggaggagcttggcgtggacgtcaatgctgcagacgacaaaggtgctacacctctgacttatgcacttcgttggcgggctgtggatactgtgaggtatctctttgatcatggtgccgatgcagaaaagcctggtgaacaaggttttacccctcttcatgtggcagctggagcaggattgtgtgaaatgatagaagtcttgctctcaaaaggagctgatgttaattgcttttcttaccgtgggacactactgcattctgctattatcggaaagcaggttgctgccgtgaagctcttgttggatcatcatgcggattgtaacaagccagtgtccctacattatacacctcttatcgctgctctccatgcccgctcgctgaaatgtgtgaagcttctgattgaggcgggtgctgatgcgaagggtgttcctccgctaacccccttagtagttgctgcaaatgacggtttaactgatttctacgaacctttacttcgggttggtgctgatcctgatgttcgtgatgatggaggtcagctgccaatagagattgctgcacgtaacaatagacggaaagatgttgagatcctttttccagtaacatctcatattccctatgtgcgtgattggagtgttgatgggatacttgcttatgtcaaatcagtgccgaaggaggaggatgacccgttatacaaaatggggccagcttatctgaaactggaaggaaccaaggcttacaagagaaaagattatgtttctgcaataaatttctactccatggcaatcaagcttaaccctggagatgtaaccttgcattcaaataagagcctttgctggattaacctgggggaaggagacaaggccttggaggacgccgagttttgcaggatgatacggcctgattggccaaaggcctgttacaggcaaggggctgcccaaatgttattgaagaactatgaaaaggcatgtgaagcattccaagatggtctgaagttggacccaacaaatgttgagattgagaatgcattacgtgtgcggttcagggaaccggaggtgagacaatgcgacatgaagcaggctagtatggacgtactcctccttgcgtattccggtgtggttgcagtaaggcctgtgaaatgcccaacacacagtgctcaagacccgatttgcggcagcgtggatgaatgtgtccaagaatgcggcgatgaaggctaccattttgggatgtgcagccattgcaaatgtttctgcttcaactgcacctcatcacttgacgctaaaccggcacccggagccttgagtccttgaacgagtacgcacctaatctaaaaagctgcatcaataaacaaaaattgatatccttttcctttgtttttcttctttggtcctttgtatgtggatggtcaaagaggatcttgtgttctatatatattaacgtgggatagcggaacccattcagccgatttgtatgg

SEQ ID NO: 68762 - protein, 528 aa, Triticum aestivum
  peptide (1)..(528): Ceres Seq. ID no. 15220995
  misc_feature (397)..(429): Pfam Name: TPR Domain Pfam Description: TPR Domain
  misc_feature (25)..(321): Homolog of NCBI NO: 24745936 NR Description: ankyrin-like protein [Solanum tuberosum]
  misc_feature (36)..(321): Homolog of NCBI NO: 15229331 NR Description: ankyrin-related protein [Arabidopsis thaliana]
  misc_feature (37)..(437): Homolog of NCBI NO: 28201548 NR Description: putative ankyrin [Oryza sativa (japonica
  misc_feature (37)..(316): Homolog of NCBI NO: 34329680 NR Description: unknown [Nicotiana benthamiana]
  misc_feature (75)..(436): Homolog of NCBI NO: 13435247 NR Description: putative ankyrin [Oryza sativa]
  misc_feature (329)..(436): Homolog of NCBI NO: 13435243 NR Description: putative gag-pol polyprotein [Oryza sativa]
  misc_feature (33)..(328): Homolog of NCBI NO: 13435243 NR Description: putative gag-pol polyprotein [Oryza sativa]
  misc_feature (29)..(435): Homolog of NCBI NO: 34896852 NR Description: putative ankyrin [Oryza sativa]
  misc_feature (41)..(437): Homolog of NCBI NO: 27542766 NR Description: ankyrin-like protein-like protein [Sorghum
  misc_feature (25)..(437): Homolog of NCBI NO: 27542768 NR Description: ankyrin-like protein-like protein [Sorghum
FSTLTPRSPPLEASKTLPNSAPPAMAPPPTSGPQQRRLLQAAADGDLRLFKSIASALDGGKGRVKEAVEAVRNCGAGALHTAAGRGRTPMCAYLVEELGVDVNAADDKGATPLTYALRWRAVDTVRYLFDHGADAEKPGEQGFTPLHVAAGAGLCEMIEVLLSKGADVNCFSYRGTLLHSAIIGKQVAAVKLLLDHHADCNKPVSLHYTPLIAALHARSLKCVKLLIEAGADAKGVPPLTPLVVAANDGLTDFYEPLLRVGADPDVRDDGGQLPIEIAARNNRRKDVEILFPVTSHIPYVRDWSVDGILAYVKSVPKEEDDPLYKMGPAYLKLEGTKAYKRKDYVSAINFYSMAIKLNPGDVTLHSNKSLCWINLGEGDKALEDAEFCRMIRPDWPKACYRQGAAQMLLKNYEKACEAFQDGLKLDPTNVEIENALRVRFREPEVRQCDMKQASMDVLLLAYSGVVAVRPVKCPTHSAQDPICGSVDECVQECGDEGYHFGMCSHCKCFCFNCTSSLDAKPAPGALSP

SEQ ID NO: 68763 - protein, 504 aa, Triticum aestivum
  peptide (1)..(504): Ceres Seq. ID no. 15220996
  misc_feature (373)..(405): Pfam Name: TPR Domain Pfam Description: TPR Domain
  misc_feature (1)..(297): Homolog of NCBI NO: 24745936 NR Description: ankyrin-like protein [Solanum tuberosum]
  misc_feature (12)..(297): Homolog of NCBI NO: 15229331 NR Description: ankyrin-related protein [Arabidopsis thaliana]
  misc_feature (13)..(413): Homolog of NCBI NO: 28201548 NR Description: putative ankyrin [Oryza sativa (japonica
  misc_feature (13)..(292): Homolog of NCBI NO: 34329680 NR Description: unknown [Nicotiana benthamiana]
  misc_feature (51)..(412): Homolog of NCBI NO: 13435247 NR Description: putative ankyrin [Oryza sativa]
  misc_feature (305)..(412): Homolog of NCBI NO: 13435243 NR Description: putative gag-pol polyprotein [Oryza sativa]
  misc_feature (9)..(304): Homolog of NCBI NO: 13435243 NR Description: putative gag-pol polyprotein [Oryza sativa]
  misc_feature (5)..(411): Homolog of NCBI NO: 34896852 NR Description: putative ankyrin [Oryza sativa]
  misc_feature (17)..(413): Homolog of NCBI NO: 27542766 NR Description: ankyrin-like protein-like protein [Sorghum
  misc_feature (1)..(413): Homolog of NCBI NO: 27542768 NR Description: ankyrin-like protein-like protein [Sorghum
MAPPPTSGPQQRRLLQAAADGDLRLFKSIASALDGGKGRVKEAVEAVRNCGAGALHTAAGRGRTPMCAYLVEELGVDVNAADDKGATPLTYALRWRAVDTVRYLFDHGADAEKPGEQGFTPLHVAAGAGLCEMIEVLLSKGADVNCFSYRGTLLHSAIIGKQVAAVKLLLDHHADCNKPVSLHYTPLIAALHARSLKCVKLLIEAGADAKGVPPLTPLVVAANDGLTDFYEPLLRVGADPDVRDDGGQLPIEIAARNNRRKDVEILFPVTSHIPYVRDWSVDGILAYVKSVPKEEDDPLYKMGPAYLKLEGTKAYKRKDYVSAINFYSMAIKLNPGDVTLHSNKSLCWINLGEGDKALEDAEFCRMIRPDWPKACYRQGAAQMLLKNYEKACEAFQDGLKLDPTNVEIENALRVRFREPEVRQCDMKQASMDVLLLAYSGVVAVRPVKCPTHSAQDPICGSVDECVQECGDEGYHFGMCSHCKCFCFNCTSSLDAKPAPGALSP

SEQ ID NO: 68764 - protein, 439 aa, Triticum aestivum
  peptide (1)..(439): Ceres Seq. ID no. 15220997
  misc_feature (308)..(340): Pfam Name: TPR Domain Pfam Description: TPR Domain
  misc_feature (1)..(232): Homolog of NCBI NO: 24745936 NR Description: ankyrin-like protein [Solanum tuberosum]
  misc_feature (1)..(232): Homolog of NCBI NO: 15229331 NR Description: ankyrin-related protein [Arabidopsis thaliana]
  misc_feature (1)..(348): Homolog of NCBI NO: 28201548 NR Description: putative ankyrin [Oryza sativa (japonica
  misc_feature (1)..(227): Homolog of NCBI NO: 34329680 NR Description: unknown [Nicotiana benthamiana]
  misc_feature (1)..(347): Homolog of NCBI NO: 13435247 NR Description: putative ankyrin [Oryza sativa]
  misc_feature (240)..(347): Homolog of NCBI NO: 13435243 NR Description: putative gag-pol polyprotein [Oryza sativa]
  misc_feature (1)..(239): Homolog of NCBI NO: 13435243 NR Description: putative gag-pol polyprotein [Oryza sativa]
  misc_feature (1)..(346): Homolog of NCBI NO: 34896852 NR Description: putative ankyrin [Oryza sativa]
  misc_feature (1)..(348): Homolog of NCBI NO: 27542766 NR Description: ankyrin-like protein-like protein [Sorghum
  misc_feature (1)..(348): Homolog of NCBI NO: 27542768 NR Description: ankyrin-like protein-like protein [Sorghum
MCAYLVEELGVDVNAADDKGATPLTYALRWRAVDTVRYLFDHGADAEKPGEQGFTPLHVAAGAGLCEMIEVLLSKGADVNCFSYRGTLLHSAIIGKQVAAVKLLLDHHADCNKPVSLHYTPLIAALHARSLKCVKLLIEAGADAKGVPPLTPLVVAANDGLTDFYEPLLRVGADPDVRDDGGQLPIEIAARNNRRKDVEILFPVTSHIPYVRDWSVDGILAYVKSVPKEEDDPLYKMGPAYLKLEGTKAYKRKDYVSAINFYSMAIKLNPGDVTLHSNKSLCWINLGEGDKALEDAEFCRMIRPDWPKACYRQGAAQMLLKNYEKACEAFQDGLKLDPTNVEIENALRVRFREPEVRQCDMKQASMDVLLLAYSGVVAVRPVKCPTHSAQDPICGSVDECVQECGDEGYHFGMCSHCKCFCFNCTSSLDAKPAPGALSP

SEQ ID NO: 68765 - DNA, 888 bp, Triticum aestivum
  misc_feature (1)..(888): Ceres Seq. ID no. 12614779
acggacacacacacgcacacacacatacctcgtcggacctcgtcggttccttccgcaggagatcggcatgggagctgagcagcagcagcagcagaccgccgggggcagcaggttcgccgcggcgtttggcctgctgcgccagtacatgaaggaccagcctgggggcggcgtggtcaccgtgggcctcatgccgggcggcggcgacggcgtcgaggcggtcgcgccggaggagaggatccggaccatggagctcttcccccagcaggccggcatggtcagggactcgcgcgaaaggacggggccggagagggcgccgctgaccatcttctacgccgggaggacggtggtgttcgacgacttccccgccgagaaggccaaggagctcatgcagctcgccggctccttcggcgcgctgccggccgcctccgacgccggcgccgagcccgtctgccagaacgcgccggggcagccttgctttgcagacctgccgatcgcgaggaaggcgtcgctccataggttcctggagaagaggaagagcaggctggccgcggcagatccgtaccctgcgccggtggcggcgccaggggctgggacggccggcaagcctgtgccggaggacggcggcgcgccgtggctcggcgtcaactccgcgctccagctcaactgaaggatttgacgagccggggagaggaacaaatcactgccttgctgcttctccacgtagtagtatatacagtactactctactactacgtggatccttgattgttgccgtttttatcttactaccacgcccgttaattggctgcgtcagggtaattaactgcgtggcgccggctaaatatatatcctgggttaagtagtataagtatgttcttcatctgtttg

SEQ ID NO: 68766 - protein, 221 aa, Triticum aestivum
  peptide (1)..(221): Ceres Seq. ID no. 12614780
  misc_feature (102)..(134): Pfam Name: ZIM motif Pfam Description: ZIM motif
  misc_feature (102)..(132): Homolog of NCBI NO: 21593416 NR Description: unknown [Arabidopsis thaliana]
  misc_feature (102)..(132): Homolog of NCBI NO: 18394706 NR Description: expressed protein
  misc_feature (147)..(214): Homolog of NCBI NO: 21593416 NR Description: unknown [Arabidopsis thaliana]
  misc_feature (147)..(214): Homolog of NCBI NO: 18394706 NR Description: expressed protein
  misc_feature (34)..(166): Homolog of NCBI NO: 29788814 NR Description: unknown protein [Oryza sativa (japonica
  misc_feature (31)..(196): Homolog of NCBI NO: 37533948 NR Description: hypothetical protein [Oryza sativa (japonica
  misc_feature (36)..(187): Homolog of NCBI NO: 12247470 NR Description: PnFL-2 [Ipomoea nil]
  misc_feature (37)..(212): Homolog of NCBI NO: 24960746 NR Description: Unknown protein [Oryza sativa (japonica
  misc_feature (33)..(214): Homolog of NCBI NO: 37533958 NR Description: unknown protein [Oryza sativa (japonica
  misc_feature (33)..(220): Homolog of NCBI NO: 24960745 NR Description: Unknown protein [Oryza sativa (japonica
RTHTRTHTYLVGPRRFLPQEIGMGAEQQQQQTAGGSRFAAAFGLLRQYMKDQPGGGVVTVGLMPGGGDGVEAVAPEERIRTMELFPQQAGMVRDSRERTGPERAPLTIFYAGRTVVFDDFPAEKAKELMQLAGSFGALPAASDAGAEPVCQNAPGQPCFADLPIARKASLHRFLEKRKSRLAAADPYPAPVAAPGAGTAGKPVPEDGGAPWLGVNSALQLN

SEQ ID NO: 68767 - protein, 199 aa, Triticum aestivum
  peptide (1)..(199): Ceres Seq. ID no. 12614781
  misc_feature (80)..(112): Pfam Name: ZIM motif Pfam Description: ZIM motif
  misc_feature (80)..(110): Homolog of NCBI NO: 21593416 NR Description: unknown [Arabidopsis thaliana]
  misc_feature (80)..(110): Homolog of NCBI NO: 18394706 NR Description: expressed protein
  misc_feature (125)..(192): Homolog of NCBI NO: 21593416 NR Description: unknown [Arabidopsis thaliana]
  misc_feature (125)..(192): Homolog of NCBI NO: 18394706 NR Description: expressed protein
  misc_feature (12)..(144): Homolog of NCBI NO: 29788814 NR Description: unknown protein [Oryza sativa (japonica
  misc_feature (9)..(174): Homolog of NCBI NO: 37533948 NR Description: hypothetical protein [Oryza sativa (japonica
  misc_feature (14)..(165): Homolog of NCBI NO: 12247470 NR Description: PnFL-2 [Ipomoea nil]
  misc_feature (15)..(190): Homolog of NCBI NO: 24960746 NR Description: Unknown protein [Oryza sativa (japonica
  misc_feature (11)..(192): Homolog of NCBI NO: 37533958 NR Description: unknown protein [Oryza sativa (japonica
  misc_feature (11)..(198): Homolog of NCBI NO: 24960745 NR Description: Unknown protein [Oryza sativa (japonica
MGAEQQQQQTAGGSRFAAAFGLLRQYMKDQPGGGVVTVGLMPGGGDGVEAVAPEERIRTMELFPQQAGMVRDSRERTGPERAPLTIFYAGRTVVFDDFPAEKAKELMQLAGSFGALPAASDAGAEPVCQNAPGQPCFADLPIARKASLHRFLEKRKSRLAAADPYPAPVAAPGAGTAGKPVPEDGGAPWLGVNSALQLN

SEQ ID NO: 68768 - protein, 173 aa, Triticum aestivum
  peptide (1)..(173): Ceres Seq. ID no. 12614782
  misc_feature (54)..(86): Pfam Name: ZIM motif Pfam Description: ZIM motif
  misc_feature (54)..(84): Homolog of NCBI NO: 21593416 NR Description: unknown [Arabidopsis thaliana]
  misc_feature (54)..(84): Homolog of NCBI NO: 18394706 NR Description: expressed protein
  misc_feature (99)..(166): Homolog of NCBI NO: 21593416 NR Description: unknown [Arabidopsis thaliana]
  misc_feature (99)..(166): Homolog of NCBI NO: 18394706 NR Description: expressed protein
  misc_feature (1)..(118): Homolog of NCBI NO: 29788814 NR Description: unknown protein [Oryza sativa (japonica
  misc_feature (1)..(148): Homolog of NCBI NO: 37533948 NR Description: hypothetical protein [Oryza sativa (japonica
  misc_feature (1)..(139): Homolog of NCBI NO: 12247470 NR Description: PnFL-2 [Ipomoea nil]
  misc_feature (1)..(164): Homolog of NCBI NO: 24960746 NR Description: Unknown protein [Oryza sativa (japonica
  misc_feature (1)..(166): Homolog of NCBI NO: 37533958 NR Description: unknown protein [Oryza sativa (japonica
  misc_feature (1)..(172): Homolog of NCBI NO: 24960745 NR Description: Unknown protein [Oryza sativa (japonica
MKDQPGGGVVTVGLMPGGGDGVEAVAPEERIRTMELFPQQAGMVRDSRERTGPERAPLTIFYAGRTVVFDDFPAEKAKELMQLAGSFGALPAASDAGAEPVCQNAPGQPCFADLPIARKASLHRFLEKRKSRLAAADPYPAPVAAPGAGTAGKPVPEDGGAPWLGVNSALQLN

SEQ ID NO: 68769 - DNA, 1481 bp, Triticum aestivum
  misc_feature (1)..(1481): Ceres Seq. ID no. 13596440
acaactcctgctccggcacccccttccctccccagccttctccaccgctctccctcccccctcgtcggcggcgaaaatctccggatccatcccggcctccgttccatcgccaccctctccacccgcaagggtttaattctgaggggaatttccgagcatttcctgcctgcctacggcgtaaatacaggtctgcgggctgtcctgcttcgtctcgcggtcttcgatgcgtggtggaggcaacacggataggatgcagcaggttcagcacacggttcagacgcacggatatggactggccagaaagcacacttatgactgggtcgttcttacgctcctagctgcggccgtggtcgtcttgcattatgctccgccgtttaatcggttcgttgggaaggatatgatggctgatattaggtacccggtgaaacagagtactgtgccagcatgggctgttcctgtaatctctatgctgtgtccagtgcttgttttcgtagcggtgtatgttgctagaagggacgtctatgaccttcaccacgcaacgctaggtgttattttcgctgtgctgatcactgccgcgttcactgatgtgataaagactgcagtagggagaccaaggccagacttcttttggcggtgttttcctgatggaaggcaggtatatgatcaagtgacaggtggtgtgatttgccatggcgagaaaggtttcttaaccgatgggcgcaagagttttcctagtggacacacgtcgtggtcttttgctggacttggatttttgtcactatacttatctggcaaaattaaggcgtttgatcgcaaaggtcatgtggcaaaactttgcatcgtgattcttcctcttcttcttgcttcgcttgttggggtttctagaatagacaactatcggcaccactgggaggatgtgcttgtcggtggcctgattggatatatcatggcagtgctgtgctatctgcacttctttcctcctccatatcaccatcaaggttggggtccctatgcgtacttccacatgctggaagagcttgaggtgcacaattcaaataatgcacaaaaccagcagtctgcaggtgagcatcatatcggattgaccggccaacaccataacgggagatcaagaaatgatttggaatctggaagtgtgtaactcacccctctgtggaaccgactagcataccttgtacagtaagcatgcgttaaaaacttttttatgtgtgcactaagcaagtattaggagtttagaactagatatgtgctatctccccctcatgtttgtgtacaaaagtcattcgctcagtatattctgacctagttgttctagggccacctgttgtatctaaatgatgtgttaacgtcgtagaccgtgtgagtggccggtggacgtactgagtacgaacttattccgctgttcaacaagcacaactgagcgatgataatgacaagcatatctagagccattgaacattccc

SEQ ID NO: 68770 - protein, 311 aa, Triticum aestivum
  peptide (1)..(311): Ceres Seq. ID no. 13596441
  misc_feature (114)..(255): Pfam Name: PAP2 superfamily Pfam Description: PAP2 superfamily
  misc_feature (15)..(305): Homolog of NCBI NO: 38637528 NR Description: unknown protein [Oryza sativa (japonica
  misc_feature (1)..(279): Homolog of NCBI NO: 21554001 NR Description: putative phosphatidic acid phosphatase
  misc_feature (10)..(279): Homolog of NCBI NO: 25353094 NR Description: probable phosphatidic acid phosphatase
  misc_feature (1)..(279): Homolog of NCBI NO: 18379166 NR Description: phosphatidic acid phosphatase (PAP2) family
  misc_feature (1)..(279): Homolog of NCBI NO: 15724220 NR Description: At2g01180/F10A8.6 [Arabidopsis thaliana]
  misc_feature (15)..(293): Homolog of NCBI NO: 15218051 NR Description: phosphatidic acid phosphatase (PAP2) family
  misc_feature (15)..(309): Homolog of NCBI NO: 6957723 NR Description: putative phosphatidate phosphohydrolase
  misc_feature (9)..(309): Homolog of NCBI NO: 18396250 NR Description: phosphatidic acid phosphatase (PAP2) family
  misc_feature (7)..(309): Homolog of NCBI NO: 9621903 NR Description: phosphatidic acid phosphatase alpha [Vigna
  misc_feature (8)..(263): Homolog of NCBI NO: 34895654 NR Description: putative phosphatidic acid phosphatase alpha
MRGGGNTDRMQQVQHTVQTHGYGLARKHTYDWVVLTLLAAAVVVLHYAPPFNRFVGKDMMADIRYPVKQSTVPAWAVPVISMLCPVLVFVAVYVARRDVYDLHHATLGVIFAVLITAAFTDVIKTAVGRPRPDFFWRCFPDGRQVYDQVTGGVICHGEKGFLTDGRKSFPSGHTSWSFAGLGFLSLYLSGKIKAFDRKGHVAKLCIVILPLLLASLVGVSRIDNYRHHWEDVLVGGLIGYIMAVLCYLHFFPPPYHHQGWGPYAYFHMLEELEVHNSNNAQNQQSAGEHHIGLTGQHHNGRSRNDLESGSV

SEQ ID NO: 68771 - protein, 302 aa, Triticum aestivum
  peptide (1)..(302): Ceres Seq. ID no. 13596442
  misc_feature (105)..(246): Pfam Name: PAP2 superfamily Pfam Description: PAP2 superfamily
  misc_feature (6)..(296): Homolog of NCBI NO: 38637528 NR Description: unknown protein [Oryza sativa (japonica
  misc_feature (1)..(270): Homolog of NCBI NO: 21554001 NR Description: putative phosphatidic acid phosphatase
  misc_feature (1)..(270): Homolog of NCBI NO: 25353094 NR Description: probable phosphatidic acid phosphatase
  misc_feature (1)..(270): Homolog of NCBI NO: 18379166 NR Description: phosphatidic acid phosphatase (PAP2) family
  misc_feature (1)..(270): Homolog of NCBI NO: 15724220 NR Description: At2g01180/F10A8.6 [Arabidopsis thaliana]
  misc_feature (6)..(284): Homolog of NCBI NO: 15218051 NR Description: phosphatidic acid phosphatase (PAP2) family
  misc_feature (6)..(300): Homolog of NCBI NO: 6957723 NR Description: putative phosphatidate phosphohydrolase
  misc_feature (1)..(300): Homolog of NCBI NO: 18396250 NR Description: phosphatidic acid phosphatase (PAP2) family
  misc_feature (1)..(300): Homolog of NCBI NO: 9621903 NR Description: phosphatidic acid phosphatase alpha [Vigna
  misc_feature (1)..(254): Homolog of NCBI NO: 34895654 NR Description: putative phosphatidic acid phosphatase alpha
MQQVQHTVQTHGYGLARKHTYDWVVLTLLAAAVVVLHYAPPFNRFVGKDMMADIRYPVKQSTVPAWAVPVISMLCPVLVFVAVYVARRDVYDLHHATLGVIFAVLITAAFTDVIKTAVGRPRPDFFWRCFPDGRQVYDQVTGGVICHGEKGFLTDGRKSFPSGHTSWSFAGLGFLSLYLSGKIKAFDRKGHVAKLCIVILPLLLASLVGVSRIDNYRHHWEDVLVGGLIGYIMAVLCYLHFFPPPYHHQGWGPYAYFHMLEELEVHNSNNAQNQQSAGEHHIGLTGQHHNGRSRNDLESGSV

SEQ ID NO: 68772 - protein, 253 aa, Triticum aestivum
  peptide (1)..(253): Ceres Seq. ID no. 13596443
  misc_feature (56)..(197): Pfam Name: PAP2 superfamily Pfam Description: PAP2 superfamily
  misc_feature (1)..(247): Homolog of NCBI NO: 38637528 NR Description: unknown protein [Oryza sativa (japonica
  misc_feature (1)..(221): Homolog of NCBI NO: 21554001 NR Description: putative phosphatidic acid phosphatase
  misc_feature (1)..(221): Homolog of NCBI NO: 25353094 NR Description: probable phosphatidic acid phosphatase
  misc_feature (1)..(221): Homolog of NCBI NO: 18379166 NR Description: phosphatidic acid phosphatase (PAP2) family
  misc_feature (1)..(221): Homolog of NCBI NO: 15724220 NR Description: At2g01180/F10A8.6 [Arabidopsis thaliana]
  misc_feature (1)..(235): Homolog of NCBI NO: 15218051 NR Description: phosphatidic acid phosphatase (PAP2) family
  misc_feature (1)..(251): Homolog of NCBI NO: 6957723 NR Description: putative phosphatidate phosphohydrolase
  misc_feature (1)..(251): Homolog of NCBI NO: 18396250 NR Description: phosphatidic acid phosphatase (PAP2) family
  misc_feature (1)..(251): Homolog of NCBI NO: 9621903 NR Description: phosphatidic acid phosphatase alpha [Vigna
  misc_feature (1)..(205): Homolog of NCBI NO: 34895654 NR Description: putative phosphatidic acid phosphatase alpha
MMADIRYPVKQSTVPAWAVPVISMLCPVLVFVAVYVARRDVYDLHHATLGVIFAVLITAAFTDVIKTAVGRPRPDFFWRCFPDGRQVYDQVTGGVICHGEKGFLTDGRKSFPSGHTSWSFAGLGFLSLYLSGKIKAFDRKGHVAKLCIVILPLLLASLVGVSRIDNYRHHWEDVLVGGLIGYIMAVLCYLHFFPPPYHHQGWGPYAYFHMLEELEVHNSNNAQNQQSAGEHHIGLTGQHHNGRSRNDLESGSV

SEQ ID NO: 68773 - DNA, 955 bp, Triticum aestivum
  misc_feature (1)..(955): Ceres Seq. ID no. 14302111
aaccaatcaactgaccaaccaccacgagccaagagccaacccacaccactctgtgtctgtactcagcgcgagctcacgggctccacaatgcctcgctccggcgctctccccctcctcgccgcgctggtcctcgccttggcggccgcggcggcggcgtcggcctcgaactcgaagggcgctccggcggccaccgacttcatccgcaagtcgtgccgcgagacgcagtacccgtcggtgtgcatgcagagcctgtcgtcgtacggcaaaccgccgccgcgcagcccgcaggagctggcgcgcgcggcgctgtcggtgagcgcggaccgcgcgcggtcggcgtcggcgtacgtggggcggatctgcgggccgggcctccgcagcggcagcggcgccaaggcgaagagcagccccgcgcgcgactgcctggagaacatggcggacagcgtgggccacctgcgcgacgcggccaaggagctggacgggagcctgggccgggccgggtcgccggcgttcaggtggcacctgagcaacgtgcagacctggtgcagcgcggcgctcaccgacgagaacacctgcctcgacgggctctcccgcggcgtggacgccggcacgcgcgccgccatccggagcaaggtcgtggaggtcgcccaggtcaccagcaacgccctggcgctcgtcaacaaggtcgggtccgggcactagcccggcccgtcccaggcccatccccactcgtttcgccttgctacgtactactacgcgcgtacgcatggcagctcgaatcctggtgctctataatcttgggtcatgtactactgtattccagtttcgatgtgttcttgctgtgctgtaaaatgtacttagctaagacaatcaattaagagtgtaattaatgataaggtggcgaaactaagccaaagtgtgtgttctcttgctagctatagcttttgattaacat

SEQ ID NO: 68774 - protein, 233 aa, Triticum aestivum
  peptide (1)..(233): Ceres Seq. ID no. 14302112
  misc_feature (38)..(227): Homolog of NCBI NO: 15241799 NR Description: pectinesterase family [Arabidopsis thaliana]
  misc_feature (36)..(227): Homolog of NCBI NO: 21618088 NR Description: ripening-related protein-like [Arabidopsis
  misc_feature (38)..(233): Homolog of NCBI NO: 15234547 NR Description: pectinesterase - related [Arabidopsis thaliana]
  misc_feature (42)..(228): Homolog of NCBI NO: 18407657 NR Description: pectinesterase family [Arabidopsis thaliana]
  misc_feature (42)..(228): Homolog of NCBI NO: 21618013 NR Description: putative ripening-related protein [Arabidopsis
  misc_feature (64)..(233): Homolog of NCBI NO: 7488727 NR Description: 21K protein precursor - alfalfa
  misc_feature (30)..(233): Homolog of NCBI NO: 15234982 NR Description: pectinesterase - related [Arabidopsis thaliana]
  misc_feature (30)..(233): Homolog of NCBI NO: 112717 NR Description: 21 KD PROTEIN PRECURSOR (1.2 PROTEIN)
  misc_feature (30)..(228): Homolog of NCBI NO: 7406663 NR Description: putative ripening-related protein [Vitis vinifera]
  misc_feature (37)..(233): Homolog of NCBI NO: 32489696 NR Description: OSJNBb0004G23.9 [Oryza sativa (japonica
NQSTDQPPRAKSQPTPLCVCTQRELTGSTMPRSGALPLLAALVLALAAAAAASASNSKGAPAATDFIRKSCRETQYPSVCMQSLSSYGKPPPRSPQELARAALSVSADRARSASAYVGRICGPGLRSGSGAKAKSSPARDCLENMADSVGHLRDAAKELDGSLGRAGSPAFRWHLSNVQTWCSAALTDENTCLDGLSRGVDAGTRAAIRSKVVEVAQVTSNALALVNKVGSGH

SEQ ID NO: 68775 - protein, 204 aa, Triticum aestivum
  peptide (1)..(204): Ceres Seq. ID no. 14302113
  misc_feature (9)..(198): Homolog of NCBI NO: 15241799 NR Description: pectinesterase family [Arabidopsis thaliana]
  misc_feature (7)..(198): Homolog of NCBI NO: 21618088 NR Description: ripening-related protein-like [Arabidopsis
  misc_feature (9)..(204): Homolog of NCBI NO: 15234547 NR Description: pectinesterase - related [Arabidopsis thaliana]
  misc_feature (13)..(199): Homolog of NCBI NO: 18407657 NR Description: pectinesterase family [Arabidopsis thaliana]
  misc_feature (13)..(199): Homolog of NCBI NO: 21618013 NR Description: putative ripening-related protein [Arabidopsis
  misc_feature (35)..(204): Homolog of NCBI NO: 7488727 NR Description: 21K protein precursor - alfalfa
  misc_feature (1)..(204): Homolog of NCBI NO: 15234982 NR Description: pectinesterase - related [Arabidopsis thaliana]
  misc_feature (1)..(204): Homolog of NCBI NO: 112717 NR Description: 21 KD PROTEIN PRECURSOR (1.2 PROTEIN)
  misc_feature (1)..(199): Homolog of NCBI NO: 7406663 NR Description: putative ripening-related protein [Vitis vinifera]
  misc_feature (8)..(204): Homolog of NCBI NO: 32489696 NR Description: OSJNBb0004G23.9 [Oryza sativa (japonica
MPRSGALPLLAALVLALAAAAAASASNSKGAPAATDFIRKSCRETQYPSVCMQSLSSYGKPPPRSPQELARAALSVSADRARSASAYVGRICGPGLRSGSGAKAKSSPARDCLENMADSVGHLRDAAKELDGSLGRAGSPAFRWHLSNVQTWCSAALTDENTCLDGLSRGVDAGTRAAIRSKVVEVAQVTSNALALVNKVGSGH

SEQ ID NO: 68776 - protein, 153 aa, Triticum aestivum
  peptide (1)..(153): Ceres Seq. ID no. 14302114
  misc_feature (1)..(147): Homolog of NCBI NO: 15241799 NR Description: pectinesterase family [Arabidopsis thaliana]
  misc_feature (1)..(147): Homolog of NCBI NO: 21618088 NR Description: ripening-related protein-like [Arabidopsis
  misc_feature (1)..(153): Homolog of NCBI NO: 15234547 NR Description: pectinesterase - related [Arabidopsis thaliana]
  misc_feature (1)..(148): Homolog of NCBI NO: 18407657 NR Description: pectinesterase family [Arabidopsis thaliana]
  misc_feature (1)..(148): Homolog of NCBI NO: 21618013 NR Description: putative ripening-related protein [Arabidopsis
  misc_feature (1)..(153): Homolog of NCBI NO: 7488727 NR Description: 21K protein precursor - alfalfa
  misc_feature (1)..(153): Homolog of NCBI NO: 15234982 NR Description: pectinesterase - related [Arabidopsis thaliana]
  misc_feature (1)..(153): Homolog of NCBI NO: 112717 NR Description: 21 KD PROTEIN PRECURSOR (1.2 PROTEIN)
  misc_feature (1)..(148): Homolog of NCBI NO: 7406663 NR Description: putative ripening-related protein [Vitis vinifera]
  misc_feature (1)..(153): Homolog of NCBI NO: 32489696 NR Description: OSJNBb0004G23.9 [Oryza sativa (japonica
MQSLSSYGKPPPRSPQELARAALSVSADRARSASAYVGRICGPGLRSGSGAKAKSSPARDCLENMADSVGHLRDAAKELDGSLGRAGSPAFRWHLSNVQTWCSAALTDENTCLDGLSRGVDAGTRAAIRSKVVEVAQVTSNALALVNKVGSGH

SEQ ID NO: 68777 - DNA, 1268 bp, Triticum aestivum
  misc_feature (1)..(1268): Ceres Seq. ID no. 12593499
aatcgaaaagatcgggacggtaccggtacgggagtccgccaatttccggcgcgcgggaaaatttcccgcactcgcgctcgagcctcgcccgctataagaaagaatcgcaccaccacggtttcctgctccacttcccccacttccgccgcctcccaccgaatgggccgcaagaggagggctagggtttccagcgacagcgacggcgacgacgtcgagatgaacggcgatgagcccgcccccgccgccgcggagagcaagagcctctacgagatattaggggttgcgagcacagcttcacaacaggagataaaaaaggcatatcacaagttggccttgcgtcttcacccagataagaatcctggagatgaggaagccaacgaaaaatttcagcagctgcaaaaggtgatatctattcttggagatcaggagaaaagggcattgtatgatgagactggaattactgatgatgatgcactggttggagaagctgcagacaatctccaagcgtacttcagaacagtgtacagaaaggtcacagaggctgacattgaagaatttgaagctaagtatagagggtcagactctgagaaaaaggatttaaaggaactgtacacaaaatttaagggcaacatgaacagactcttctgctcaatgatttgctcagatgccaagcttgattctcaccgcttcaaagatataattgatcaggcaattgctgaaggcgaggtgaagtccaccaaagtgtatgcgaaatgggctaaaaagatctctgagatagaaccacccacaaacccattggagaggagagtgaagaaaaagaagagccaggagagcgacctcatcctggcgatctcgcagcgcagggaacagaggaaggagcggtttgactctgttctgtcatctataatgtccaagtgtgatgacaacaaggcgggcagctcagagcccacggaggaggagtttgagcgcgctcggcagaggcttgagaagaagcgcaccaaggggcgcaaatggtatgaatcttgacatgcatgcgcaaatgatatgaatcttgacatgcatgcaggcccttcgagaaaagatgggtgttgagtggagtggagtggaggggttgtgtcgcaactgtagtgtcgctttgttttatgagtgggcgtgtgtataagtaactgaatgcaagtgtggtgtggttttagatgtgaacaactgtggaagtgtcctgtcccatgaatgaaatgaaatccccggcatggccaggtgatagtctgtcc

SEQ ID NO: 68778 - protein, 341 aa, Triticum aestivum
  peptide (1)..(341): Ceres Seq. ID no. 12593500
  misc_feature (87)..(152): Pfam Name: DnaJ domain Pfam Description: DnaJ domain
  misc_feature (88)..(320): Homolog of NCBI NO: 23956266 NR Description: similar to DnaJ protein SB73
  misc_feature (88)..(320): Homolog of NCBI NO: 25513803 NR Description: J domain of DnaJ-like-protein 1 - rat
  misc_feature (88)..(320): Homolog of NCBI NO: 34868976 NR Description: similar to J domain of DnaJ-like-protein 1 - rat
  misc_feature (88)..(315): Homolog of NCBI NO: 27597059 NR Description: DnaJ homolog, subfamily C, member 9
  misc_feature (85)..(315): Homolog of NCBI NO: 39794528 NR Description: Unknown (protein for MGC:76175) [Silurana
  misc_feature (88)..(336): Homolog of NCBI NO: 32398706 NR Description: DNAJ protein-like, possible [Cryptosporidium
  misc_feature (83)..(225): Homolog of NCBI NO: 12322012 NR Description: DnaJ protein, putative, 3' partial; 1110-1
  misc_feature (83)..(337): Homolog of NCBI NO: 15230424 NR Description: DnaJ protein, putative; protein id: At3g12170.1
  misc_feature (54)..(337): Homolog of NCBI NO: 2689720 NR Description: DnaJ homologue [Arabidopsis thaliana]
  misc_feature (54)..(337): Homolog of NCBI NO: 15240212 NR Description: DnaJ homologue (gb|AAB91418.1|)
NRKDRDGTGTGVRQFPARGKISRTRARASPAIRKNRTTTVSCSTSPTSAASHRMGRKRRARVSSDSDGDDVEMNGDEPAPAAAESKSLYEILGVASTASQQEIKKAYHKLALRLHPDKNPGDEEANEKFQQLQKVISILGDQEKRALYDETGITDDDALVGEAADNLQAYFRTVYRKVTEADIEEFEAKYRGSDSEKKDLKELYTKFKGNMNRLFCSMICSDAKLDSHRFKDIIDQAIAEGEVKSTKVYAKWAKKISEIEPPTNPLERRVKKKKSQESDLILAISQRREQRKERFDSVLSSIMSKCDDNKAGSSEPTEEEFERARQRLEKKRTKGRKWYES

SEQ ID NO: 68779 - protein, 288 aa, Triticum aestivum
  peptide (1)..(288): Ceres Seq. ID no. 12593501
  misc_feature (34)..(99): Pfam Name: DnaJ domain Pfam Description: DnaJ domain
  misc_feature (35)..(267): Homolog of NCBI NO: 23956266 NR Description: similar to DnaJ protein SB73
  misc_feature (35)..(267): Homolog of NCBI NO: 25513803 NR Description: J domain of DnaJ-like-protein 1 - rat
  misc_feature (35)..(267): Homolog of NCBI NO: 34868976 NR Description: similar to J domain of DnaJ-like-protein 1 - rat
  misc_feature (35)..(262): Homolog of NCBI NO: 27597059 NR Description: DnaJ homolog, subfamily C, member 9
  misc_feature (32)..(262): Homolog of NCBI NO: 39794528 NR Description: Unknown (protein for MGC:76175) [Silurana
  misc_feature (35)..(283): Homolog of NCBI NO: 32398706 NR Description: DNAJ protein-like, possible [Cryptosporidium
  misc_feature (30)..(172): Homolog of NCBI NO: 12322012 NR Description: DnaJ protein, putative, 3' partial; 1110-1
  misc_feature (30)..(284): Homolog of NCBI NO: 15230424 NR Description: DnaJ protein, putative; protein id: At3g12170.1
  misc_feature (1)..(284): Homolog of NCBI NO: 2689720 NR Description: DnaJ homologue [Arabidopsis thaliana]
  misc_feature (1)..(284): Homolog of NCBI NO: 15240212 NR Description: DnaJ homologue (gb|AAB91418.1|)
MGRKRRARVSSDSDGDDVEMNGDEPAPAAAESKSLYEILGVASTASQQEIKKAYHKLALRLHPDKNPGDEEANEKFQQLQKVISILGDQEKRALYDETGITDDDALVGEAADNLQAYFRTVYRKVTEADIEEFEAKYRGSDSEKKDLKELYTKFKGNMNRLFCSMICSDAKLDSHRFKDIIDQAIAEGEVKSTKVYAKWAKKISEIEPPTNPLERRVKKKKSQESDLILAISQRREQRKERFDSVLSSIMSKCDDNKAGSSEPTEEEFERARQRLEKKRTKGRKWYES

SEQ ID NO: 68780 - protein, 269 aa, Triticum aestivum
  peptide (1)..(269): Ceres Seq. ID no. 12593502
  misc_feature (15)..(80): Pfam Name: DnaJ domain Pfam Description: DnaJ domain
  misc_feature (16)..(248): Homolog of NCBI NO: 23956266 NR Description: similar to DnaJ protein SB73
  misc_feature (16)..(248): Homolog of NCBI NO: 25513803 NR Description: J domain of DnaJ-like-protein 1 - rat
  misc_feature (16)..(248): Homolog of NCBI NO: 34868976 NR Description: similar to J domain of DnaJ-like-protein 1 - rat
  misc_feature (16)..(243): Homolog of NCBI NO: 27597059 NR Description: DnaJ homolog, subfamily C, member 9
  misc_feature (13)..(243): Homolog of NCBI NO: 39794528 NR Description: Unknown (protein for MGC:76175) [Silurana
  misc_feature (16)..(264): Homolog of NCBI NO: 32398706 NR Description: DNAJ protein-like, possible [Cryptosporidium
  misc_feature (11)..(153): Homolog of NCBI NO: 12322012 NR Description: DnaJ protein, putative, 3' partial; 1110-1
  misc_feature (11)..(265): Homolog of NCBI NO: 15230424 NR Description: DnaJ protein, putative; protein id: At3g12170.1
  misc_feature (1)..(265): Homolog of NCBI NO: 2689720 NR Description: DnaJ homologue [Arabidopsis thaliana]
  misc_feature (1)..(265): Homolog of NCBI NO: 15240212 NR Description: DnaJ homologue (gb|AAB91418.1|)
MNGDEPAPAAAESKSLYEILGVASTASQQEIKKAYHKLALRLHPDKNPGDEEANEKFQQLQKVISILGDQEKRALYDETGITDDDALVGEAADNLQAYFRTVYRKVTEADIEEFEAKYRGSDSEKKDLKELYTKFKGNMNRLFCSMICSDAKLDSHRFKDIIDQAIAEGEVKSTKVYAKWAKKISEIEPPTNPLERRVKKKKSQESDLILAISQRREQRKERFDSVLSSIMSKCDDNKAGSSEPTEEEFERARQRLEKKRTKGRKWYES

SEQ ID NO: 68781 - DNA, 1637 bp, Triticum aestivum
  misc_feature (1)..(1637): Ceres Seq. ID no. 13661452
aacccgcgtgctctcgccgcctcctcctccctccccccgcggcgtcgccgaacgaaaccctagctccgtcgcgcccgcccgcgccgtcgtctcgccggagagcggagagggcggagagggagagggagcgggaggcggggatggggaagaagaagaagcgggtggagaaggtgttctgctactactgcgaccgggagttcgacgacgagaagatcctggtgcagcaccagaaggccaagcacttcaagtgccacgtctgccacaagaagctctcgaccgccggcggcatggccatccacgtcctccaggtccacaaggagtccgtcaccaaggttccgaatgccaagcccgagagggattccaccgagatcgagatcttcggcatgcaggggatcccctccgacgtgctcgccgcccactatggggaagaggaagatccttcatcaaaggtggccaaagtagaagtgccgacaataagacctcctattatgcctaattatccgctaggcatgccttttcctcctcggccttatggtgcagcccgccctatgtataatcctgcaatgatggtccgacctccgatttggcctcttcagcagccgcaaccttggtttgctcaacaaccaccggtttcagttcccccaatgatggctgggcaagcaccacagcaaccactattccccattcaaaacatgcccaatcctatgatgacatcagcacctgctaatttacttcagacatcatacgctatgcccaccacaggggttccttcacctgttgcccctcaggcttcccagcttttgtttcccgttaacaccagtggcaatggagcagcaaattcgtcattcagctcgtcaatttcacctgcaactattgcagcaaattctccagcatcagttggtactgcaggatatggctatgtagctaataaccatggtacaggagggccagcaattggacagccacctgcacctgccactaatagtaaaacgtctgctactcaaccagctacgagtgaggtctatctggtgtgggatgatgaagcaatgtcaatggaggaaagaaggttggcgctgcccatgtaccaggtgcatgacgaaactagccagatgagctcggttgatgcagcgttcgatcgaagaatatcagatattacattttctagacaattgacataaacaagctgcgcctggtgttcagtaaacagcttgatgcgattcaccaacgggctcacccgtgcatccatgggagggacgccgtgcaatcggtggtcctggatcccccctgttgttgatctacttagttagtgactggagctaccgcagtggaaagattgtgttggtctgacttggagattttgattcaacatcgtttgtcctgtcttttcgtaccgagagtggaaacctgttagacctagaagtcatttgttccgttgtcgattgactgacgatatgagtatcttcagctctgtaaacctgacgatgagattagcagtgtcttttcagcggctgtgctgctgttgagtaccatatgttgttggcaccgtcattttgccttccgcagcgtgatcatgtatccatggctagcaaaagcaaaagaggtgttgcttgtttcagcaaatttctcatagggaatgc

SEQ ID NO: 68782 - protein, 391 aa, Triticum aestivum
  peptide (1)..(391): Ceres Seq. ID no. 15218781
  misc_feature (81)..(104): Pfam Name: Zinc finger, C2H2 type Pfam Description: Zinc finger, C2H2 type
  misc_feature (130)..(383): Homolog of NCBI NO: 18397747 NR Description: zinc finger protein -related [Arabidopsis
  misc_feature (47)..(281): Homolog of NCBI NO: 19921442 NR Description: CG17912-PA [Drosophila melanogaster]
  misc_feature (47)..(265): Homolog of NCBI NO: 17538210 NR Description: Putative nuclear protein of eukaryotic origin
  misc_feature (47)..(265): Homolog of NCBI NO: 17538208 NR Description: Putative nuclear protein of eukaryotic origin
  misc_feature (47)..(240): Homolog of NCBI NO: 39593757 NR Description: Hypothetical protein CBG06068 [Caenorhabditis
  misc_feature (47)..(295): Homolog of NCBI NO: 31235796 NR Description: ENSANGP00000025039 [Anopheles gambiae]
  misc_feature (47)..(338): Homolog of NCBI NO: 14517410 NR Description: At1g30970/F17F8_14 [Arabidopsis thaliana]
  misc_feature (47)..(338): Homolog of NCBI NO: 9755379 NR Description: F17F8.14 [Arabidopsis thaliana]
  misc_feature (47)..(338): Homolog of NCBI NO: 21553740 NR Description: putative zinc finger protein [Arabidopsis
  misc_feature (47)..(338): Homolog of NCBI NO: 18397747 NR Description: zinc finger protein -related [Arabidopsis
PACSRRLLLPPPAASPNETLAPSRPPAPSSRRRAERAEREREREAGMGKKKKRVEKVFCYYCDREFDDEKILVQHQKAKHFKCHVCHKKLSTAGGMAIHVLQVHKESVTKVPNAKPERDSTEIEIFGMQGIPSDVLAAHYGEEEDPSSKVAKVEVPTIRPPIMPNYPLGMPFPPRPYGAARPMYNPAMMVRPPIWPLQQPQPWFAQQPPVSVPPMMAGQAPQQPLFPIQNMPNPMMTSAPANLLQTSYAMPTTGVPSPVAPQASQLLFPVNTSGNGAANSSFSSSISPATIAANSPASVGTAGYGYVANNHGTGGPAIGQPPAPATNSKTSATQPATSEVYLVWDDEAMSMEERRLALPMYQVHDETSQMSSVDAAFDRRISDITFSRQLT

SEQ ID NO: 68783 - protein, 345 aa, Triticum aestivum
  peptide (1)..(345): Ceres Seq. ID no. 15218782
  misc_feature (35)..(58): Pfam Name: Zinc finger, C2H2 type Pfam Description: Zinc finger, C2H2 type
  misc_feature (84)..(337): Homolog of NCBI NO: 18397747 NR Description: zinc finger protein -related [Arabidopsis
  misc_feature (1)..(235): Homolog of NCBI NO: 19921442 NR Description: CG17912-PA [Drosophila melanogaster]
  misc_feature (1)..(219): Homolog of NCBI NO: 17538210 NR Description: Putative nuclear protein of eukaryotic origin
  misc_feature (1)..(219): Homolog of NCBI NO: 17538208 NR Description: Putative nuclear protein of eukaryotic origin
  misc_feature (1)..(194): Homolog of NCBI NO: 39593757 NR Description: Hypothetical protein CBG06068 [Caenorhabditis
  misc_feature (1)..(249): Homolog of NCBI NO: 31235796 NR Description: ENSANGP00000025039 [Anopheles gambiae]
  misc_feature (1)..(292): Homolog of NCBI NO: 14517410 NR Description: At1g30970/F17F8_14 [Arabidopsis thaliana]
  misc_feature (1)..(292): Homolog of NCBI NO: 9755379 NR Description: F17F8.14 [Arabidopsis thaliana]
  misc_feature (1)..(292): Homolog of NCBI NO: 21553740 NR Description: putative zinc finger protein [Arabidopsis
  misc_feature (1)..(292): Homolog of NCBI NO: 18397747 NR Description: zinc finger protein -related [Arabidopsis
MGKKKKRVEKVFCYYCDREFDDEKILVQHQKAKHFKCHVCHKKLSTAGGMAIHVLQVHKESVTKVPNAKPERDSTEIEIFGMQGIPSDVLAAHYGEEEDPSSKVAKVEVPTIRPPIMPNYPLGMPFPPRPYGAARPMYNPAMMVRPPIWPLQQPQPWFAQQPPVSVPPMMAGQAPQQPLFPIQNMPNPMMTSAPANLLQTSYAMPTTGVPSPVAPQASQLLFPVNTSGNGAANSSFSSSISPATIAANSPASVGTAGYGYVANNHGTGGPAIGQPPAPATNSKTSATQPATSEVYLVWDDEAMSMEERRLALPMYQVHDETSQMSSVDAAFDRRISDITFSRQLT

SEQ ID NO: 68784 - protein, 296 aa, Triticum aestivum
  peptide (1)..(296): Ceres Seq. ID no. 15218783
  misc_feature (38)..(236): Pfam Name: Single-stranded DNA binding protein, SSDP Pfam Description: Single-stranded DNA binding protein, SSDP
  misc_feature (35)..(288): Homolog of NCBI NO: 18397747 NR Description: zinc finger protein -related [Arabidopsis
  misc_feature (1)..(186): Homolog of NCBI NO: 19921442 NR Description: CG17912-PA [Drosophila melanogaster]
  misc_feature (1)..(170): Homolog of NCBI NO: 17538210 NR Description: Putative nuclear protein of eukaryotic origin
  misc_feature (1)..(170): Homolog of NCBI NO: 17538208 NR Description: Putative nuclear protein of eukaryotic origin
  misc_feature (1)..(145): Homolog of NCBI NO: 39593757 NR Description: Hypothetical protein CBG06068 [Caenorhabditis
  misc_feature (1)..(200): Homolog of NCBI NO: 31235796 NR Description: ENSANGP00000025039 [Anopheles gambiae]
  misc_feature (1)..(243): Homolog of NCBI NO: 14517410 NR Description: At1g30970/F17F8_14 [Arabidopsis thaliana]
  misc_feature (1)..(243): Homolog of NCBI NO: 9755379 NR Description: F17F8.14 [Arabidopsis thaliana]
  misc_feature (1)..(243): Homolog of NCBI NO: 21553740 NR Description: putative zinc finger protein [Arabidopsis
  misc_feature (1)..(243): Homolog of NCBI NO: 18397747 NR Description: zinc finger protein -related [Arabidopsis
MAIHVLQVHKESVTKVPNAKPERDSTEIEIFGMQGIPSDVLAAHYGEEEDPSSKVAKVEVPTIRPPIMPNYPLGMPFPPRPYGAARPMYNPAMMVRPPIWPLQQPQPWFAQQPPVSVPPMMAGQAPQQPLFPIQNMPNPMMTSAPANLLQTSYAMPTTGVPSPVAPQASQLLFPVNTSGNGAANSSFSSSISPATIAANSPASVGTAGYGYVANNHGTGGPAIGQPPAPATNSKTSATQPATSEVYLVWDDEAMSMEERRLALPMYQVHDETSQMSSVDAAFDRRISDITFSRQLT

SEQ ID NO: 68785 - DNA, 1426 bp, Triticum aestivum
  misc_feature (1)..(1426): Ceres Seq. ID no. 13495341
  misc_feature: Pfam Name: Inositol_P Pfam Description: Inositol monophosphatase family
atcactcatcacaccaacctaaacgaacctttcctgaagcggcggcacggcggcggcgcggccaaaacccgccgaatccagctcgccgcggtggtcgtcaccctccaccgctccctctccgcgcggcgacaccatttaaacctcgccgcctgccgccgcttttttcctcccagatgcttcccccaatctccaccatcccacccacctttccccttccccaccccgccttcacaaaacctagcctcccttaccacctccgctcgccctccctcctggcaaccttctcctcctccgcggcgggtcgggcctgcgggatagcgggccgttggatgggctcggttcgagcctcgccctctgaggcggggggctgggcggtggctgcggcgggtaaggagggggtggacatggagcggctggtggcggtggcgcagagcgcggcggatgcggcgggggaggtgctcaggaagtacttcaggcagcgcttcgagatcatcgacaaagaggaccacagtcccgtcacgatcgctgatagagaagcagaagaagcaatgacctcagtcatactgaagagctttcctactcatgctgttttcggtgaggagaacggttggaggtgtgcagagaagtctgctgactatgtttgggtcttggaccccatagatggaacaaagagcttcataactgggaagcctctttttggtacgcttattgcgcttcttcacaatggaaagccggttatgggcattattgatcagccaatcttgagagagagatgggttggggtggacgggaagaaaactaccttaaatggacaagaaatatctgtccgtccttgcaatgtactggagcaagcttacttatatactacgagtccacatctctttgaaggagatgctgaagatgcattcattcgtgtacgagacaaggtgaaagtcccattgtatggctgtgattgttatgcttatgctctcctggcttctggttttgtggatcttgttgttgaatctggattgaagccatacgattttctctcgctggtaccggtgattgaaggagctgggggctcaataactgattgggaagggaacaagctccactggcctgtctcttcggaatctcggccaacaagtttcaacgtggtggcagccggagattcccatgtccatgggcaggccctggcagcgttgcggtggcgctagcctgcctgcagcacggggcggctcctattgtttatttagaaggctgcaactgttattcatctatccaataaaactgagtctgtacgcttcctcagtgggtaaagcaagttgttcacggtgcaccctttactcaataatgatcagtggtttcttgttgtgtgttatgatcagccgttatgtactcagttactcaagtcatttgatgatcgctgagcgacttgattgcc

SEQ ID NO: 68786 - protein, 398 aa, Triticum aestivum
  peptide (1)..(398): Ceres Seq. ID no. 15222951
  misc_feature: Pfam Name: Inositol_P Pfam Description: Inositol monophosphatase family
  misc_feature (146)..(395): Homolog of NCBI NO: 15891078 NR Description: AGR_L_1926p [Agrobacterium tumefaciens]
  misc_feature (146)..(395): Homolog of NCBI NO: 22962885 NR Description: hypothetical protein [Rhodopseudomonas palustris]
  misc_feature (146)..(395): Homolog of NCBI NO: 27382842 NR Description: inositol monophosphatase family protein
  misc_feature (146)..(398): Homolog of NCBI NO: 15966578 NR Description: PUTATIVE MONOPHOSPHATASE PROTEIN [Sinorhizobium
  misc_feature (119)..(364): Homolog of NCBI NO: 22959506 NR Description: hypothetical protein [Rhodobacter sphaeroides]
  misc_feature (135)..(395): Homolog of NCBI NO: 22967233 NR Description: hypothetical protein [Rhodospirillum rubrum]
  misc_feature (139)..(395): Homolog of NCBI NO: 23015473 NR Description: hypothetical protein [Magnetospirillum
  misc_feature (134)..(397): Homolog of NCBI NO: 7487342 NR Description: hypothetical protein T22F8.20 - Arabidopsis
  misc_feature (65)..(397): Homolog of NCBI NO: 30692186 NR Description: Inositol monophosphatase - like protein
  misc_feature (58)..(397): Homolog of NCBI NO: 34394555 NR Description: putative N-amidino-scyllo-inosamine-4-phosphate
HSSHQPKRTFPEAAARRRRGQNPPNPARRGGRHPPPLPLRAATPFKPRRLPPLFSSQMLPPISTIPPTFPLPHPAFTKPSLPYHLRSPSLLATFSSSAAGRACGIAGRWMGSVRASPSEAGGWAVAAAGKEGVDMERLVAVAQSAADAAGEVLRKYFRQRFEIIDKEDHSPVTIADREAEEAMTSVILKSFPTHAVFGEENGWRCAEKSADYVWVLDPIDGTKSFITGKPLFGTLIALLHNGKPVMGIIDQPILRERWVGVDGKKTTLNGQEISVRPCNVLEQAYLYTTSPHLFEGDAEDAFIRVRDKVKVPLYGCDCYAYALLASGFVDLVVESGLKPYDFLSLVPVIEGAGGSITDWEGNKLHWPVSSESRPTSFNVVAAGDSHVHGQALAALRWR

SEQ ID NO: 68787 - protein, 341 aa, Triticum aestivum
  peptide (1)..(341): Ceres Seq. ID no. 15222952
  misc_feature: Pfam Name: Inositol_P Pfam Description: Inositol monophosphatase family
  misc_feature (89)..(338): Homolog of NCBI NO: 15891078 NR Description: AGR_L_1926p [Agrobacterium tumefaciens]
  misc_feature (89)..(338): Homolog of NCBI NO: 22962885 NR Description: hypothetical protein [Rhodopseudomonas palustris]
  misc_feature (89)..(338): Homolog of NCBI NO: 27382842 NR Description: inositol monophosphatase family protein
  misc_feature (89)..(341): Homolog of NCBI NO: 15966578 NR Description: PUTATIVE MONOPHOSPHATASE PROTEIN [Sinorhizobium
  misc_feature (62)..(307): Homolog of NCBI NO: 22959506 NR Description: hypothetical protein [Rhodobacter sphaeroides]
  misc_feature (78)..(338): Homolog of NCBI NO: 22967233 NR Description: hypothetical protein [Rhodospirillum rubrum]
  misc_feature (82)..(338): Homolog of NCBI NO: 23015473 NR Description: hypothetical protein [Magnetospirillum
  misc_feature (77)..(340): Homolog of NCBI NO: 7487342 NR Description: hypothetical protein T22F8.20 - Arabidopsis
  misc_feature (8)..(340): Homolog of NCBI NO: 30692186 NR Description: Inositol monophosphatase - like protein
  misc_feature (1)..(340): Homolog of NCBI NO: 34394555 NR Description: putative N-amidino-scyllo-inosamine-4-phosphate
MLPPISTIPPTFPLPHPAFTKPSLPYHLRSPSLLATFSSSAAGRACGIAGRWMGSVRASPSEAGGWAVAAAGKEGVDMERLVAVAQSAADAAGEVLRKYFRQRFEIIDKEDHSPVTIADREAEEAMTSVILKSFPTHAVFGEENGWRCAEKSADYVWVLDPIDGTKSFITGKPLFGTLIALLHNGKPVMGIIDQPILRERWVGVDGKKTTLNGQEISVRPCNVLEQAYLYTTSPHLFEGDAEDAFIRVRDKVKVPLYGCDCYAYALLASGFVDLVVESGLKPYDFLSLVPVIEGAGGSITDWEGNKLHWPVSSESRPTSFNVVAAGDSHVHGQALAALRWR

SEQ ID NO: 68788 - protein, 289 aa, Triticum aestivum
  peptide (1)..(289): Ceres Seq. ID no. 15222953
  misc_feature: Pfam Name: Inositol_P Pfam Description: Inositol monophosphatase family
  misc_feature (37)..(286): Homolog of NCBI NO: 15891078 NR Description: AGR_L_1926p [Agrobacterium tumefaciens]
  misc_feature (37)..(286): Homolog of NCBI NO: 22962885 NR Description: hypothetical protein [Rhodopseudomonas palustris]
  misc_feature (37)..(286): Homolog of NCBI NO: 27382842 NR Description: inositol monophosphatase family protein
  misc_feature (37)..(289): Homolog of NCBI NO: 15966578 NR Description: PUTATIVE MONOPHOSPHATASE PROTEIN [Sinorhizobium
  misc_feature (10)..(255): Homolog of NCBI NO: 22959506 NR Description: hypothetical protein [Rhodobacter sphaeroides]
  misc_feature (26)..(286): Homolog of NCBI NO: 22967233 NR Description: hypothetical protein [Rhodospirillum rubrum]
  misc_feature (30)..(286): Homolog of NCBI NO: 23015473 NR Description: hypothetical protein [Magnetospirillum
  misc_feature (25)..(288): Homolog of NCBI NO: 7487342 NR Description: hypothetical protein T22F8.20 - Arabidopsis
  misc_feature (1)..(288): Homolog of NCBI NO: 30692186 NR Description: Inositol monophosphatase - like protein
  misc_feature (1)..(288): Homolog of NCBI NO: 34394555 NR Description: putative N-amidino-scyllo-inosamine-4-phosphate
MGSVRASPSEAGGWAVAAAGKEGVDMERLVAVAQSAADAAGEVLRKYFRQRFEIIDKEDHSPVTIADREAEEAMTSVILKSFPTHAVFGEENGWRCAEKSADYVWVLDPIDGTKSFITGKPLFGTLIALLHNGKPVMGIIDQPILRERWVGVDGKKTTLNGQEISVRPCNVLEQAYLYTTSPHLFEGDAEDAFIRVRDKVKVPLYGCDCYAYALLASGFVDLVVESGLKPYDFLSLVPVIEGAGGSITDWEGNKLHWPVSSESRPTSFNVVAAGDSHVHGQALAALRWR

SEQ ID NO: 68789 - DNA, 1341 bp, Triticum aestivum
  misc_feature (1)..(1341): Ceres Seq. ID no. 13596228
aagtattaaaagcttgagagggattcggagaccatttgcaaggatgtgttcttcgtacttgaccgtgcaatcatatgcaatgatgtgtcttctcgtcaggtagaagtagctagctggagatcgagcgagcatggatgactcgaacatgttcatccagtgggcaatggagacgcttgagcaggagcaggacggcgccgccaccggacacgtcttcccgtcgtcactcctagagctcgacaactcggcggcgctgcagaacggcacgcacatggcggcccaccgacacggagccaccgacagctggagctcaggcgacagtggcgccgcggtggccgtggagaacgacggctggtcgtccaactgcagcaccaactacccggccgcgagctggaacttcatctcggccataccgcagccgcccagcattatcgaggccaccccgagcccacccgcagctcccagccacgtcgtgccggagctggcgcacaggtcgccaccgtcgaggaaatcctcaggcgycagtacagggacggtgccgaccgtgcaggaacacgtcatggcggagcggaagcgccgggagaagatcaaccgacgcttcatcgagctctccaccgtcatccccggcctcaagaagatggacaaggcgaccatcttgtcggacgccgtgaggtacgtcaaggagcagcaggagaagctcaaggcactccaggaccgtgacgcgaggagcatcgactcggtggtgctagtgaagaggccgtgcatctccaacggcgatgatggctgcccgtcaccgccgccgtcagcagcagctggaggaggtccgccgacgacaagggtcacgttgccggagatcgaggcgaggatctcggagagcaatgtgatgatgaggatccactgccaggacggcaaaggggtccttgtcacgttgctcgccgaggtcgaggggctccaccttagcatcacacataccaatgtcgtgtctttcccggcttccactctgatcattaacctcatggccaagttagacgagggcttcgccgtcacagcggacgacattgtatggaagctcgactctgctttgcgcggacatcatagcggcaaatgatagttctagctaggagaggaccaataaacatgaagacgcaaaggcttaagaagcggcaagcaggcagctcatgtccaattagcatgttcaattagtgcgtgtgtgtgcgcgcgcgtgcattgtgagttacactaatagtgaccagtgtgaatctcgggcacatgttcaatttagcatgttaccgttttttgggtgcatctgtacgtgtcactacagcatcaaggcgttgatttttt

SEQ ID NO: 68790 - protein, 324 aa, Triticum aestivum
  peptide (1)..(324): Ceres Seq. ID no. 15221815
  misc_feature (139)..(186): Pfam Name: Helix-loop-helix DNA-binding domain Pfam Description: Helix-loop-helix DNA-binding domain
  misc_feature (107)..(297): Homolog of NCBI NO: 29788848 NR Description: putative ammonium transporter
  misc_feature (130)..(130): Xaa is any aa, unknown or other
MDDSNMFIQWAMETLEQEQDGAATGHVFPSSLLELDNSAALQNGTHMAAHRHGATDSWSSGDSGAAVAVENDGWSSNCSTNYPAASWNFISAIPQPPSIIEATPSPPAAPSHVVPELAHRSPPSRKSSGXSTGTVPTVQEHVMAERKRREKINRRFIELSTVIPGLKKMDKATILSDAVRYVKEQQEKLKALQDRDARSIDSVVLVKRPCISNGDDGCPSPPPSAAAGGGPPTTRVTLPEIEARISESNVMMRIHCQDGKGVLVTLLAEVEGLHLSITHTNVVSFPASTLIINLMAKLDEGFAVTADDIVWKLDSALRGHHSGK

SEQ ID NO: 68791 - protein, 319 aa, Triticum aestivum
  peptide (1)..(319): Ceres Seq. ID no. 15221816
  misc_feature (134)..(181): Pfam Name: Helix-loop-helix DNA-binding domain Pfam Description: Helix-loop-helix DNA-binding domain
  misc_feature (102)..(292): Homolog of NCBI NO: 29788848 NR Description: putative ammonium transporter
  misc_feature (125)..(125): Xaa is any aa, unknown or other
MFIQWAMETLEQEQDGAATGHVFPSSLLELDNSAALQNGTHMAAHRHGATDSWSSGDSGAAVAVENDGWSSNCSTNYPAASWNFISAIPQPPSIIEATPSPPAAPSHVVPELAHRSPPSRKSSGXSTGTVPTVQEHVMAERKRREKINRRFIELSTVIPGLKKMDKATILSDAVRYVKEQQEKLKALQDRDARSIDSVVLVKRPCISNGDDGCPSPPPSAAAGGGPPTTRVTLPEIEARISESNVMMRIHCQDGKGVLVTLLAEVEGLHLSITHTNVVSFPASTLIINLMAKLDEGFAVTADDIVWKLDSALRGHHSGK

SEQ ID NO: 68792 - protein, 313 aa, Triticum aestivum
  peptide (1)..(313): Ceres Seq. ID no. 15221817
  misc_feature (128)..(175): Pfam Name: Helix-loop-helix DNA-binding domain Pfam Description: Helix-loop-helix DNA-binding domain
  misc_feature (96)..(286): Homolog of NCBI NO: 29788848 NR Description: putative ammonium transporter
  misc_feature (119)..(119): Xaa is any aa, unknown or other
METLEQEQDGAATGHVFPSSLLELDNSAALQNGTHMAAHRHGATDSWSSGDSGAAVAVENDGWSSNCSTNYPAASWNFISAIPQPPSIIEATPSPPAAPSHVVPELAHRSPPSRKSSGXSTGTVPTVQEHVMAERKRREKINRRFIELSTVIPGLKKMDKATILSDAVRYVKEQQEKLKALQDRDARSIDSVVLVKRPCISNGDDGCPSPPPSAAAGGGPPTTRVTLPEIEARISESNVMMRIHCQDGKGVLVTLLAEVEGLHLSITHTNVVSFPASTLIINLMAKLDEGFAVTADDIVWKLDSALRGHHSGK

SEQ ID NO: 68793 - DNA, 1463 bp, Triticum aestivum
  misc_feature (1)..(1463): Ceres Seq. ID no. 14302236
gaagccatctcgtacggactccatagctcccacctccaagcacgatcaccagcgagctcccgaaccccatggcaggcggcggcgggaaggtggcgtgcgcggcgtggatccggcgccgggaggacaaggccacccgcgtcttcgcggtgcacggccggccctccccgccggccctggaggttctcggcttcgactccgggagctgctcgctctccgaggagcccctggcgaggattgtgctcggggacgatccagacgacgcgccgctcgccgtcgcggtgcaccccaccggcgacgagctcgtgtgcaccacggccaaggggtgcaggctatttaaactgatttttgaagagttcaccgttcgctttattgaaagtaaagctccagcgatcgaatctgttggactgcagaaatgtgttgccttcagcacagatggtgctaaatttgctatcggtggtgaggatgggcatctaagaatatttcattggccaagcatgaaggtgctcttagatgaacccaacgctcataaatccttcagagacatggatatcagcttagattcagagtttttagtttcatcgtctactgatggcactgcaagaatttggaagataaatgagggggtaccattggtcaacttgactcgatcttcggacgagaagattgagtgttgccgcttttctagggatggcatgaaaccgttcctgttttgcacagttgcaaaaggtagcaaagctgtgactgttgtttggaacataagtgattggtctagaattgggtacaaaagactactgggaaaacctgcctccacactttcagttagcttggatgggaaatttctggctttaggaaaccaggatggtgatttttgtgttgtggatgtaaaggagatggagatttctcactggagcaagaaggtccatcttggttcccctatatgcggaattgaattttgtcctactgaaagagttgtaatctccacatcgccacagtggggagcagagctgacaagactgaatgtgcctgctgactggaaagaatggcaaatctggctcatactcttggcgctcttccttgcatcagccgtcctgttctacgtattctaccagaactccggttccttctggagcggaacgccccgacgggacgtcatcgacctaccaagccatgcagagttctgaacgagcctcctcggtctcgtgaaaaccaaaactcctggtgaaactgttcaccagtgtgattccctttcaagcaatccagcactgcagtgttatttatttcattcataccaagagctctttctttctttactagtgtagtcaatgttgtatcaatccagtggcgcgcctatctatctggcgacgtcagtatttatcggggggaacactgtaaaatgacactgtaaatgataatagttcgagaatgtcatcgagtgttaatgggacattcaagatcgccaactg

SEQ ID NO: 68794 - protein, 370 aa, Triticum aestivum
  peptide (1)..(370): Ceres Seq. ID no. 14302237
  misc_feature (145)..(181): Pfam Name: WD domain, G-beta repeat Pfam Description: WD domain, G-beta repeat
  misc_feature (42)..(207): Homolog of NCBI NO: 17473926 NR Description: putative protein transport protein SEC12p
  misc_feature (42)..(321): Homolog of NCBI NO: 322598 NR Description: St12p protein - Arabidopsis thaliana
  misc_feature (42)..(343): Homolog of NCBI NO: 15226281 NR Description: SEC12p protein / St12p protein [Arabidopsis
  misc_feature (42)..(343): Homolog of NCBI NO: 11358859 NR Description: St12p protein [imported] - Arabidopsis thaliana
  misc_feature (29)..(314): Homolog of NCBI NO: 8777388 NR Description: protein transport protein SEC12p-like
  misc_feature (29)..(344): Homolog of NCBI NO: 18423177 NR Description: St12p protein [Arabidopsis thaliana]
  misc_feature (117)..(353): Homolog of NCBI NO: 26450470 NR Description: unknown protein [Arabidopsis thaliana]
  misc_feature (6)..(353): Homolog of NCBI NO: 18409509 NR Description: transducin / WD-40 repeat protein family
  misc_feature (4)..(348): Homolog of NCBI NO: 34897162 NR Description: putative membrane protein
  misc_feature (1)..(354): Homolog of NCBI NO: 34394605 NR Description: transducin / WD-40 repeat protein-like
MAGGGGKVACAAWIRRREDKATRVFAVHGRPSPPALEVLGFDSGSCSLSEEPLARIVLGDDPDDAPLAVAVHPTGDELVCTTAKGCRLFKLIFEEFTVRFIESKAPAIESVGLQKCVAFSTDGAKFAIGGEDGHLRIFHWPSMKVLLDEPNAHKSFRDMDISLDSEFLVSSSTDGTARIWKINEGVPLVNLTRSSDEKIECCRFSRDGMKPFLFCTVAKGSKAVTVVWNISDWSRIGYKRLLGKPASTLSVSLDGKFLALGNQDGDFCVVDVKEMEISHWSKKVHLGSPICGIEFCPTERVVISTSPQWGAELTRLNVPADWKEWQIWLILLALFLASAVLFYVFYQNSGSFWSGTPRRDVIDLPSHAEF

SEQ ID NO: 68795 - protein, 228 aa, Triticum aestivum
  peptide (1)..(228): Ceres Seq. ID no. 14302238
  misc_feature (3)..(39): Pfam Name: WD domain, G-beta repeat Pfam Description: WD domain, G-beta repeat
  misc_feature (1)..(65): Homolog of NCBI NO: 17473926 NR Description: putative protein transport protein SEC12p
  misc_feature (1)..(179): Homolog of NCBI NO: 322598 NR Description: St12p protein - Arabidopsis thaliana
  misc_feature (1)..(201): Homolog of NCBI NO: 15226281 NR Description: SEC12p protein / St12p protein [Arabidopsis
  misc_feature (1)..(201): Homolog of NCBI NO: 11358859 NR Description: St12p protein [imported] - Arabidopsis thaliana
  misc_feature (1)..(172): Homolog of NCBI NO: 8777388 NR Description: protein transport protein SEC12p-like
  misc_feature (1)..(202): Homolog of NCBI NO: 18423177 NR Description: St12p protein [Arabidopsis thaliana]
  misc_feature (1)..(211): Homolog of NCBI NO: 26450470 NR Description: unknown protein [Arabidopsis thaliana]
  misc_feature (1)..(211): Homolog of NCBI NO: 18409509 NR Description: transducin / WD-40 repeat protein family
  misc_feature (1)..(206): Homolog of NCBI NO: 34897162 NR Description: putative membrane protein
  misc_feature (1)..(212): Homolog of NCBI NO: 34394605 NR Description: transducin / WD-40 repeat protein-like
MKVLLDEPNAHKSFRDMDISLDSEFLVSSSTDGTARIWKINEGVPLVNLTRSSDEKIECCRFSRDGMKPFLFCTVAKGSKAVTVVWNISDWSRIGYKRLLGKPASTLSVSLDGKFLALGNQDGDFCVVDVKEMEISHWSKKVHLGSPICGIEFCPTERVVISTSPQWGAELTRLNVPADWKEWQIWLILLALFLASAVLFYVFYQNSGSFWSGTPRRDVIDLPSHAEF

SEQ ID NO: 68796 - protein, 212 aa, Triticum aestivum
  peptide (1)..(212): Ceres Seq. ID no. 14302239
  misc_feature (1)..(49): Homolog of NCBI NO: 17473926 NR Description: putative protein transport protein SEC12p
  misc_feature (1)..(163): Homolog of NCBI NO: 322598 NR Description: St12p protein - Arabidopsis thaliana
  misc_feature (1)..(185): Homolog of NCBI NO: 15226281 NR Description: SEC12p protein / St12p protein [Arabidopsis
  misc_feature (1)..(185): Homolog of NCBI NO: 11358859 NR Description: St12p protein [imported] - Arabidopsis thaliana
  misc_feature (1)..(156): Homolog of NCBI NO: 8777388 NR Description: protein transport protein SEC12p-like
  misc_feature (1)..(186): Homolog of NCBI NO: 18423177 NR Description: St12p protein [Arabidopsis thaliana]
  misc_feature (1)..(195): Homolog of NCBI NO: 26450470 NR Description: unknown protein [Arabidopsis thaliana]
  misc_feature (1)..(195): Homolog of NCBI NO: 18409509 NR Description: transducin / WD-40 repeat protein family
  misc_feature (1)..(190): Homolog of NCBI NO: 34897162 NR Description: putative membrane protein
  misc_feature (1)..(196): Homolog of NCBI NO: 34394605 NR Description: transducin / WD-40 repeat protein-like
MDISLDSEFLVSSSTDGTARIWKINEGVPLVNLTRSSDEKIECCRFSRDGMKPFLFCTVAKGSKAVTVVWNISDWSRIGYKRLLGKPASTLSVSLDGKFLALGNQDGDFCVVDVKEMEISHWSKKVHLGSPICGIEFCPTERVVISTSPQWGAELTRLNVPADWKEWQIWLILLALFLASAVLFYVFYQNSGSFWSGTPRRDVIDLPSHAEF

SEQ ID NO: 68797 - DNA, 1170 bp, Triticum aestivum
  misc_feature (1)..(1170): Ceres Seq. ID no. 12625248
atcagttagattagggtttctggtcggctagttcatacggcgaggagcacgggaagggaggcggagctcgggagaagagatgggtgcgccgaagcagaagtggacgtcggaggaggaggaggcgctgcggcgcggcgtgctcaagcatggcgctggcaagtggcgcaccatccagaaggaccccgagttcagccccgtcctttcctctcgctccaacatcgacctcaaggacaaatggaggaatttgagttttagtgcaagtggactaggttcaagggataaacaaagggttccaaggccgaaagcaccttcgtcctccccatcacctagcccgcagcttctgcttctcccagcaacgaataatgttgctgaggcttctccaccagaagattgtgaaaagagcccacaggatgacaagactccaagtccaaagtacagttccatgatcctggaagctctcggcgaactgaaagagccaaatggttcagaagttactacaatttgcaatttcatagagattgataagtcctataagctgacggattcatatgcaaaaagggctctggctccaatgaaagatccatctctaaagaagaaggattcagccaagtcatccaaggcagcaaagggtcaaggcctgtttaccgctgcgagccctgcactgggcgcggctgaagctgcagcgacgaaagtagccgatgcggaggccaaatcgcacctcgcaaacgagcacatgatggaggttgaaaggatcggcaagatggccgaggagaccgagtctctcctcgagctcgcctcagagctctacgagcgatgttcaagaggagaggtgctcacaatactgcaagtggcgcacagggagttttgatggtgttgtcgacccccgtcagctgcgcgccgacatctgctctcttgtacatggatggatggaagcgttggcccagcctgttgtcttcttgcccgcgtgttgtctctgtgttgtatcataactcgaatcaattcgttggttgtacctgagaggccattcctttcattgcctaggaatgattttaagttggtgcattttggatgctgtcctgtgttgaaatcagggaataatgtgtatctcgtcctgccgccttttcctgtatgtactctaatgcaagtttggtcatatgctccctccttggc

SEQ ID NO: 68798 - protein, 262 aa, Triticum aestivum
  peptide (1)..(262): Ceres Seq. ID no. 12625249
  misc_feature (5)..(57): Pfam Name: Myb-like DNA-binding domain Pfam Description: Myb-like DNA-binding domain
  misc_feature (1)..(146): Homolog of NCBI NO: 18402853 NR Description: DNA-binding protein PcMYB1, putative
  misc_feature (1)..(248): Homolog of NCBI NO: 34912214 NR Description: putative telomere repeat binding factor
  misc_feature (146)..(262): Homolog of NCBI NO: 34910440 NR Description: histone H1-like protein [Oryza sativa (japonica
  misc_feature (146)..(262): Homolog of NCBI NO: 27125811 NR Description: MYB28 protein [Oryza sativa (japonica
  misc_feature (1)..(246): Homolog of NCBI NO: 8778473 NR Description: F1L3.23 [Arabidopsis thaliana]
  misc_feature (1)..(215): Homolog of NCBI NO: 34105721 NR Description: Single myb histone 4 [Zea mays subsp. mays]
  misc_feature (1)..(215): Homolog of NCBI NO: 18463961 NR Description: histone H1-like protein [Zea mays]
  misc_feature (1)..(211): Homolog of NCBI NO: 34105717 NR Description: Single myb histone 3 [Zea mays subsp. mays]
  misc_feature (1)..(193): Homolog of NCBI NO: 27125811 NR Description: MYB28 protein [Oryza sativa (japonica
  misc_feature (1)..(193): Homolog of NCBI NO: 34910440 NR Description: histone H1-like protein [Oryza sativa (japonica
MGAPKQKWTSEEEEALRRGVLKHGAGKWRTIQKDPEFSPVLSSRSNIDLKDKWRNLSFSASGLGSRDKQRVPRPKAPSSSPSPSPQLLLLPATNNVAEASPPEDCEKSPQDDKTPSPKYSSMILEALGELKEPNGSEVTTICNFIEIDKSYKLTDSYAKRALAPMKDPSLKKKDSAKSSKAAKGQGLFTAASPALGAAEAAATKVADAEAKSHLANEHMMEVERIGKMAEETESLLELASELYERCSRGEVLTILQVAHREF

SEQ ID NO: 68799 - protein, 141 aa, Triticum aestivum
  peptide (1)..(141): Ceres Seq. ID no. 12625250
  misc_feature (1)..(25): Homolog of NCBI NO: 18402853 NR Description: DNA-binding protein PcMYB1, putative
  misc_feature (1)..(127): Homolog of NCBI NO: 34912214 NR Description: putative telomere repeat binding factor
  misc_feature (25)..(141): Homolog of NCBI NO: 34910440 NR Description: histone H1-like protein [Oryza sativa (japonica
  misc_feature (25)..(141): Homolog of NCBI NO: 27125811 NR Description: MYB28 protein [Oryza sativa (japonica
  misc_feature (1)..(125): Homolog of NCBI NO: 8778473 NR Description: F1L3.23 [Arabidopsis thaliana]
  misc_feature (1)..(94): Homolog of NCBI NO: 34105721 NR Description: Single myb histone 4 [Zea mays subsp. mays]
  misc_feature (1)..(94): Homolog of NCBI NO: 18463961 NR Description: histone H1-like protein [Zea mays]
  misc_feature (1)..(90): Homolog of NCBI NO: 34105717 NR Description: Single myb histone 3 [Zea mays subsp. mays]
  misc_feature (1)..(72): Homolog of NCBI NO: 27125811 NR Description: MYB28 protein [Oryza sativa (japonica
  misc_feature (1)..(72): Homolog of NCBI NO: 34910440 NR Description: histone H1-like protein [Oryza sativa (japonica
MILEALGELKEPNGSEVTTICNFIEIDKSYKLTDSYAKRALAPMKDPSLKKKDSAKSSKAAKGQGLFTAASPALGAAEAAATKVADAEAKSHLANEHMMEVERIGKMAEETESLLELASELYERCSRGEVLTILQVAHREF

SEQ ID NO: 68800 - DNA, 1349 bp, Triticum aestivum
  misc_feature (1)..(1349): Ceres Seq. ID no. 13596229
gtccccgtcccctcgcttccaagctactaccccgagcgcgcgagagcgagagcgagccagccagcgccacttgactccagctccttccttccctccccatccttccgtcctcggcttgcacatcacatcgcgtcaccggagccagctacgagcgcgtgagaccagcagcgggacagcatggaggggggcggcgaggggaagggccgggcggcgccggcgacggcggcggggggagggttcggagggtacgagtcggccggggaccgcaagtggtggccctggctcgtgcccaccgtcatcgtcgcctgcgtcgccgtcttcgtcgtcgagatgtgggtcaacgactgccccaggcacggcagcgcgctcggcggcggctgcgtcgcgggattcctccggcgattctccttccagccgctccgcgagaacccgctcctcgggccctcctccaccactttggggaaaatgggagctctggactggaacaaggttgtccatcagcaccaggggtggcgtctcattagctgcatctggctccatgctggcctgatccatttggttgtgaacatgctaagtctgctgtttattgggattcgtcttgagcagcaatttgggtttgttcgcattggcgctatctacctactgtctggtttcggtggcagcgtgatgtctgcactcttcctacgaaataactacatctctgttggtgcatctggagctttatttgggctgcttggatctatgctttctgagctacttatgaactggactatttactccaacaaggttgcagccataataacccttctgtttataatcgcgatcaacgtggcaatcgggatactaccgcatgctgataactttgctcacattggtggattcctgaccgggttccttttggggttcgttctgctggcaaggccacaattcggttggttggaacgcagcgagctgccccataccaatcagccccccaagtacaaaccataccaatatgtcctgtgggttgtggcactcgtcttgctgcttgtcgggttcacgctttcgttggtgatgctcttcaagggcaagaacgggaatgacggctgccactggtgccactacctgaactgtgtgccgacgtcgaggtggaagtgcgatacctaggcggttccttctttcggttttcgacgaaaacccgtagtgttgtgaggaccattttcatgcttttatgtttgtagataggaacttgttctttagtgaactctgtaaatttgtttggcaggctctgtaagtttgtaactcgagcactctccagtgatttcatgcgtgtttttgtgttaaaaaaaaaaaaaaaaaaaaaaaaaaaa

SEQ ID NO: 68801 - protein, 322 aa, Triticum aestivum
  peptide (1)..(322): Ceres Seq. ID no. 13596230
  misc_feature (23)..(318): Homolog of NCBI NO: 15236387 NR Description: membrane protein, Rhomboid family [Arabidopsis
  misc_feature (30)..(321): Homolog of NCBI NO: 11357824 NR Description: hypothetical protein F5K20.80 - Arabidopsis
  misc_feature (5)..(321): Homolog of NCBI NO: 38344377 NR Description: OSJNBb0032E06.11 [Oryza sativa (japonica
  misc_feature (1)..(320): Homolog of NCBI NO: 37536172 NR Description: putative membrane protein
  misc_feature (30)..(321): Homolog of NCBI NO: 30693911 NR Description: membrane protein, Rhomboid family [Arabidopsis
  misc_feature (23)..(320): Homolog of NCBI NO: 25402744 NR Description: protein T12C24.28 [imported] - Arabidopsis
  misc_feature (23)..(320): Homolog of NCBI NO: 15222058 NR Description: membrane protein, Rhomboid family [Arabidopsis
  misc_feature (25)..(320): Homolog of NCBI NO: 15221690 NR Description: membrane protein, Rhomboid family [Arabidopsis
  misc_feature (4)..(321): Homolog of NCBI NO: 15240744 NR Description: membrane protein, Rhomboid family [Arabidopsis
  misc_feature (1)..(322): Homolog of NCBI NO: 294845 NR Description: membrane protein [Saccharum hybrid cultivar
MEGGGEGKGRAAPATAAGGGFGGYESAGDRKWWPWLVPTVIVACVAVFVVEMWVNDCPRHGSALGGGCVAGFLRRFSFQPLRENPLLGPSSTTLGKMGALDWNKVVHQHQGWRLISCIWLHAGLIHLVVNMLSLLFIGIRLEQQFGFVRIGAIYLLSGFGGSVMSALFLRNNYISVGASGALFGLLGSMLSELLMNWTIYSNKVAAIITLLFIIAINVAIGILPHADNFAHIGGFLTGFLLGFVLLARPQFGWLERSELPHTNQPPKYKPYQYVLWVVALVLLLVGFTLSLVMLFKGKNGNDGCHWCHYLNCVPTSRWKCDT

SEQ ID NO: 68802 - protein, 271 aa, Triticum aestivum
  peptide (1)..(271): Ceres Seq. ID no. 13596231
  misc_feature (1)..(267): Homolog of NCBI NO: 15236387 NR Description: membrane protein, Rhomboid family [Arabidopsis
  misc_feature (1)..(270): Homolog of NCBI NO: 11357824 NR Description: hypothetical protein F5K20.80 - Arabidopsis
  misc_feature (1)..(270): Homolog of NCBI NO: 38344377 NR Description: OSJNBb0032E06.11 [Oryza sativa (japonica
  misc_feature (1)..(269): Homolog of NCBI NO: 37536172 NR Description: putative membrane protein
  misc_feature (1)..(270): Homolog of NCBI NO: 30693911 NR Description: membrane protein, Rhomboid family [Arabidopsis
  misc_feature (1)..(269): Homolog of NCBI NO: 25402744 NR Description: protein T12C24.28 [imported] - Arabidopsis
  misc_feature (1)..(269): Homolog of NCBI NO: 15222058 NR Description: membrane protein, Rhomboid family [Arabidopsis
  misc_feature (1)..(269): Homolog of NCBI NO: 15221690 NR Description: membrane protein, Rhomboid family [Arabidopsis
  misc_feature (1)..(270): Homolog of NCBI NO: 15240744 NR Description: membrane protein, Rhomboid family [Arabidopsis
  misc_feature (1)..(271): Homolog of NCBI NO: 294845 NR Description: membrane protein [Saccharum hybrid cultivar
MWVNDCPRHGSALGGGCVAGFLRRFSFQPLRENPLLGPSSTTLGKMGALDWNKVVHQHQGWRLISCIWLHAGLIHLVVNMLSLLFIGIRLEQQFGFVRIGAIYLLSGFGGSVMSALFLRNNYISVGASGALFGLLGSMLSELLMNWTIYSNKVAAIITLLFIIAINVAIGILPHADNFAHIGGFLTGFLLGFVLLARPQFGWLERSELPHTNQPPKYKPYQYVLWVVALVLLLVGFTLSLVMLFKGKNGNDGCHWCHYLNCVPTSRWKCDT

SEQ ID NO: 68803 - protein, 226 aa, Triticum aestivum
  peptide (1)..(226): Ceres Seq. ID no. 13596232
  misc_feature (1)..(222): Homolog of NCBI NO: 15236387 NR Description: membrane protein, Rhomboid family [Arabidopsis
  misc_feature (1)..(225): Homolog of NCBI NO: 11357824 NR Description: hypothetical protein F5K20.80 - Arabidopsis
  misc_feature (1)..(225): Homolog of NCBI NO: 38344377 NR Description: OSJNBb0032E06.11 [Oryza sativa (japonica
  misc_feature (1)..(224): Homolog of NCBI NO: 37536172 NR Description: putative membrane protein
  misc_feature (1)..(225): Homolog of NCBI NO: 30693911 NR Description: membrane protein, Rhomboid family [Arabidopsis
  misc_feature (1)..(224): Homolog of NCBI NO: 25402744 NR Description: protein T12C24.28 [imported] - Arabidopsis
  misc_feature (1)..(224): Homolog of NCBI NO: 15222058 NR Description: membrane protein, Rhomboid family [Arabidopsis
  misc_feature (1)..(224): Homolog of NCBI NO: 15221690 NR Description: membrane protein, Rhomboid family [Arabidopsis
  misc_feature (1)..(225): Homolog of NCBI NO: 15240744 NR Description: membrane protein, Rhomboid family [Arabidopsis
  misc_feature (1)..(226): Homolog of NCBI NO: 294845 NR Description: membrane protein [Saccharum hybrid cultivar
MGALDWNKVVHQHQGWRLISCIWLHAGLIHLVVNMLSLLFIGIRLEQQFGFVRIGAIYLLSGFGGSVMSALFLRNNYISVGASGALFGLLGSMLSELLMNWTIYSNKVAAIITLLFIIAINVAIGILPHADNFAHIGGFLTGFLLGFVLLARPQFGWLERSELPHTNQPPKYKPYQYVLWVVALVLLLVGFTLSLVMLFKGKNGNDGCHWCHYLNCVPTSRWKCDT

SEQ ID NO: 68804 - DNA, 897 bp, Triticum aestivum
  misc_feature (1)..(897): Ceres Seq. ID no. 12614309
acatcccgacgaattattttcctgaacctaattattcgcggcgctcggtcccacttcgcggcagaagaacaccgccgccgccgccgccgccgccgccgccgtcacaggaattccttgccatggagggcgttggcgcgcggttagggcgctcgtcggcccgttacggccccgcgatgacgttcaccgggcctgttaggaagtggcggaaggaatgggtcaccatctccgccgccacggccacggccacctccgccgcggcctcctccaccgggactggatctcgtggaaataacctcatcctgttcaagtggaccccgctgaacggcgccaacgaacgagatgaggagcagacggcaccggcgaagacggccacgagaaggcggctgtacgtgccggtttctgtagttcaagatcaaaggcaagaatctgccaaatctgatgatgagaacaaggctaatgatggagaaccttcatctacggaaactgagcagtctattgggaaaactaatatggatgatatacttatggatgagtcccaggcatcagatgaggttcgagattctggaaatttcgttggtggaactgatctaaatctgaacttaggtccaaaagaccccgacggtgaagatgaaggtgatacaggtgagcaacacgaggttcgaacagaacacagattgaagaggaaatctgttacccctgacctcgagatgagaatgtaacaggcggcttcatttattccttggattctttattattacagtttcccttttgggccatttatgtaattttcttgacatactgtatacgtggagagacaagtcaacagaatcacaactacatagtgaaacgcgcattgtgttgccaaataacgttaatgaaacttttctttcgttttgc

SEQ ID NO: 68805 - protein, 238 aa, Triticum aestivum
  peptide (1)..(238): Ceres Seq. ID no. 12614310
  misc_feature (40)..(197): Homolog of NCBI NO: 15240476 NR Description: putative protein; protein id: At5g55210.1
  misc_feature (40)..(183): Homolog of NCBI NO: 30685783 NR Description: expressed protein [Arabidopsis thaliana]
  misc_feature (40)..(183): Homolog of NCBI NO: 7486827 NR Description: hypothetical protein T10I14.150 - Arabidopsis
IPTNYFPEPNYSRRSVPLRGRRTPPPPPPPPPPSQEFLAMEGVGARLGRSSARYGPAMTFTGPVRKWRKEWVTISAATATATSAAASSTGTGSRGNNLILFKWTPLNGANERDEEQTAPAKTATRRRLYVPVSVVQDQRQESAKSDDENKANDGEPSSTETEQSIGKTNMDDILMDESQASDEVRDSGNFVGGTDLNLNLGPKDPDGEDEGDTGEQHEVRTEHRLKRKSVTPDLEMRM

SEQ ID NO: 68806 - protein, 199 aa, Triticum aestivum
  peptide (1)..(199): Ceres Seq. ID no. 12614311
  misc_feature (1)..(158): Homolog of NCBI NO: 15240476 NR Description: putative protein; protein id: At5g55210.1
  misc_feature (1)..(144): Homolog of NCBI NO: 30685783 NR Description: expressed protein [Arabidopsis thaliana]
  misc_feature (1)..(144): Homolog of NCBI NO: 7486827 NR Description: hypothetical protein T10I14.150 - Arabidopsis
MEGVGARLGRSSARYGPAMTFTGPVRKWRKEWVTISAATATATSAAASSTGTGSRGNNLILFKWTPLNGANERDEEQTAPAKTATRRRLYVPVSVVQDQRQESAKSDDENKANDGEPSSTETEQSIGKTNMDDILMDESQASDEVRDSGNFVGGTDLNLNLGPKDPDGEDEGDTGEQHEVRTEHRLKRKSVTPDLEMRM

SEQ ID NO: 68807 - protein, 181 aa, Triticum aestivum
  peptide (1)..(181): Ceres Seq. ID no. 12614312
  misc_feature (1)..(140): Homolog of NCBI NO: 15240476 NR Description: putative protein; protein id: At5g55210.1
  misc_feature (1)..(126): Homolog of NCBI NO: 30685783 NR Description: expressed protein [Arabidopsis thaliana]
  misc_feature (1)..(126): Homolog of NCBI NO: 7486827 NR Description: hypothetical protein T10I14.150 - Arabidopsis
MTFTGPVRKWRKEWVTISAATATATSAAASSTGTGSRGNNLILFKWTPLNGANERDEEQTAPAKTATRRRLYVPVSVVQDQRQESAKSDDENKANDGEPSSTETEQSIGKTNMDDILMDESQASDEVRDSGNFVGGTDLNLNLGPKDPDGEDEGDTGEQHEVRTEHRLKRKSVTPDLEMRM

SEQ ID NO: 68808 - DNA, 1243 bp, Triticum aestivum
  misc_feature (1)..(1243): Ceres Seq. ID no. 12614809
aacatccaatcgaaaaacacactgttaacctcggtagcagaggcatcactccacagcttgcctgcaagccatcttctccacgattccgctcacggttcatcggttgccacccgattctggtgcgccgtcgcagagcggcgaagatggccaccaaggggcgcaaggtcgtcgaggtccgtgacgcgagcaggacggacgggaagggcgacgccgcggacgtccacgtcgtccgcgaggggaagagcgaccacgacaccgccggcggcgtcggccaccgcggcgcgagcaggacggacgggcatggcgacgcgggcggcaaggtcggggacttccgcggcatcgacgggaaggactccctgaagatcgtcgcgatgcaggcgccggtcaccgtggagcgccccgtccgcggcgacctcgaggagcacgtccccaagccctatttggcgagggctttggcggctccggacatgtaccacccggaggggacgacggatgatcaccagcaccacaacatgagcgtgctgcagcagcacgtcgccttcttcgaccgcgacaacaacggcatcatctatccctgggagacttacgatggatgccgtgcggttgggttcaacgtgttcatgtccgccttcatcgcgtttctggtgaacctggtcatgagctatcccaccctgcccggttggctgccgaaccctctcttcccgatctacgtgcacaacatccacaagagcaagcacgggagtgattcggggacctatgacaaagagggccggttcatgccggtgaatttcgagaacatcttcagcaagtacgcccgcacgtacccggacaggctcagctacagggagctgtggcggatgaccgaggggtgccgggaggtgttcgatttcttcggctgggtggcgatgaagctggagtggtcgttcctgtacgtgctggctcgggacgacgaagggtacctgtcgagggaggccatccggcgcatgtacgacggcagcctcttcgagtacatggagaggcagcgcatggagcacgtcaagatgtcctagatcacagtcgacggtgaaactcgcatggtcggagctgcacccacctgtgatgctttccgtgtccgtgtgtgtgatgtacagcaggccacagatccatgcggtgtgccgctggtgtggcgaaatgaaaacataaataacgtgatatatgccatggtttaaaaaaaaaaaaaaaaaagcttatcgataccgtcgac

SEQ ID NO: 68809 - protein, 348 aa, Triticum aestivum
  peptide (1)..(348): Ceres Seq. ID no. 12614810
  misc_feature (166)..(336): Pfam Name: Caleosin related protein Pfam Description: Caleosin related protein
  misc_feature (126)..(347): Homolog of NCBI NO: 6478218 NR Description: caleosin [Sesamum indicum]
  misc_feature (112)..(348): Homolog of NCBI NO: 32488447 NR Description: OSJNBa0004N05.4 [Oryza sativa (japonica
  misc_feature (48)..(348): Homolog of NCBI NO: 34538473 NR Description: caleosin 1 [Hordeum vulgare]
HPIEKHTVNLGSRGITPQLACKPSSPRFRSRFIGCHPILVRRRRAAKMATKGRKVVEVRDASRTDGKGDAADVHVVREGKSDHDTAGGVGHRGASRTDGHGDAGGKVGDFRGIDGKDSLKIVAMQAPVTVERPVRGDLEEHVPKPYLARALAAPDMYHPEGTTDDHQHHNMSVLQQHVAFFDRDNNGIIYPWETYDGCRAVGFNVFMSAFIAFLVNLVMSYPTLPGWLPNPLFPIYVHNIHKSKHGSDSGTYDKEGRFMPVNFENIFSKYARTYPDRLSYRELWRMTEGCREVFDFFGWVAMKLEWSFLYVLARDDEGYLSREAIRRMYDGSLFEYMERQRMEHVKMS

SEQ ID NO: 68810 - protein, 301 aa, Triticum aestivum
  peptide (1)..(301): Ceres Seq. ID no. 12614811
  misc_feature (119)..(289): Pfam Name: Caleosin related protein Pfam Description: Caleosin related protein
  misc_feature (79)..(300): Homolog of NCBI NO: 6478218 NR Description: caleosin [Sesamum indicum]
  misc_feature (65)..(301): Homolog of NCBI NO: 32488447 NR Description: OSJNBa0004N05.4 [Oryza sativa (japonica
  misc_feature (1)..(301): Homolog of NCBI NO: 34538473 NR Description: caleosin 1 [Hordeum vulgare]
MATKGRKVVEVRDASRTDGKGDAADVHVVREGKSDHDTAGGVGHRGASRTDGHGDAGGKVGDFRGIDGKDSLKIVAMQAPVTVERPVRGDLEEHVPKPYLARALAAPDMYHPEGTTDDHQHHNMSVLQQHVAFFDRDNNGIIYPWETYDGCRAVGFNVFMSAFIAFLVNLVMSYPTLPGWLPNPLFPIYVHNIHKSKHGSDSGTYDKEGRFMPVNFENIFSKYARTYPDRLSYRELWRMTEGCREVFDFFGWVAMKLEWSFLYVLARDDEGYLSREAIRRMYDGSLFEYMERQRMEHVKMS

SEQ ID NO: 68811 - protein, 225 aa, Triticum aestivum
  peptide (1)..(225): Ceres Seq. ID no. 12614812
  misc_feature (43)..(213): Pfam Name: Caleosin related protein Pfam Description: Caleosin related protein
  misc_feature (3)..(224): Homolog of NCBI NO: 6478218 NR Description: caleosin [Sesamum indicum]
  misc_feature (1)..(225): Homolog of NCBI NO: 32488447 NR Description: OSJNBa0004N05.4 [Oryza sativa (japonica
  misc_feature (1)..(225): Homolog of NCBI NO: 34538473 NR Description: caleosin 1 [Hordeum vulgare]
MQAPVTVERPVRGDLEEHVPKPYLARALAAPDMYHPEGTTDDHQHHNMSVLQQHVAFFDRDNNGIIYPWETYDGCRAVGFNVFMSAFIAFLVNLVMSYPTLPGWLPNPLFPIYVHNIHKSKHGSDSGTYDKEGRFMPVNFENIFSKYARTYPDRLSYRELWRMTEGCREVFDFFGWVAMKLEWSFLYVLARDDEGYLSREAIRRMYDGSLFEYMERQRMEHVKMS

SEQ ID NO: 68812 - DNA, 1452 bp, Triticum aestivum
  misc_feature (1)..(1452): Ceres Seq. ID no. 13598326
ctttcttttcttttcttgatctctcctccggaaattagctatccttctcctcgactcctcctcgtcgtcatggcaccactgaggggggccaagcgccggaagcggcaccccgagaaggccctgccggcgggggtgatggcgcccttgcccccgcccgacgccgccgattggtgggactccttctcccgcaggcttgcagcaggacactactccaaagactgccagaactttgagtcagtcttcaagatgtcgaggaagacattcgactacatttgcactctgattaccggggacttctcaagaaagacacagggtttcagaaatttcaggtttggagacaagatgattcttgcgttggaggatcaagtagctgttgctctgttgagactgacgactggtgagtcacttctgagcatagggaatcgctttggaatgaaccactcagcaatctcaaacatcacttggaagttcattgagtccttggaggatcacgcaatcagtcatctgaagtggcctgaccctgaggagatggcgaccatcaaagcaaagttcgaaaagctccagggcctccccaactgctgcggcgccatagacacaacacacatcctcatgtgctcttcagctcagcctaacagcaatgtctggcttgactgtgaracacarkaacagcatggtcctgcaggccgttgtcgaccccgacatgcggttcagagacgttgtcagtggctggcctgggagcatggatgactcctgcatcctgcgcacctcgggcttctacaagctgtgcgagaaaggcgggaggctggacggacaaatggagcttcctggggagccagcagggtcagtggtcagagagtacatcatcggggacacgggctaccctctccttccctggctgatgactccataccaagagcgcgatctgtctccagcaaaagcagcattcaacaagcagcacgccacggcgagaatggtggtgcagggtgctatggccaggctgaaggaaaggtggcaggtactcaagggggagctgtggaggcctgacaagcaccggctaccgaggatcatctacgcctgctgcctgctcaccaacatcatgatcgacctcggggacacacacagagaacgggcaccggcgtcgcacgaccatgatgacggttactatcagcagttcagcaatgtggccgacgacggtgcggttgcacagagggacgtgctttgccagtatgtcagcaggctaggcggcaaattgccggagtgattctcgccctctagctgcataccgtgcgcctcttcgcctatttttctctctgctcgacatgaaacaaatgatagctacagaacatagaatcgtgatctggatatttgttacccttgagacggtttgctgcgattgttattggtattattaaataggtcatagaagttgtaacctgaattgcggttactttg

SEQ ID NO: 68813 - protein, 248 aa, Triticum aestivum
  peptide (1)..(248): Ceres Seq. ID no. 15222305
  misc_feature (56)..(202): Homolog of NCBI NO: 7452044 NR Description: hypothetical protein F27B13.20 - Arabidopsis
  misc_feature (57)..(202): Homolog of NCBI NO: 21902022 NR Description: B1097D05.23 [Oryza sativa (japonica
  misc_feature (55)..(214): Homolog of NCBI NO: 34906342 NR Description: unnamed protein product [Oryza sativa (japonica
  misc_feature (57)..(202): Homolog of NCBI NO: 15239835 NR Description: expressed protein [Arabidopsis thaliana]
  misc_feature (153)..(219): Homolog of NCBI NO: 11357482 NR Description: hypothetical protein F16M2.120 - Arabidopsis
  misc_feature (26)..(153): Homolog of NCBI NO: 11357482 NR Description: hypothetical protein F16M2.120 - Arabidopsis
  misc_feature (26)..(219): Homolog of NCBI NO: 18412695 NR Description: expressed protein [Arabidopsis thaliana]
  misc_feature (24)..(217): Homolog of NCBI NO: 25553597 NR Description: OJ1656_E11.28 [Oryza sativa (japonica
  misc_feature (24)..(221): Homolog of NCBI NO: 34908114 NR Description: P0031D11.14 [Oryza sativa (japonica
  misc_feature (56)..(219): Homolog of NCBI NO: 15233248 NR Description: expressed protein [Arabidopsis thaliana]
  misc_feature (219)..(219): Xaa is any aa, unknown or other
  misc_feature (221)..(221): Xaa is any aa, unknown or other
  misc_feature (222)..(222): Xaa is any aa, unknown or other
LSFLFLISPPEISYPSPRLLLVVMAPLRGAKRRKRHPEKALPAGVMAPLPPPDAADWWDSFSRRLAAGHYSKDCQNFESVFKMSRKTFDYICTLITGDFSRKTQGFRNFRFGDKMILALEDQVAVALLRLTTGESLLSIGNRFGMNHSAISNITWKFIESLEDHAISHLKWPDPEEMATIKAKFEKLQGLPNCCGAIDTTHILMCSSAQPNSNVWLDCXTXXQHGPAGRCRPRHAVQRRCQWLAWEHG

SEQ ID NO: 68814 - protein, 225 aa, Triticum aestivum
  peptide (1)..(225): Ceres Seq. ID no. 15222306
  misc_feature (33)..(179): Homolog of NCBI NO: 7452044 NR Description: hypothetical protein F27B13.20 - Arabidopsis
  misc_feature (34)..(179): Homolog of NCBI NO: 21902022 NR Description: B1097D05.23 [Oryza sativa (japonica
  misc_feature (32)..(191): Homolog of NCBI NO: 34906342 NR Description: unnamed protein product [Oryza sativa (japonica
  misc_feature (34)..(179): Homolog of NCBI NO: 15239835 NR Description: expressed protein [Arabidopsis thaliana]
  misc_feature (130)..(196): Homolog of NCBI NO: 11357482 NR Description: hypothetical protein F16M2.120 - Arabidopsis
  misc_feature (3)..(130): Homolog of NCBI NO: 11357482 NR Description: hypothetical protein F16M2.120 - Arabidopsis
  misc_feature (3)..(196): Homolog of NCBI NO: 18412695 NR Description: expressed protein [Arabidopsis thaliana]
  misc_feature (1)..(194): Homolog of NCBI NO: 25553597 NR Description: OJ1656_E11.28 [Oryza sativa (japonica
  misc_feature (1)..(198): Homolog of NCBI NO: 34908114 NR Description: P0031D11.14 [Oryza sativa (japonica
  misc_feature (33)..(196): Homolog of NCBI NO: 15233248 NR Description: expressed protein [Arabidopsis thaliana]
  misc_feature (196)..(196): Xaa is any aa, unknown or other
  misc_feature (198)..(198): Xaa is any aa, unknown or other
  misc_feature (199)..(199): Xaa is any aa, unknown or other
MAPLRGAKRRKRHPEKALPAGVMAPLPPPDAADWWDSFSRRLAAGHYSKDCQNFESVFKMSRKTFDYICTLITGDFSRKTQGFRNFRFGDKMILALEDQVAVALLRLTTGESLLSIGNRFGMNHSAISNITWKFIESLEDHAISHLKWPDPEEMATIKAKFEKLQGLPNCCGAIDTTHILMCSSAQPNSNVWLDCXTXXQHGPAGRCRPRHAVQRRCQWLAWEHG

SEQ ID NO: 68815 - protein, 207 aa, Triticum aestivum
  peptide (1)..(207): Ceres Seq. ID no. 15222307
  misc_feature (11)..(153): Homolog of NCBI NO: 21592524 NR Description: unknown [Arabidopsis thaliana]
  misc_feature (11)..(153): Homolog of NCBI NO: 7452044 NR Description: hypothetical protein F27B13.20 - Arabidopsis
  misc_feature (11)..(159): Homolog of NCBI NO: 21902022 NR Description: B1097D05.23 [Oryza sativa (japonica
  misc_feature (11)..(203): Homolog of NCBI NO: 34906342 NR Description: unnamed protein product [Oryza sativa (japonica
  misc_feature (11)..(153): Homolog of NCBI NO: 15239835 NR Description: expressed protein [Arabidopsis thaliana]
  misc_feature (11)..(179): Homolog of NCBI NO: 11357482 NR Description: hypothetical protein F16M2.120 - Arabidopsis
  misc_feature (11)..(200): Homolog of NCBI NO: 18412695 NR Description: expressed protein [Arabidopsis thaliana]
  misc_feature (11)..(198): Homolog of NCBI NO: 25553597 NR Description: OJ1656_E11.28 [Oryza sativa (japonica
  misc_feature (1)..(206): Homolog of NCBI NO: 34908114 NR Description: P0031D11.14 [Oryza sativa (japonica
  misc_feature (11)..(194): Homolog of NCBI NO: 15233248 NR Description: expressed protein [Arabidopsis thaliana]
  misc_feature (7)..(7): Xaa is any aa, unknown or other
  misc_feature (9)..(9): Xaa is any aa, unknown or other
MSGLTVXHXNSMVLQAVVDPDMRFRDVVSGWPGSMDDSCILRTSGFYKLCEKGGRLDGQMELPGEPAGSVVREYIIGDTGYPLLPWLMTPYQERDLSPAKAAFNKQHATARMVVQGAMARLKERWQVLKGELWRPDKHRLPRIIYACCLLTNIMIDLGDTHRERAPASHDHDDGYYQQFSNVADDGAVAQRDVLCQYVSRLGGKLPE

SEQ ID NO: 68816 - DNA, 1151 bp, Triticum aestivum
  misc_feature (1)..(1151): Ceres Seq. ID no. 12614814
cttttcgcattgcagcctctcaaaacagccaaaccgaaccccaaaagctcgccgagaaacgcagaaaggagcgaagcaaaccaagcagcagcagcagcggaagaagaagaagaagcgaggagctgagccagctagcaatggcggcggacctgggcttcgaggcgaccgagctccggctcggcctgcccggcggcggcgagggggaggcgaggagctcctccggcaagaggggcttcgccgagaccatcgacctgaagctcaagctggagccggccggcgaggaggcgccggccgaggaggatcgggccgacgtggccgtggtcgccgccgcggcggcagagaaccaggaggagacggcgaccgacgccggcggagggaagatgaagaggtcgccgagccagagcagcgtcgtcaccaccgccgcgctgcccgaccccgccgagaagccgcgcgctcccaaggcgcaggtggtggggtggcctccggtccggtcgttccggaagaacatcctggcggagaagtcgtcgccggcggcagcggcggcgttcgtcaaggtgagcatggacggcgcgccctacctgcgcaaggtggacctcaacatgtacaagacctaccaggacctctccaaggccctcgagaagatgttcagctccttcaccatcggaaactgtggaactccagggatgaacggcatgaacgagagcaagctgatggatcttctcaacggatccgagtatgttccgacgtacgaggacaaggacggcgactggatgctcgtcggcgacgtcccatgggagatgttcgtcgagtcatgcaagcgccttcggataatgaagggatcagaagctattggccttgcaccaagggcgatggagaaatgcaagaacaggagctgaggagaggatgcactaaatgttatgcaagaatcaaaatacctatataaccttgcttgctcatccctgtatcatattctctgtcctaagtctaagtctgtatctcctgatcagtgaagtcattttggtttgtgatcttctcttttccagtcagtcagtcccaagtctcatcttgttatatacataagaaagaagaatccaagaacatgtgagatgtatctgtacctgtctgccacataattgtgtcttctccttttc

SEQ ID NO: 68817 - protein, 313 aa, Triticum aestivum
  peptide (1)..(313): Ceres Seq. ID no. 12614815
  misc_feature (13)..(249): Homolog of NCBI NO: 32455928 NR Description: MC8 [Micrococcus sp. 28]
FSHCSLSKQPNRTPKARRETQKGAKQTKQQQQRKKKKKRGAEPASNGGGPGLRGDRAPARPARRRRGGGEELLRQEGLRRDHRPEAQAGAGRRGGAGRGGSGRRGRGRRRGGREPGGDGDRRRRREDEEVAEPEQRRHHRRAARPRREAARSQGAGGGVASGPVVPEEHPGGEVVAGGSGGVRQGEHGRRALPAQGGPQHVQDLPGPLQGPREDVQLLHHRKLWNSRDERHEREQADGSSQRIRVCSDVRGQGRRLDARRRRPMGDVRRVMQAPSDNEGIRSYWPCTKGDGEMQEQELRRGCTKCYARIKIPI

SEQ ID NO: 68818 - protein, 297 aa, Triticum aestivum
  peptide (1)..(297): Ceres Seq. ID no. 12614816
  misc_feature (144)..(289): Pfam Name: AUX/IAA family Pfam Description: AUX/IAA family
  misc_feature (68)..(297): Homolog of NCBI NO: 17976835 NR Description: putative auxin induced transcription factor
  misc_feature (68)..(297): Homolog of NCBI NO: 32396295 NR Description: auxin-induced protein 2 [Pinus taeda]
  misc_feature (122)..(296): Homolog of NCBI NO: 22725714 NR Description: auxin-responsive protein IAA1; MjAux/IAA1
  misc_feature (50)..(297): Homolog of NCBI NO: 15229343 NR Description: auxin-induced protein
  misc_feature (144)..(297): Homolog of NCBI NO: 4887020 NR Description: Nt-iaa28 deduced protein [Nicotiana tabacum]
  misc_feature (50)..(297): Homolog of NCBI NO: 20385508 NR Description: auxin-regulated protein [Populus tremula x
  misc_feature (48)..(297): Homolog of NCBI NO: 20269059 NR Description: aux/IAA protein [Populus tremula x Populus
  misc_feature (50)..(297): Homolog of NCBI NO: 114734 NR Description: AUXIN-INDUCED PROTEIN AUX28
  misc_feature (49)..(73): Homolog of NCBI NO: 4887022 NR Description: Nt-iaa4.1 deduced protein [Nicotiana tabacum]
  misc_feature (113)..(297): Homolog of NCBI NO: 4887022 NR Description: Nt-iaa4.1 deduced protein [Nicotiana tabacum]
FRIAASQNSQTEPQKLAEKRRKERSKPSSSSSGRRRRSEELSQLAMAADLGFEATELRLGLPGGGEGEARSSSGKRGFAETIDLKLKLEPAGEEAPAEEDRADVAVVAAAAAENQEETATDAGGGKMKRSPSQSSVVTTAALPDPAEKPRAPKAQVVGWPPVRSFRKNILAEKSSPAAAAAFVKVSMDGAPYLRKVDLNMYKTYQDLSKALEKMFSSFTIGNCGTPGMNGMNESKLMDLLNGSEYVPTYEDKDGDWMLVGDVPWEMFVESCKRLRIMKGSEAIGLAPRAMEKCKNRS

SEQ ID NO: 68819 - protein, 252 aa, Triticum aestivum
  peptide (1)..(252): Ceres Seq. ID no. 12614817
  misc_feature (99)..(244): Pfam Name: AUX/IAA family Pfam Description: AUX/IAA family
  misc_feature (23)..(252): Homolog of NCBI NO: 17976835 NR Description: putative auxin induced transcription factor
  misc_feature (23)..(252): Homolog of NCBI NO: 32396295 NR Description: auxin-induced protein 2 [Pinus taeda]
  misc_feature (77)..(251): Homolog of NCBI NO: 22725714 NR Description: auxin-responsive protein IAA1; MjAux/IAA1
  misc_feature (5)..(252): Homolog of NCBI NO: 15229343 NR Description: auxin-induced protein
  misc_feature (99)..(252): Homolog of NCBI NO: 4887020 NR Description: Nt-iaa28 deduced protein [Nicotiana tabacum]
  misc_feature (5)..(252): Homolog of NCBI NO: 20385508 NR Description: auxin-regulated protein [Populus tremula x
  misc_feature (3)..(252): Homolog of NCBI NO: 20269059 NR Description: aux/IAA protein [Populus tremula x Populus
  misc_feature (5)..(252): Homolog of NCBI NO: 114734 NR Description: AUXIN-INDUCED PROTEIN AUX28
  misc_feature (4)..(28): Homolog of NCBI NO: 4887022 NR Description: Nt-iaa4.1 deduced protein [Nicotiana tabacum]
  misc_feature (68)..(252): Homolog of NCBI NO: 4887022 NR Description: Nt-iaa4.1 deduced protein [Nicotiana tabacum]
MAADLGFEATELRLGLPGGGEGEARSSSGKRGFAETIDLKLKLEPAGEEAPAEEDRADVAVVAAAAAENQEETATDAGGGKMKRSPSQSSVVTTAALPDPAEKPRAPKAQVVGWPPVRSFRKNILAEKSSPAAAAAFVKVSMDGAPYLRKVDLNMYKTYQDLSKALEKMFSSFTIGNCGTPGMNGMNESKLMDLLNGSEYVPTYEDKDGDWMLVGDVPWEMFVESCKRLRIMKGSEAIGLAPRAMEKCKNRS

SEQ ID NO: 68820 - DNA, 548 bp, Triticum aestivum
  misc_feature (1)..(548): Ceres Seq. ID no. 13654415
aaaaaaaagtggggcgaggaagaaaccgaaacactcacacagaacaccacaccccccaccccggcgacacaccacccctcccgccccaaatctcagatcagagcgccgggagatctgccatttccgggtggagggatcgagccccgcgcttctcgattaaatcctgggctctgtatcttgtgtggatggcatttgtgcctcagagactgtagctcaccaagtgttgatttgaacctgtgaagatagagatgggttctccgagaaaatccgacaagaaggccgccttagactttgcagcatggggtttcaatatcacctcatccgttgggatcatcatggtcaacaaagccctaatggctacacatggattcagttttgccacaacattaactggccttcatttattgacaacgaccttgatgactattgtgtttcggtggttaggcctgagccagccctctcacttaccgctaccagatctgattaagttcgtaatcttttcaaatttgtcgatcgttggcatgaatgtgagcttgatgtggaattct

SEQ ID NO: 68821 - protein, 100 aa, Triticum aestivum
  peptide (1)..(100): Ceres Seq. ID no. 13654416
  misc_feature (1)..(99): Homolog of NCBI NO: 21536703 NR Description: unknown [Arabidopsis thaliana]
  misc_feature (6)..(99): Homolog of NCBI NO: 18394949 NR Description: transporter-related [Arabidopsis thaliana]
  misc_feature (1)..(99): Homolog of NCBI NO: 18411172 NR Description: transporter-related [Arabidopsis thaliana]
  misc_feature (6)..(99): Homolog of NCBI NO: 18420440 NR Description: transporter-related [Arabidopsis thaliana]
  misc_feature (6)..(99): Homolog of NCBI NO: 21593003 NR Description: unknown [Arabidopsis thaliana]
  misc_feature (6)..(99): Homolog of NCBI NO: 7486049 NR Description: hypothetical protein F23K16.20 - Arabidopsis
  misc_feature (1)..(99): Homolog of NCBI NO: 21595054 NR Description: unknown [Arabidopsis thaliana]
  misc_feature (1)..(99): Homolog of NCBI NO: 18399097 NR Description: transporter-related [Arabidopsis thaliana]
  misc_feature (1)..(99): Homolog of NCBI NO: 15234794 NR Description: transporter-related [Arabidopsis thaliana]
  misc_feature (1)..(99): Homolog of NCBI NO: 30313364 NR Description: putative transmembrane protein [Oryza sativa]
MGSPRKSDKKAALDFAAWGFNITSSVGIIMVNKALMATHGFSFATTLTGLHLLTTTLMTIVFRWLGLSQPSHLPLPDLIKFVIFSNLSIVGMNVSLMWNS

SEQ ID NO: 68822 - protein, 79 aa, Triticum aestivum
  peptide (1)..(79): Ceres Seq. ID no. 13654417
KKKWGEEETETLTQNTTPPTPATHHPSRPKSQIRAPGDLPFPGGGIEPRASRLNPGLCILCGWHLCLRDCSSPSVDLNL

SEQ ID NO: 68823 - protein, 71 aa, Triticum aestivum
  peptide (1)..(71): Ceres Seq. ID no. 13654418
  misc_feature (1)..(70): Homolog of NCBI NO: 21536703 NR Description: unknown [Arabidopsis thaliana]
  misc_feature (1)..(70): Homolog of NCBI NO: 18394949 NR Description: transporter-related [Arabidopsis thaliana]
  misc_feature (1)..(70): Homolog of NCBI NO: 18411172 NR Description: transporter-related [Arabidopsis thaliana]
  misc_feature (1)..(70): Homolog of NCBI NO: 18420440 NR Description: transporter-related [Arabidopsis thaliana]
  misc_feature (1)..(70): Homolog of NCBI NO: 21593003 NR Description: unknown [Arabidopsis thaliana]
  misc_feature (1)..(70): Homolog of NCBI NO: 7486049 NR Description: hypothetical protein F23K16.20 - Arabidopsis
  misc_feature (1)..(70): Homolog of NCBI NO: 21595054 NR Description: unknown [Arabidopsis thaliana]
  misc_feature (1)..(70): Homolog of NCBI NO: 18399097 NR Description: transporter-related [Arabidopsis thaliana]
  misc_feature (1)..(70): Homolog of NCBI NO: 15234794 NR Description: transporter-related [Arabidopsis thaliana]
  misc_feature (1)..(70): Homolog of NCBI NO: 30313364 NR Description: putative transmembrane protein [Oryza sativa]
MVNKALMATHGFSFATTLTGLHLLTTTLMTIVFRWLGLSQPSHLPLPDLIKFVIFSNLSIVGMNVSLMWNS

SEQ ID NO: 68824 - DNA, 1433 bp, Triticum aestivum
  misc_feature (1)..(1433): Ceres Seq. ID no. 14302856
taaaaccctagacaaaagctcagcggcgcagcacagcccagccgccgcgcaccacgctcttcccccctccccctccctctcccccaccctcctccgaccaccttctcccgaaacgcgcggagatgctctccgctgccttcgctgtccaccccgccgccgtcgcgccgcggctgcattcggtccgccagcgccagcaattctgcgctccaatcggcacggcgacgccaaggcggcggttgccagtggcgatgctttcggtcactaacgccgtcaccacccagagccgcgagagcgcccccgcagcgcctcgcaagctctctttcccgatactggtgaacagttgcaccgggaaaatggggaagtctgttgctgaagcagctgtgtctgctggtcttcagttagttccgatgtcattcagtgcaatagaggttcctgatggaaagctcaacatctgtgacagagatattcatattcatgatccatctgaaagtgaacgtattctccgttccattgctaaggactacccagatatgatagttgttgactacactgtgcctgatgctgttaatgccaatgctgaactttactgcaaacttggcttgccatttgtaatgggcacaactggtggaaataggcaactgttgaacaaaactgtgcaggatgcgaatgtttatgctgtgatatctccacagatggggaagcaggttgttgctttccttgctgccatggaaatcatggcagagaaattccctggtgcatttgcaggttacaaactagaggtaatggagtctcatcaagcgacaaaattggacgtttctggcactgccaaagctgtaatctcttgctttcagaagttgggtgtctcattcgacttaaacgaggtaaacttggttagggaccccgaagagcagcttgccattgttggtgtcccagaagaacatcttggagggcatgcatttcacaattaccatctcacttcgcctgatgaaacagtgtcatttgagttccagcacaatgtgtgtggccgttcaatatacgcagagggaactgttgatgccgccatgtttctccacacaaagatacgatctggggcggacaagaaattatatgatatgatcgatgtcctgagagaaggcaacatgagatgagcaggggcatttgtagggttaggaggagagcttatgcagcaaaattaggtcactgtccggatgcagcatctttgcgttgtaattggatcttagatttgttttactagttatattaactcttatttacttctcggcgaaaaaaggagtcatttggacgagataaggatgttaacttggacttgggcctctgtttgaggccagagttagctgttgttgtggcatgaatgatggaaggcaaatgcagtacgaataatatattgtggaagttgaaatagtttgctaatt

SEQ ID NO: 68825 - protein, 341 aa, Triticum aestivum
  peptide (1)..(341): Ceres Seq. ID no. 14302857
  misc_feature (194)..(336): Pfam Name: Dihydrodipicolinate reductase, C-terminus Pfam Description: Dihydrodipicolinate reductase, C-terminus
  misc_feature (127)..(335): Homolog of NCBI NO: 23474665 NR Description: hypothetical protein [Desulfovibrio desulfuricans
  misc_feature (36)..(319): Homolog of NCBI NO: 11357603 NR Description: hypothetical protein F24G16.160 - Arabidopsis
  misc_feature (37)..(320): Homolog of NCBI NO: 7486478 NR Description: hypothetical protein At2g44040 [imported] -
  misc_feature (37)..(341): Homolog of NCBI NO: 18406430 NR Description: expressed protein [Arabidopsis thaliana]
  misc_feature (36)..(341): Homolog of NCBI NO: 18411368 NR Description: expressed protein [Arabidopsis thaliana]
MLSAAFAVHPAAVAPRLHSVRQRQQFCAPIGTATPRRRLPVAMLSVTNAVTTQSRESAPAAPRKLSFPILVNSCTGKMGKSVAEAAVSAGLQLVPMSFSAIEVPDGKLNICDRDIHIHDPSESERILRSIAKDYPDMIVVDYTVPDAVNANAELYCKLGLPFVMGTTGGNRQLLNKTVQDANVYAVISPQMGKQVVAFLAAMEIMAEKFPGAFAGYKLEVMESHQATKLDVSGTAKAVISCFQKLGVSFDLNEVNLVRDPEEQLAIVGVPEEHLGGHAFHNYHLTSPDETVSFEFQHNVCGRSIYAEGTVDAAMFLHTKIRSGADKKLYDMIDVLREGNMR

SEQ ID NO: 68826 - protein, 299 aa, Triticum aestivum
  peptide (1)..(299): Ceres Seq. ID no. 14302858
  misc_feature (152)..(294): Pfam Name: Dihydrodipicolinate reductase, C-terminus Pfam Description: Dihydrodipicolinate reductase, C-terminus
  misc_feature (85)..(293): Homolog of NCBI NO: 23474665 NR Description: hypothetical protein [Desulfovibrio desulfuricans
  misc_feature (1)..(277): Homolog of NCBI NO: 11357603 NR Description: hypothetical protein F24G16.160 - Arabidopsis
  misc_feature (1)..(278): Homolog of NCBI NO: 7486478 NR Description: hypothetical protein At2g44040 [imported] -
  misc_feature (1)..(299): Homolog of NCBI NO: 18406430 NR Description: expressed protein [Arabidopsis thaliana]
  misc_feature (1)..(299): Homolog of NCBI NO: 18411368 NR Description: expressed protein [Arabidopsis thaliana]
MLSVTNAVTTQSRESAPAAPRKLSFPILVNSCTGKMGKSVAEAAVSAGLQLVPMSFSAIEVPDGKLNICDRDIHIHDPSESERILRSIAKDYPDMIVVDYTVPDAVNANAELYCKLGLPFVMGTTGGNRQLLNKTVQDANVYAVISPQMGKQVVAFLAAMEIMAEKFPGAFAGYKLEVMESHQATKLDVSGTAKAVISCFQKLGVSFDLNEVNLVRDPEEQLAIVGVPEEHLGGHAFHNYHLTSPDETVSFEFQHNVCGRSIYAEGTVDAAMFLHTKIRSGADKKLYDMIDVLREGNMR

SEQ ID NO: 68827 - protein, 264 aa, Triticum aestivum
  peptide (1)..(264): Ceres Seq. ID no. 14302859
  misc_feature (117)..(259): Pfam Name: Dihydrodipicolinate reductase, C-terminus Pfam Description: Dihydrodipicolinate reductase, C-terminus
  misc_feature (50)..(258): Homolog of NCBI NO: 23474665 NR Description: hypothetical protein [Desulfovibrio desulfuricans
  misc_feature (1)..(242): Homolog of NCBI NO: 11357603 NR Description: hypothetical protein F24G16.160 - Arabidopsis
  misc_feature (1)..(243): Homolog of NCBI NO: 7486478 NR Description: hypothetical protein At2g44040 [imported] -
  misc_feature (1)..(264): Homolog of NCBI NO: 18406430 NR Description: expressed protein [Arabidopsis thaliana]
  misc_feature (1)..(264): Homolog of NCBI NO: 18411368 NR Description: expressed protein [Arabidopsis thaliana]
MGKSVAEAAVSAGLQLVPMSFSAIEVPDGKLNICDRDIHIHDPSESERILRSIAKDYPDMIVVDYTVPDAVNANAELYCKLGLPFVMGTTGGNRQLLNKTVQDANVYAVISPQMGKQVVAFLAAMEIMAEKFPGAFAGYKLEVMESHQATKLDVSGTAKAVISCFQKLGVSFDLNEVNLVRDPEEQLAIVGVPEEHLGGHAFHNYHLTSPDETVSFEFQHNVCGRSIYAEGTVDAAMFLHTKIRSGADKKLYDMIDVLREGNMR

SEQ ID NO: 68828 - DNA, 1414 bp, Triticum aestivum
  misc_feature (1)..(1414): Ceres Seq. ID no. 13654649
cctctcccctcccctccctctcttttgcgcgctggcccctgccgtttcggacccgccacgctccggtcccccgctccgccgccgccgccgtccgtccccgtcgccccacctcctccgccccgtcagaggaagctgcggactggcatgacctaggggggccatggaagaggcagacaaggaccgcaattcctgcaagcgcctgcgggcggtgggcggcggcggcgactcggcggatgcgtggcggagtttccgggtggcgcgcgcggcggcgggcggcaaggaccggcacagcaaggtggtgacctcgcgcggcctccgcgaccgccgcatccggctctcggtgcagacggccattcagttctatgacatccaggaccgcctgggtgtcgaccagcccagcaaggccatcgagtggctcatccaagccgccgccaccgccatcgatggtctcccgtcgttggactgctccttcgccttccctgtcgcctccccagcagcagaagacaccgcggaggtcagcacctcggagaccagcaagggctccgtgctctcgctcgccaacggccctgccgacaatgacaatgccgctcaccaagccagtgcatacaacgggggcagtgccaatggcacgtttgccgggctcctgcactgctccaacgccgccgacaagccaatgcagcatcagcatcagcagcagcagccgacgcttgcctactacgccgccccgggttcgcacatcgcgcccatgtccttcgagatgattccccagctcaccttctcccaggaccagcagcactgccaccaccaccaccaccaccaccatgcctctgtctccttcgacaggagcacacttcagtccaacaccgtctccacgcctcagtggcccccgtcccagcacccgttcctgatgcagaggttctctgctgctccagccgagccttcgcctatgtttcccttctttcttggaggcaacaacgctgctgctgcggctgctcctgcggcggccaatgcgccggagcggaggctgcagctctgggacttcaaggaggaaaggaagacatagtttcttcttgggagattcggcggtgtaccaaactaccaagtcatatgatccattcagcacagcaaaacccagaaggagagaagatgcaaggcaacgaaggagtcggcgccatggagccgcgtggaatgcaatcgctttgctggatctccgaatcttctccgcgcggttttcgttttgccgttgtcatcctctgacctatgtttttgtgatcggaaaccaaatgtttttgagctgcactctgttgctgtgccctctatctttctccttacgaaaaagatgtttttttttaactttctggcgaggaacagaatttcgcgcttgcatggatgctggtggcgtgtactgagtggc

SEQ ID NO: 68829 - protein, 300 aa, Triticum aestivum
  peptide (1)..(300): Ceres Seq. ID no. 13654650
  misc_feature (28)..(277): Pfam Name: TCP family transcription factor Pfam Description: TCP family transcription factor
  misc_feature (40)..(150): Homolog of NCBI NO: 21624281 NR Description: PlCYC4 [Pueraria montana var. lobata]
  misc_feature (28)..(146): Homolog of NCBI NO: 18415079 NR Description: TCP family transcription factor, putative
  misc_feature (28)..(146): Homolog of NCBI NO: 7486304 NR Description: hypothetical protein F28J12.50 - Arabidopsis
  misc_feature (28)..(146): Homolog of NCBI NO: 25369264 NR Description: probable basic helix-loop-helix DNA binding
  misc_feature (36)..(135): Homolog of NCBI NO: 20975255 NR Description: transcription factor PCF6 [Oryza sativa (japonica
  misc_feature (163)..(300): Homolog of NCBI NO: 37532292 NR Description: hypothetical protein [Oryza sativa (japonica
  misc_feature (28)..(133): Homolog of NCBI NO: 18397402 NR Description: TCP family transcription factor, putative
  misc_feature (35)..(110): Homolog of NCBI NO: 34394387 NR Description: transcription factor PCF8-like
  misc_feature (26)..(284): Homolog of NCBI NO: 33146716 NR Description: putative transcription factor PCF6
  misc_feature (1)..(300): Homolog of NCBI NO: 21624267 NR Description: transcription factor PCF8 [Oryza sativa (japonica
MEEADKDRNSCKRLRAVGGGGDSADAWRSFRVARAAAGGKDRHSKVVTSRGLRDRRIRLSVQTAIQFYDIQDRLGVDQPSKAIEWLIQAAATAIDGLPSLDCSFAFPVASPAAEDTAEVSTSETSKGSVLSLANGPADNDNAAHQASAYNGGSANGTFAGLLHCSNAADKPMQHQHQQQQPTLAYYAAPGSHIAPMSFEMIPQLTFSQDQQHCHHHHHHHHASVSFDRSTLQSNTVSTPQWPPSQHPFLMQRFSAAPAEPSPMFPFFLGGNNAAAAAAPAAANAPERRLQLWDFKEERKT

SEQ ID NO: 68830 - DNA, 1501 bp, Triticum aestivum
  misc_feature (1)..(1501): Ceres Seq. ID no. 13662360
atacctacatagtcttctgccagtttgagtactcacgacgaacgccgtccacacgccccagagcacttcgaacacgaggccgccagcgagcatgggcaagggagctggcgccgccggcgtggacgagccgctgctcccggagctctcgggcgggcacggcggcggggcgtcggtctccggcgcggtgttcaacctgtccacgagcatcatcggcgccggcattatgtcgatcccggcggcaatgcgcgtgctcggggtcgtccccgcgctcgccctcatcgcggccgtcgccctcctctccgacgtctccgtggagttcatgctgcggtacacggcctgggccagcggcacgccctcgtacgcggggatcatgggcgacgcgttcggccgccgcgccggcgccgcggcgctcaacatcttcatagccttcaccaccgccggcaccctcgtcgtctacctcatcatcataggggatgtgctgtccgggagcgtggaggggggaggcgagcacgccggggtgctgcaggagctgttcggccggcagtggtggaccggcagggagtttgtgatactggccacggccgtcgtcgttctgctgccgctggtgctcctccgccgcgtcgattcgctgaggtacacatcggcagtgtccatccttctggcggcggtgttcatgctcatcacgatggggatcgcggtctacactgtcttcaccggcactgcgaagatgccgcggatgctgccggacttctccaccctcgcgtcccccttcgagctcttcaccgccgtcccggtcatcgtcgtcgccttcaccttccacttcaacgtgcacccgatccgcgcggagctcagcaagacgtcggacatgaagtcggcggtgcgcatctcgctggtgctctgcgccgccatctacgccgcggtgggcttcttcggcttcctcctcttcggggacgccaccatgcccgacgtgctcgccaacttcgaccgcagctccggctccggcgtcccgcaggcgctcaacgacgccgcgcgcctcagctacgcgctgcacctcgtgctcgtcttcccgctcctccactactcgctccgcgtcaacgtcgacgagctcctcttcccaggccgccgcccgctggccaccgacacgcgccgcttcgtggcgctcacggccgtgctcatggcggtgctctacgtgctcgccatcgccatccccagcatctggacgctcttccagtactcgggctccacgttcgccgtctgcatatcgcttatcttccctggcgccatcgttctcagggatgttcacggaatagcgaagaggaaagacaaggcaatggcagcgatgatgatcactctggcggtgatcacgagcagcatcgccattgcttccaacgtcatgagctccatcaagggcgaagtgaaaggtgttaatgccggagctagctagcatgtacagtttcattatttatatagctataatataaatcaaaattctttcacccgc

SEQ ID NO: 68831 - protein, 450 aa, Triticum aestivum
  peptide (1)..(450): Ceres Seq. ID no. 13662361
  misc_feature (11)..(436): Homolog of NCBI NO: 18412864 NR Description: amino acid transporter family [Arabidopsis
  misc_feature (10)..(54): Homolog of NCBI NO: 25408697 NR Description: hypothetical protein At2g40420 [imported] -
  misc_feature (63)..(434): Homolog of NCBI NO: 25408697 NR Description: hypothetical protein At2g40420 [imported] -
  misc_feature (10)..(434): Homolog of NCBI NO: 30688270 NR Description: amino acid transporter family [Arabidopsis
  misc_feature (13)..(439): Homolog of NCBI NO: 15241555 NR Description: amino acid transporter family [Arabidopsis
  misc_feature (13)..(439): Homolog of NCBI NO: 9758059 NR Description: amino acid transporter-like protein [Arabidopsis
  misc_feature (13)..(439): Homolog of NCBI NO: 18406463 NR Description: amino acid transporter family [Arabidopsis
  misc_feature (14)..(436): Homolog of NCBI NO: 15228851 NR Description: amino acid transporter family [Arabidopsis
  misc_feature (9)..(436): Homolog of NCBI NO: 34898706 NR Description: hypothetical protein [Oryza sativa (japonica
  misc_feature (1)..(401): Homolog of NCBI NO: 34907894 NR Description: P0439E11.11 [Oryza sativa (japonica
MGKGAGAAGVDEPLLPELSGGHGGGASVSGAVFNLSTSIIGAGIMSIPAAMRVLGVVPALALIAAVALLSDVSVEFMLRYTAWASGTPSYAGIMGDAFGRRAGAAALNIFIAFTTAGTLVVYLIIIGDVLSGSVEGGGEHAGVLQELFGRQWWTGREFVILATAVVVLLPLVLLRRVDSLRYTSAVSILLAAVFMLITMGIAVYTVFTGTAKMPRMLPDFSTLASPFELFTAVPVIVVAFTFHFNVHPIRAELSKTSDMKSAVRISLVLCAAIYAAVGFFGFLLFGDATMPDVLANFDRSSGSGVPQALNDAARLSYALHLVLVFPLLHYSLRVNVDELLFPGRRPLATDTRRFVALTAVLMAVLYVLAIAIPSIWTLFQYSGSTFAVCISLIFPGAIVLRDVHGIAKRKDKAMAAMMITLAVITSSIAIASNVMSSIKGEVKGVNAGAS

SEQ ID NO: 68832 - protein, 406 aa, Triticum aestivum
  peptide (1)..(406): Ceres Seq. ID no. 13662362
  misc_feature (1)..(139): Homolog of NCBI NO: 34907896 NR Description: P0439E11.12 [Oryza sativa (japonica
  misc_feature (1)..(392): Homolog of NCBI NO: 18412864 NR Description: amino acid transporter family [Arabidopsis
  misc_feature (19)..(390): Homolog of NCBI NO: 25408697 NR Description: hypothetical protein At2g40420 [imported] -
  misc_feature (1)..(390): Homolog of NCBI NO: 30688270 NR Description: amino acid transporter family [Arabidopsis
  misc_feature (1)..(395): Homolog of NCBI NO: 15241555 NR Description: amino acid transporter family [Arabidopsis
  misc_feature (1)..(395): Homolog of NCBI NO: 9758059 NR Description: amino acid transporter-like protein [Arabidopsis
  misc_feature (1)..(395): Homolog of NCBI NO: 18406463 NR Description: amino acid transporter family [Arabidopsis
  misc_feature (1)..(392): Homolog of NCBI NO: 15228851 NR Description: amino acid transporter family [Arabidopsis
  misc_feature (1)..(392): Homolog of NCBI NO: 34898706 NR Description: hypothetical protein [Oryza sativa (japonica
  misc_feature (1)..(357): Homolog of NCBI NO: 34907894 NR Description: P0439E11.11 [Oryza sativa (japonica
MSIPAAMRVLGVVPALALIAAVALLSDVSVEFMLRYTAWASGTPSYAGIMGDAFGRRAGAAALNIFIAFTTAGTLVVYLIIIGDVLSGSVEGGGEHAGVLQELFGRQWWTGREFVILATAVVVLLPLVLLRRVDSLRYTSAVSILLAAVFMLITMGIAVYTVFTGTAKMPRMLPDFSTLASPFELFTAVPVIVVAFTFHFNVHPIRAELSKTSDMKSAVRISLVLCAAIYAAVGFFGFLLFGDATMPDVLANFDRSSGSGVPQALNDAARLSYALHLVLVFPLLHYSLRVNVDELLFPGRRPLATDTRRFVALTAVLMAVLYVLAIAIPSIWTLFQYSGSTFAVCISLIFPGAIVLRDVHGIAKRKDKAMAAMMITLAVITSSIAIASNVMSSIKGEVKGVNAGAS

SEQ ID NO: 68833 - protein, 400 aa, Triticum aestivum
  peptide (1)..(400): Ceres Seq. ID no. 13662363
  misc_feature (1)..(133): Homolog of NCBI NO: 34907896 NR Description: P0439E11.12 [Oryza sativa (japonica
  misc_feature (1)..(386): Homolog of NCBI NO: 18412864 NR Description: amino acid transporter family [Arabidopsis
  misc_feature (13)..(384): Homolog of NCBI NO: 25408697 NR Description: hypothetical protein At2g40420 [imported] -
  misc_feature (1)..(384): Homolog of NCBI NO: 30688270 NR Description: amino acid transporter family [Arabidopsis
  misc_feature (1)..(389): Homolog of NCBI NO: 15241555 NR Description: amino acid transporter family [Arabidopsis
  misc_feature (1)..(389): Homolog of NCBI NO: 9758059 NR Description: amino acid transporter-like protein [Arabidopsis
  misc_feature (1)..(389): Homolog of NCBI NO: 18406463 NR Description: amino acid transporter family [Arabidopsis
  misc_feature (1)..(386): Homolog of NCBI NO: 15228851 NR Description: amino acid transporter family [Arabidopsis
  misc_feature (1)..(386): Homolog of NCBI NO: 34898706 NR Description: hypothetical protein [Oryza sativa (japonica
  misc_feature (1)..(351): Homolog of NCBI NO: 34907894 NR Description: P0439E11.11 [Oryza sativa (japonica
MRVLGVVPALALIAAVALLSDVSVEFMLRYTAWASGTPSYAGIMGDAFGRRAGAAALNIFIAFTTAGTLVVYLIIIGDVLSGSVEGGGEHAGVLQELFGRQWWTGREFVILATAVVVLLPLVLLRRVDSLRYTSAVSILLAAVFMLITMGIAVYTVFTGTAKMPRMLPDFSTLASPFELFTAVPVIVVAFTFHFNVHPIRAELSKTSDMKSAVRISLVLCAAIYAAVGFFGFLLFGDATMPDVLANFDRSSGSGVPQALNDAARLSYALHLVLVFPLLHYSLRVNVDELLFPGRRPLATDTRRFVALTAVLMAVLYVLAIAIPSIWTLFQYSGSTFAVCISLIFPGAIVLRDVHGIAKRKDKAMAAMMITLAVITSSIAIASNVMSSIKGEVKGVNAGAS

SEQ ID NO: 68834 - DNA, 1367 bp, Triticum aestivum
  misc_feature (1)..(1367): Ceres Seq. ID no. 13596238
gaccmttwcctatraacatyctaatcgaaaaacacacacacacaccaccaccaccaccaccaccaccacacttggatcacaagatagtggttcgttgctacccacgatgagagcgttcgcgttgtttgccgtgcttgccatggcggccgccatggccgtcgccgagcagtgcggctcccaggccggcggggcgacctgccccaactgcctctgctgcagccgcttcggctggtgcggctccacctcggactactgcggcgacggatgccagagccagtgctccggttgcggcagcacgcccgtcacccccacaccctccggcggtggcggcgtgtcctccatcatctcccgcgccctcttcgaccgcatgctactgcaccgcaacgacggcgcctgccaggccaagggcttctacacctacgacgccttcgtcgcggccgccggcaccttccggggcttcagcaccacgggcagcacggacacccggaagcgcgaggtggccgccttcctggcccagacctcccacgagaccaccggtgggtgggcgacggcgccggacggagccttcgcgtggggctactgcttcaagcaggagcgtggcgccacctccaactattgcactccgagcgcgcaatggccgtgcgccccagggaagagctactacggccgtgggccgatccagctctcccacaactacaactacgggccggcaggccgggccattggggtcgatctgctgcgcaacccagacctggttgccacggacccgacggtgtcttttaagacagcgatgtggttttggatgacggcacaggcgccaaagccgtcgagccatgctgtgatcacgggccaatggagcccatcagggacggaccgggctgcagggcgggtgcccgggtttggcgtgatcaccaacatagttaacggcgggatcgagtgcgggcatgggcaggacagccgagtcgccgatcggataggattttacaagcgctactgtgacatcctcggtgttggctatggtgacaacctcgactgctacaatcagaggcccttcgcttaactaattagttatatttatataacccctccaaacaaaatacaataagagcatcctctctcatctagatgttggaagttgtaactatggttacatctcataaggaactcaataaaagcatccagtatagatgctttgtattgagggcgtgtttggttgagaagtcttatgactttttctagtcccagggactaatcaaaaaagactctctagtagagtctttttctagtccctgtagaaaaagtccctcctgtttggttcctagtgactttttctagtctctgggactaaaaagtccctggyggaatcc

SEQ ID NO: 68835 - protein, 352 aa, Triticum aestivum
  peptide (1)..(352): Ceres Seq. ID no. 15221818
  misc_feature (54)..(93): Pfam Name: Chitin recognition protein Pfam Description: Chitin recognition protein
  misc_feature (36)..(351): Homolog of NCBI NO: 500617 NR Description: endochitinase [Oryza sativa (japonica
  misc_feature (36)..(351): Homolog of NCBI NO: 6164585 NR Description: chitinase [Poa pratensis]
  misc_feature (36)..(352): Homolog of NCBI NO: 12407647 NR Description: 31.7 kDa class I endochitinase-antifreeze protein
  misc_feature (36)..(352): Homolog of NCBI NO: 481478 NR Description: chitinase (EC 3.2.1.14) - wheat
  misc_feature (36)..(352): Homolog of NCBI NO: 18146829 NR Description: chitinase 3 [Triticum aestivum]
  misc_feature (36)..(351): Homolog of NCBI NO: 6164588 NR Description: chitinase [Poa pratensis]
  misc_feature (55)..(352): Homolog of NCBI NO: 741317 NR Description: chitinase a
  misc_feature (55)..(352): Homolog of NCBI NO: 542173 NR Description: chitinase (EC 3.2.1.14) a - rye
  misc_feature (36)..(352): Homolog of NCBI NO: 11344587 NR Description: seed chitinase-a [Secale cereale]
  misc_feature (36)..(352): Homolog of NCBI NO: 2506281 NR Description: 26 kDa endochitinase 1 precursor
  misc_feature (2)..(2): Xaa is any aa, unknown or other
  misc_feature (3)..(3): Xaa is any aa, unknown or other
  misc_feature (5)..(5): Xaa is any aa, unknown or other
  misc_feature (7)..(7): Xaa is any aa, unknown or other
TXXYXHXNRKTHTHTTTTTTTTTLGSQDSGSLLPTMRAFALFAVLAMAAAMAVAEQCGSQAGGATCPNCLCCSRFGWCGSTSDYCGDGCQSQCSGCGSTPVTPTPSGGGGVSSIISRALFDRMLLHRNDGACQAKGFYTYDAFVAAAGTFRGFSTTGSTDTRKREVAAFLAQTSHETTGGWATAPDGAFAWGYCFKQERGATSNYCTPSAQWPCAPGKSYYGRGPIQLSHNYNYGPAGRAIGVDLLRNPDLVATDPTVSFKTAMWFWMTAQAPKPSSHAVITGQWSPSGTDRAAGRVPGFGVITNIVNGGIECGHGQDSRVADRIGFYKRYCDILGVGYGDNLDCYNQRPFA

SEQ ID NO: 68836 - protein, 317 aa, Triticum aestivum
  peptide (1)..(317): Ceres Seq. ID no. 15221819
  misc_feature (19)..(58): Pfam Name: Chitin recognition protein Pfam Description: Chitin recognition protein
  misc_feature (1)..(316): Homolog of NCBI NO: 500617 NR Description: endochitinase [Oryza sativa (japonica
  misc_feature (1)..(316): Homolog of NCBI NO: 6164585 NR Description: chitinase [Poa pratensis]
  misc_feature (1)..(317): Homolog of NCBI NO: 12407647 NR Description: 31.7 kDa class I endochitinase-antifreeze protein
  misc_feature (1)..(317): Homolog of NCBI NO: 481478 NR Description: chitinase (EC 3.2.1.14) - wheat
  misc_feature (1)..(317): Homolog of NCBI NO: 18146829 NR Description: chitinase 3 [Triticum aestivum]
  misc_feature (1)..(316): Homolog of NCBI NO: 6164588 NR Description: chitinase [Poa pratensis]
  misc_feature (20)..(317): Homolog of NCBI NO: 741317 NR Description: chitinase a
  misc_feature (20)..(317): Homolog of NCBI NO: 542173 NR Description: chitinase (EC 3.2.1.14) a - rye
  misc_feature (1)..(317): Homolog of NCBI NO: 11344587 NR Description: seed chitinase-a [Secale cereale]
  misc_feature (1)..(317): Homolog of NCBI NO: 2506281 NR Description: 26 kDa endochitinase 1 precursor
MRAFALFAVLAMAAAMAVAEQCGSQAGGATCPNCLCCSRFGWCGSTSDYCGDGCQSQCSGCGSTPVTPTPSGGGGVSSIISRALFDRMLLHRNDGACQAKGFYTYDAFVAAAGTFRGFSTTGSTDTRKREVAAFLAQTSHETTGGWATAPDGAFAWGYCFKQERGATSNYCTPSAQWPCAPGKSYYGRGPIQLSHNYNYGPAGRAIGVDLLRNPDLVATDPTVSFKTAMWFWMTAQAPKPSSHAVITGQWSPSGTDRAAGRVPGFGVITNIVNGGIECGHGQDSRVADRIGFYKRYCDILGVGYGDNLDCYNQRPFA

SEQ ID NO: 68837 - protein, 306 aa, Triticum aestivum
  peptide (1)..(306): Ceres Seq. ID no. 15221820
  misc_feature (8)..(47): Pfam Name: Chitin recognition protein Pfam Description: Chitin recognition protein
  misc_feature (1)..(305): Homolog of NCBI NO: 500617 NR Description: endochitinase [Oryza sativa (japonica
  misc_feature (1)..(305): Homolog of NCBI NO: 6164585 NR Description: chitinase [Poa pratensis]
  misc_feature (1)..(306): Homolog of NCBI NO: 12407647 NR Description: 31.7 kDa class I endochitinase-antifreeze protein
  misc_feature (1)..(306): Homolog of NCBI NO: 481478 NR Description: chitinase (EC 3.2.1.14) - wheat
  misc_feature (1)..(306): Homolog of NCBI NO: 18146829 NR Description: chitinase 3 [Triticum aestivum]
  misc_feature (1)..(305): Homolog of NCBI NO: 6164588 NR Description: chitinase [Poa pratensis]
  misc_feature (9)..(306): Homolog of NCBI NO: 741317 NR Description: chitinase a
  misc_feature (9)..(306): Homolog of NCBI NO: 542173 NR Description: chitinase (EC 3.2.1.14) a - rye
  misc_feature (1)..(306): Homolog of NCBI NO: 11344587 NR Description: seed chitinase-a [Secale cereale]
  misc_feature (1)..(306): Homolog of NCBI NO: 2506281 NR Description: 26 kDa endochitinase 1 precursor
MAAAMAVAEQCGSQAGGATCPNCLCCSRFGWCGSTSDYCGDGCQSQCSGCGSTPVTPTPSGGGGVSSIISRALFDRMLLHRNDGACQAKGFYTYDAFVAAAGTFRGFSTTGSTDTRKREVAAFLAQTSHETTGGWATAPDGAFAWGYCFKQERGATSNYCTPSAQWPCAPGKSYYGRGPIQLSHNYNYGPAGRAIGVDLLRNPDLVATDPTVSFKTAMWFWMTAQAPKPSSHAVITGQWSPSGTDRAAGRVPGFGVITNIVNGGIECGHGQDSRVADRIGFYKRYCDILGVGYGDNLDCYNQRPFA

SEQ ID NO: 68838 - DNA, 1259 bp, Triticum aestivum
  misc_feature (1)..(1259): Ceres Seq. ID no. 13596450
aacgagctctccccgtcccggccccgctccccgccacgccaagtcgacggccgctcgccgccgcccctccctccgcctcgccgtcgccgacctcggccgttcggcccctcccgcgggtgggtgagcggcgagcctcccttgcttctctgtcctgccctgcacggcaagcaagacgagagcgatcggcgtcgggatgctgaggcggcggctgagctcccttctcctccgatccccgtgctcctccgccgtcgcctcctcaatccagcagcagcaccacctcatcctccccacccacgccgagaaaccgccggccctgaatctgctcaggctcttcacatccctagctggaaccgatggtgacaggccgttcatcgcttttgtcttagggggacctgggagtgggaaaggaacgcaatgtagtaggatcgcttcggattttggattttctcatgtgagtgctggtgaccttctgcggaatgaaatatctgctggcactgatcaaggggagtggatcctggagataataagggaagggaggattgttccatcagagataaccgttgaactggtcagaaaagcaattgaatcaagcactgctaaacgggttcttatcgatggttttccaaggtgtgaggaaaacagaatcgcctttgaaaaaataactggaactgaaccagaccttgtgcttttttttgactgtcctgaggatgagatggttaaacgtctcctaagccgtaaccagggacgagttgatgataacattgagacaatcaagaagcgtctaaaagtgttcgagagtttgaatcttcctgttgttgagtactactcttcaaggggaaaggcacacaagataaacgcaacgggaactgaagatgaaatctttgaagcagttcgcaagttgttttcctccttaaggctatgaggaggctgtcgtcgtcttccgcaggagcctgagggaattagaattgcgcctggcggaaatactcttttctttccttttacttttacatctcttagcacaataattgtacatattctgatacacggtctatgcctgtgaaaacagagggccactggtgaaacgcccagcctgctatgataaacccttaccctcacgctctcgtcgtgcgccacggtataacccatgacacgctggtatggcagcagcaaaactgctacgacgatatttttcttaccagaatatgatataattgtaraaaaaaaaaraaaaaagctctatcgataccgtcgacctcgag

SEQ ID NO: 68839 - protein, 242 aa, Triticum aestivum
  peptide (1)..(242): Ceres Seq. ID no. 15221881
  misc_feature (63)..(216): Pfam Name: Adenylate kinase Pfam Description: Adenylate kinase
  misc_feature (55)..(238): Homolog of NCBI NO: 6683811 NR Description: UMP/CMP kinase a [Oryza sativa]
  misc_feature (55)..(238): Homolog of NCBI NO: 6683813 NR Description: UMP/CMP kinase b [Oryza sativa]
  misc_feature (60)..(239): Homolog of NCBI NO: 18411518 NR Description: URIDYLATE KINASE-related protein [Arabidopsis
  misc_feature (60)..(239): Homolog of NCBI NO: 11260827 NR Description: URIDYLATE KINASE-like protein - Arabidopsis
  misc_feature (58)..(218): Homolog of NCBI NO: 7484791 NR Description: adenylate kinase homolog F24A6.120 - Arabidopsis
  misc_feature (51)..(238): Homolog of NCBI NO: 30690246 NR Description: predicted protein [Arabidopsis thaliana]
  misc_feature (51)..(238): Homolog of NCBI NO: 30690243 NR Description: predicted protein [Arabidopsis thaliana]
  misc_feature (58)..(239): Homolog of NCBI NO: 30686829 NR Description: UMP/CMP kinase like protein [Arabidopsis thaliana]
  misc_feature (58)..(240): Homolog of NCBI NO: 3913952 NR Description: ADENYLATE KINASE (ATP-AMP TRANSPHOSPHORYLASE)
  misc_feature (1)..(241): Homolog of NCBI NO: 38346873 NR Description: OSJNBb0004G23.5 [Oryza sativa (japonica
MLRRRLSSLLLRSPCSSAVASSIQQQHHLILPTHAEKPPALNLLRLFTSLAGTDGDRPFIAFVLGGPGSGKGTQCSRIASDFGFSHVSAGDLLRNEISAGTDQGEWILEIIREGRIVPSEITVELVRKAIESSTAKRVLIDGFPRCEENRIAFEKITGTEPDLVLFFDCPEDEMVKRLLSRNQGRVDDNIETIKKRLKVFESLNLPVVEYYSSRGKAHKINATGTEDEIFEAVRKLFSSLRL

SEQ ID NO: 68840 - DNA, 1345 bp, Triticum aestivum
  misc_feature (1)..(1345): Ceres Seq. ID no. 15226238
atacaactactgtcaaaggtgtgcgtgcgtgcgtgagagagaacctgctttgcttttgcgtgagctgcagtgcagggcatacgggtcgggactgacccggggtggtggtggtgtatataaccagtcgtcacgcacaagaatcatcctagcccctctctctctctctgagcttctctctgcttcatcaagcgagcgaacgacccaccgctagtctgctcggaagaacggaaaggaaaagaaaagaagatggccgtctctgtccgcctcggctcctccccatccatccttctgctcccgctcctcttcctcttcaccatcccgtcgctcgcctccgcctgcgaccgctgcgcgcgccactccaaggccgcctactacacctcctcgctcaccctcgccgccggctcctgcgggtacggcacggcggccgcctccttcaacggcggcctgctcgccgccgccggcccggccctgtaccggggcggcgtcggctgcggcgcctgcttccaggtgaggtgcaaggacaagaagctctgcagcggcgccggcgccagggtcgtggtgacggaccgcgccaggatgaggacgaaccgcacggacctggtgctgagcagcccggcgttcgccgccatggcccgccccggcatggccgcgcggctcaccaagctccgcgccgtcgatgtcgagtacaagagggtgccgtgcgagtacaggggcaagaacctctcggtgcgggtggaggagcggagccgcgcgcccagcgagctcgccgtccggttcctctaccagggcggccagaccgacatcgtcgccgtcgacgtcgcgcaggtcgggtcgtcgagctggaagttcatgacgcgggagcacgggccggcgtggagcacgcggcaggcgccggcggggccgctgcagttcagggtggtggtgaccggcgggtacgacgggaagtgggtgtgggccgaccgggaggtgctgcccagccggtggcgcgccggcgaggtctacgacacgggggtccagatcaccgacgtcgcgcaggagggctgctttccatgcgacacgcaggagtggaggtgaaagcaggcaggctagtaaacaaacaaagagccaaagaagaagctgatggctcctcgttttggccgggctatgcatcacagcacaaggccacaccacaccagagatgattagtttagtctaacagttaacaccagatgatgactcatagggtcctcctgatgatccatcggccacttttgctgccgccgctcgttttcttttctctttgttttgtgagccttctgtatgtacatgagctgctgacgtgaatcaagataagtaaattaagtag

SEQ ID NO: 68841 - protein, 275 aa, Triticum aestivum
  peptide (1)..(275): Ceres Seq. ID no. 15226239
  misc_feature (159)..(243): Pfam Name: Pollen allergen Pfam Description: Pollen allergen
  misc_feature (13)..(269): Homolog of NCBI NO: 20138389 NR Description: Expansin-like 3 precursor (At-EXPL3)
  misc_feature (13)..(274): Homolog of NCBI NO: 15233841 NR Description: expansin protein family (EXPL2) [Arabidopsis
  misc_feature (13)..(274): Homolog of NCBI NO: 21555265 NR Description: Expansin-like 1 precursor (At-EXPL1)
  misc_feature (13)..(274): Homolog of NCBI NO: 15231303 NR Description: expansin protein family (EXPL1) [Arabidopsis
  misc_feature (10)..(275): Homolog of NCBI NO: 33111959 NR Description: expansin-like protein [Quercus robur]
  misc_feature (1)..(275): Homolog of NCBI NO: 34901594 NR Description: P0571D04.11 [Oryza sativa (japonica
  misc_feature (62)..(275): Homolog of NCBI NO: 25136297 NR Description: expansin-like protein [Oryza sativa (japonica
  misc_feature (3)..(275): Homolog of NCBI NO: 37536544 NR Description: putative pollen allergen [Oryza sativa (japonica
  misc_feature (1)..(275): Homolog of NCBI NO: 20502989 NR Description: Putative pollen allergen [Oryza sativa (japonica
  misc_feature (1)..(275): Homolog of NCBI NO: 21654743 NR Description: expansin-like protein 1 [Oryza sativa]
MAVSVRLGSSPSILLLPLLFLFTIPSLASACDRCARHSKAAYYTSSLTLAAGSCGYGTAAASFNGGLLAAAGPALYRGGVGCGACFQVRCKDKKLCSGAGARVVVTDRARMRTNRTDLVLSSPAFAAMARPGMAARLTKLRAVDVEYKRVPCEYRGKNLSVRVEERSRAPSELAVRFLYQGGQTDIVAVDVAQVGSSSWKFMTREHGPAWSTRQAPAGPLQFRVVVTGGYDGKWVWADREVLPSRWRAGEVYDTGVQITDVAQEGCFPCDTQEWR

SEQ ID NO: 68842 - protein, 165 aa, Triticum aestivum
  peptide (1)..(165): Ceres Seq. ID no. 15226240
  misc_feature (49)..(133): Pfam Name: Pollen allergen Pfam Description: Pollen allergen
  misc_feature (1)..(159): Homolog of NCBI NO: 20138389 NR Description: Expansin-like 3 precursor (At-EXPL3)
  misc_feature (1)..(164): Homolog of NCBI NO: 15233841 NR Description: expansin protein family (EXPL2) [Arabidopsis
  misc_feature (1)..(164): Homolog of NCBI NO: 21555265 NR Description: Expansin-like 1 precursor (At-EXPL1)
  misc_feature (1)..(164): Homolog of NCBI NO: 15231303 NR Description: expansin protein family (EXPL1) [Arabidopsis
  misc_feature (1)..(165): Homolog of NCBI NO: 33111959 NR Description: expansin-like protein [Quercus robur]
  misc_feature (1)..(165): Homolog of NCBI NO: 34901594 NR Description: P0571D04.11 [Oryza sativa (japonica
  misc_feature (1)..(165): Homolog of NCBI NO: 25136297 NR Description: expansin-like protein [Oryza sativa (japonica
  misc_feature (1)..(165): Homolog of NCBI NO: 37536544 NR Description: putative pollen allergen [Oryza sativa (japonica
  misc_feature (1)..(165): Homolog of NCBI NO: 20502989 NR Description: Putative pollen allergen [Oryza sativa (japonica
  misc_feature (1)..(165): Homolog of NCBI NO: 21654743 NR Description: expansin-like protein 1 [Oryza sativa]
MRTNRTDLVLSSPAFAAMARPGMAARLTKLRAVDVEYKRVPCEYRGKNLSVRVEERSRAPSELAVRFLYQGGQTDIVAVDVAQVGSSSWKFMTREHGPAWSTRQAPAGPLQFRVVVTGGYDGKWVWADREVLPSRWRAGEVYDTGVQITDVAQEGCFPCDTQEWR

SEQ ID NO: 68843 - protein, 148 aa, Triticum aestivum
  peptide (1)..(148): Ceres Seq. ID no. 15226241
  misc_feature (32)..(116): Pfam Name: Pollen allergen Pfam Description: Pollen allergen
  misc_feature (1)..(142): Homolog of NCBI NO: 20138389 NR Description: Expansin-like 3 precursor (At-EXPL3)
  misc_feature (1)..(147): Homolog of NCBI NO: 15233841 NR Description: expansin protein family (EXPL2) [Arabidopsis
  misc_feature (1)..(147): Homolog of NCBI NO: 21555265 NR Description: Expansin-like 1 precursor (At-EXPL1)
  misc_feature (1)..(147): Homolog of NCBI NO: 15231303 NR Description: expansin protein family (EXPL1) [Arabidopsis
  misc_feature (1)..(148): Homolog of NCBI NO: 33111959 NR Description: expansin-like protein [Quercus robur]
  misc_feature (1)..(148): Homolog of NCBI NO: 34901594 NR Description: P0571D04.11 [Oryza sativa (japonica
  misc_feature (1)..(148): Homolog of NCBI NO: 25136297 NR Description: expansin-like protein [Oryza sativa (japonica
  misc_feature (1)..(148): Homolog of NCBI NO: 37536544 NR Description: putative pollen allergen [Oryza sativa (japonica
  misc_feature (1)..(148): Homolog of NCBI NO: 20502989 NR Description: Putative pollen allergen [Oryza sativa (japonica
  misc_feature (1)..(148): Homolog of NCBI NO: 21654743 NR Description: expansin-like protein 1 [Oryza sativa]
MARPGMAARLTKLRAVDVEYKRVPCEYRGKNLSVRVEERSRAPSELAVRFLYQGGQTDIVAVDVAQVGSSSWKFMTREHGPAWSTRQAPAGPLQFRVVVTGGYDGKWVWADREVLPSRWRAGEVYDTGVQITDVAQEGCFPCDTQEWR

SEQ ID NO: 68844 - DNA, 1406 bp, Triticum aestivum
  misc_feature (1)..(1406): Ceres Seq. ID no. 12614832
gactaatcccttccatcccgcacccttcgtctaatcgtccccagcccatggaggattccaaggggagcgacggcggcggcgagaggcccggcgccgaccacaaccctatcccggatcagccgccgccgctcgctgctcccggaggagggcgcgatgccgccgcggctgctgctgctgctgcggcggcggcggcggccttggccgaggacgaggcgcggcgcccgttcacggccctcagccaggtcgacgccgacctagccctggcgcgcgtcctccaggagcaggaacgggcgtatatgatgctccggatgaacggagtcggcggcggcggcggcgagggcagcgactacgggagctcggaggccgggagctacgagtacgacgaggatgccgaggaggactacgaggaggagctcgagaaccacctccgcgtccaccaccacgagcacccaggcggtggcgagggcgatggggacgatgatctcgaggctgatggcgagggcaagggtgagggtgagggcgaggatgaaggcgagggtgacggttctgaagagagcgagtacgaggaggaggggttcgatgaggacgaggaggtggaggatgtggatctagacccggcagagtacgaggacgacgaggcttatgcgcgggcgcttcaggacgctgaggagcgtgaggttgccgcgcggcttatggctctcgctgggatcagcgattggcgggcggtggagcatgtcgaggatcagataaacgacgcgcaggattcatggcaagaggttgatccagatgagtactcttatgaggagttagttgcattgggtgaagtagttggcacagaaagtagaggtctctctgctgatacacttgcttccttaccttcagtaacttacaagacaaaagatatgcaagatggcaacacagaacaatgtgtaatttgtcgtgtggaatttgaggaaggtgaatctttggttgcacttccctgcaatcattcataccatcctgactgcattaatcagtggcttcaaataaataaggtatgccctatgtgtagcgcagaagtttctacctcagcaagcaagcaggcatgaccaacagtcgttggtaaaccaacttcatcttcagaaaagaaaagaaaaacaccagttgttggcacttggtaggagtatcgagtatgtagtggcatcattctagtatccctgatgtttaaaccaaagcaaggcagcagaatttctacagtacaaacttgcaaggggaccagggacatggagcattttttttatgccttgccgctgatgctccgcgttctcttactcttgtacactaactgtgttactaccgtcgatcaattttttcttttctcagtgtatattatgagtatcgcattaatgcattgggatttagagatt

SEQ ID NO: 68845 - protein, 361 aa, Triticum aestivum
  peptide (1)..(361): Ceres Seq. ID no. 12614833
  misc_feature (309)..(349): Pfam Name: Zinc finger, C3HC4 type (RING finger) Pfam Description: Zinc finger, C3HC4 type (RING finger)
  misc_feature (259)..(360): Homolog of NCBI NO: 11358785 NR Description: RING-H2 finger protein RHG1a
  misc_feature (71)..(223): Homolog of NCBI NO: 21536693 NR Description: unknown [Arabidopsis thaliana]
  misc_feature (71)..(223): Homolog of NCBI NO: 18402411 NR Description: expressed protein
  misc_feature (178)..(353): Homolog of NCBI NO: 34898016 NR Description: ESTs C26000(C11448),AU082130(C11448) correspond a region of the predicted gene.~Similar to mRNA for zinc-finger
  misc_feature (211)..(353): Homolog of NCBI NO: 38567912 NR Description: OSJNBa0088I22.8 [Oryza sativa (japonica
  misc_feature (190)..(356): Homolog of NCBI NO: 15232746 NR Description: zinc-finger protein-like protein; protein id:
  misc_feature (241)..(353): Homolog of NCBI NO: 22331928 NR Description: putative protein; protein id: At3g63530.1
  misc_feature (154)..(357): Homolog of NCBI NO: 10334499 NR Description: hypothetical protein [Cicer arietinum]
  misc_feature (158)..(361): Homolog of NCBI NO: 21536693 NR Description: unknown [Arabidopsis thaliana]
  misc_feature (158)..(361): Homolog of NCBI NO: 18402411 NR Description: expressed protein
LIPSIPHPSSNRPQPMEDSKGSDGGGERPGADHNPIPDQPPPLAAPGGGRDAAAAAAAAAAAAAALAEDEARRPFTALSQVDADLALARVLQEQERAYMMLRMNGVGGGGGEGSDYGSSEAGSYEYDEDAEEDYEEELENHLRVHHHEHPGGGEGDGDDDLEADGEGKGEGEGEDEGEGDGSEESEYEEEGFDEDEEVEDVDLDPAEYEDDEAYARALQDAEEREVAARLMALAGISDWRAVEHVEDQINDAQDSWQEVDPDEYSYEELVALGEVVGTESRGLSADTLASLPSVTYKTKDMQDGNTEQCVICRVEFEEGESLVALPCNHSYHPDCINQWLQINKVCPMCSAEVSTSASKQA

SEQ ID NO: 68846 - protein, 346 aa, Triticum aestivum
  peptide (1)..(346): Ceres Seq. ID no. 12614834
  misc_feature (294)..(334): Pfam Name: Zinc finger, C3HC4 type (RING finger) Pfam Description: Zinc finger, C3HC4 type (RING finger)
  misc_feature (244)..(345): Homolog of NCBI NO: 11358785 NR Description: RING-H2 finger protein RHG1a
  misc_feature (56)..(208): Homolog of NCBI NO: 21536693 NR Description: unknown [Arabidopsis thaliana]
  misc_feature (56)..(208): Homolog of NCBI NO: 18402411 NR Description: expressed protein
  misc_feature (163)..(338): Homolog of NCBI NO: 34898016 NR Description: ESTs C26000(C11448),AU082130(C11448) correspond a region of the predicted gene.~Similar to mRNA for zinc-finger
  misc_feature (196)..(338): Homolog of NCBI NO: 38567912 NR Description: OSJNBa0088I22.8 [Oryza sativa (japonica
  misc_feature (175)..(341): Homolog of NCBI NO: 15232746 NR Description: zinc-finger protein-like protein; protein id:
  misc_feature (226)..(338): Homolog of NCBI NO: 22331928 NR Description: putative protein; protein id: At3g63530.1
  misc_feature (139)..(342): Homolog of NCBI NO: 10334499 NR Description: hypothetical protein [Cicer arietinum]
  misc_feature (143)..(346): Homolog of NCBI NO: 21536693 NR Description: unknown [Arabidopsis thaliana]
  misc_feature (143)..(346): Homolog of NCBI NO: 18402411 NR Description: expressed protein
MEDSKGSDGGGERPGADHNPIPDQPPPLAAPGGGRDAAAAAAAAAAAAAALAEDEARRPFTALSQVDADLALARVLQEQERAYMMLRMNGVGGGGGEGSDYGSSEAGSYEYDEDAEEDYEEELENHLRVHHHEHPGGGEGDGDDDLEADGEGKGEGEGEDEGEGDGSEESEYEEEGFDEDEEVEDVDLDPAEYEDDEAYARALQDAEEREVAARLMALAGISDWRAVEHVEDQINDAQDSWQEVDPDEYSYEELVALGEVVGTESRGLSADTLASLPSVTYKTKDMQDGNTEQCVICRVEFEEGESLVALPCNHSYHPDCINQWLQINKVCPMCSAEVSTSASKQA

SEQ ID NO: 68847 - protein, 263 aa, Triticum aestivum
  peptide (1)..(263): Ceres Seq. ID no. 12614835
  misc_feature (211)..(251): Pfam Name: Zinc finger, C3HC4 type (RING finger) Pfam Description: Zinc finger, C3HC4 type (RING finger)
  misc_feature (161)..(262): Homolog of NCBI NO: 11358785 NR Description: RING-H2 finger protein RHG1a
  misc_feature (1)..(125): Homolog of NCBI NO: 21536693 NR Description: unknown [Arabidopsis thaliana]
  misc_feature (1)..(125): Homolog of NCBI NO: 18402411 NR Description: expressed protein
  misc_feature (80)..(255): Homolog of NCBI NO: 34898016 NR Description: ESTs C26000(C11448),AU082130(C11448) correspond a region of the predicted gene.~Similar to mRNA for zinc-finger
  misc_feature (113)..(255): Homolog of NCBI NO: 38567912 NR Description: OSJNBa0088I22.8 [Oryza sativa (japonica
  misc_feature (92)..(258): Homolog of NCBI NO: 15232746 NR Description: zinc-finger protein-like protein; protein id:
  misc_feature (143)..(255): Homolog of NCBI NO: 22331928 NR Description: putative protein; protein id: At3g63530.1
  misc_feature (56)..(259): Homolog of NCBI NO: 10334499 NR Description: hypothetical protein [Cicer arietinum]
  misc_feature (60)..(263): Homolog of NCBI NO: 21536693 NR Description: unknown [Arabidopsis thaliana]
  misc_feature (60)..(263): Homolog of NCBI NO: 18402411 NR Description: expressed protein
MMLRMNGVGGGGGEGSDYGSSEAGSYEYDEDAEEDYEEELENHLRVHHHEHPGGGEGDGDDDLEADGEGKGEGEGEDEGEGDGSEESEYEEEGFDEDEEVEDVDLDPAEYEDDEAYARALQDAEEREVAARLMALAGISDWRAVEHVEDQINDAQDSWQEVDPDEYSYEELVALGEVVGTESRGLSADTLASLPSVTYKTKDMQDGNTEQCVICRVEFEEGESLVALPCNHSYHPDCINQWLQINKVCPMCSAEVSTSASKQA

SEQ ID NO: 68848 - DNA, 1417 bp, Triticum aestivum
  misc_feature (1)..(1417): Ceres Seq. ID no. 12625092
gaataagtatatctcgagaaagaaaataaaaatatcacaccactagtatggcgctgctgagcccgcgtgttccgcggctgcccctcgccgcccactccgccggcgccggcgccggatccctccggtgctgcgtccgggttgctgcctccgctgcgcgatgccaagtgacggcgtcgggaagcgtggcggcgggctcctcgtcgtcgtcggagctggaggccatccggtggggcagcgccaagctgcagggagctcgcgaggagatggaggacgaggtcgtcctccgccctgactccctcctccacggcttctccttcgccgccgtcctcgacggccacgccggtttctccaccgtccagttcctgagggacgagttgttcaaggaatgcgcagccgcgttggacgggggcgcggtgcttaacaccaagaatctcgaggccatcacggactcgatcaggcgtgcctttgccaccatggacgccaacctctccacctggcttcagcaaatggataaggaagacgactctggtgccacggccacggccttgtttctgaggaacgatgtccttgttgtctcgcacattggcgactcctgcttggtcatatcgcgtggtggaagacctcagtctctgacaaattttcatcgaccatacgggaacaacaaaacatcccttgaagaggtcaagcggattagggcagcaggtggatggattcgtgatggacgcgtatgtggagacatttctgtatctcgtgcttttggagacataagatttaaaacacggaagaatgagatgctagtaaaaggagttaaagaaggaagatggactgaaaaattcgtttcacgaataaattttaaaggggatctaataatctcttcacctgacgtatctctggtggagcttggaccggatgtggaatttgttttggtagcaaccgatggtctttgggattacattaaaagcactgaagctgtagcttttgtcagagatcaactatgtcaacatggagatgtccagcgggcctgtgaggcgcttggggagaaagctctggatcggcggtcacaagacaatattagcatagtcatagctgacttggggaggacaaactggcaggagttgcccgttccaaggccaaacgtgttgttggagctaagtcaagcagttgcgactgtaggggctgtatcagtaggaatttggatttcatcgcttctcactttgcaataggcctagttaaggtcgggggtgacattttcacatcttcggctccagctgcaaatatatatgtatatccttataggtaattagtttcctgattaaactgttcagtggtatctggactgatgaaaagaagaagaaaaacttgtgctccagctgctatctggcagcgtactaccatagggacctgtgagacgcccgtc

SEQ ID NO: 68849 - protein, 391 aa, Triticum aestivum
  peptide (1)..(391): Ceres Seq. ID no. 12625093
  misc_feature (59)..(342): Pfam Name: Protein phosphatase 2C Pfam Description: Protein phosphatase 2C
  misc_feature (41)..(243): Homolog of NCBI NO: 25355102 NR Description: protein T23F11.1 [imported] - Caenorhabditis
  misc_feature (272)..(346): Homolog of NCBI NO: 33944913 NR Description: protein phosphatase 2C, putative [Trypanosoma
  misc_feature (33)..(243): Homolog of NCBI NO: 33944913 NR Description: protein phosphatase 2C, putative [Trypanosoma
  misc_feature (1)..(221): Homolog of NCBI NO: 34913920 NR Description: putative protein phosphatase-2C
  misc_feature (1)..(326): Homolog of NCBI NO: 30687740 NR Description: Protein phosphatase 2C PPH1 (PPH1) (PP2C)
  misc_feature (1)..(334): Homolog of NCBI NO: 30687733 NR Description: Protein phosphatase 2C PPH1 (PPH1) (PP2C)
  misc_feature (17)..(358): Homolog of NCBI NO: 995839 NR Description: protein phosphatase homolog
  misc_feature (1)..(389): Homolog of NCBI NO: 7488010 NR Description: phosphoprotein phosphatase homolog T27E11.40 -
  misc_feature (1)..(389): Homolog of NCBI NO: 15234274 NR Description: protein phosphatase homolog (PPH1)
  misc_feature (32)..(390): Homolog of NCBI NO: 3643090 NR Description: protein phosphatase-2C; PP2C [Mesembryanthemum
MALLSPRVPRLPLAAHSAGAGAGSLRCCVRVAASAARCQVTASGSVAAGSSSSSELEAIRWGSAKLQGAREEMEDEVVLRPDSLLHGFSFAAVLDGHAGFSTVQFLRDELFKECAAALDGGAVLNTKNLEAITDSIRRAFATMDANLSTWLQQMDKEDDSGATATALFLRNDVLVVSHIGDSCLVISRGGRPQSLTNFHRPYGNNKTSLEEVKRIRAAGGWIRDGRVCGDISVSRAFGDIRFKTRKNEMLVKGVKEGRWTEKFVSRINFKGDLIISSPDVSLVELGPDVEFVLVATDGLWDYIKSTEAVAFVRDQLCQHGDVQRACEALGEKALDRRSQDNISIVIADLGRTNWQELPVPRPNVLLELSQAVATVGAVSVGIWISSLLTLQ

SEQ ID NO: 68850 - protein, 319 aa, Triticum aestivum
  peptide (1)..(319): Ceres Seq. ID no. 12625094
  misc_feature (1)..(270): Pfam Name: Protein phosphatase 2C Pfam Description: Protein phosphatase 2C
  misc_feature (1)..(171): Homolog of NCBI NO: 25355102 NR Description: protein T23F11.1 [imported] - Caenorhabditis
  misc_feature (200)..(274): Homolog of NCBI NO: 33944913 NR Description: protein phosphatase 2C, putative [Trypanosoma
  misc_feature (1)..(171): Homolog of NCBI NO: 33944913 NR Description: protein phosphatase 2C, putative [Trypanosoma
  misc_feature (1)..(149): Homolog of NCBI NO: 34913920 NR Description: putative protein phosphatase-2C
  misc_feature (1)..(254): Homolog of NCBI NO: 30687740 NR Description: Protein phosphatase 2C PPH1 (PPH1) (PP2C)
  misc_feature (1)..(262): Homolog of NCBI NO: 30687733 NR Description: Protein phosphatase 2C PPH1 (PPH1) (PP2C)
  misc_feature (1)..(286): Homolog of NCBI NO: 995839 NR Description: protein phosphatase homolog
  misc_feature (1)..(317): Homolog of NCBI NO: 7488010 NR Description: phosphoprotein phosphatase homolog T27E11.40 -
  misc_feature (1)..(317): Homolog of NCBI NO: 15234274 NR Description: protein phosphatase homolog (PPH1)
  misc_feature (1)..(318): Homolog of NCBI NO: 3643090 NR Description: protein phosphatase-2C; PP2C [Mesembryanthemum
MEDEVVLRPDSLLHGFSFAAVLDGHAGFSTVQFLRDELFKECAAALDGGAVLNTKNLEAITDSIRRAFATMDANLSTWLQQMDKEDDSGATATALFLRNDVLVVSHIGDSCLVISRGGRPQSLTNFHRPYGNNKTSLEEVKRIRAAGGWIRDGRVCGDISVSRAFGDIRFKTRKNEMLVKGVKEGRWTEKFVSRINFKGDLIISSPDVSLVELGPDVEFVLVATDGLWDYIKSTEAVAFVRDQLCQHGDVQRACEALGEKALDRRSQDNISIVIADLGRTNWQELPVPRPNVLLELSQAVATVGAVSVGIWISSLLTLQ

SEQ ID NO: 68851 - protein, 249 aa, Triticum aestivum
  peptide (1)..(249): Ceres Seq. ID no. 12625095
  misc_feature (1)..(200): Pfam Name: Protein phosphatase 2C Pfam Description: Protein phosphatase 2C
  misc_feature (1)..(101): Homolog of NCBI NO: 25355102 NR Description: protein T23F11.1 [imported] - Caenorhabditis
  misc_feature (130)..(204): Homolog of NCBI NO: 33944913 NR Description: protein phosphatase 2C, putative [Trypanosoma
  misc_feature (1)..(101): Homolog of NCBI NO: 33944913 NR Description: protein phosphatase 2C, putative [Trypanosoma
  misc_feature (1)..(79): Homolog of NCBI NO: 34913920 NR Description: putative protein phosphatase-2C
  misc_feature (1)..(184): Homolog of NCBI NO: 30687740 NR Description: Protein phosphatase 2C PPH1 (PPH1) (PP2C)
  misc_feature (1)..(192): Homolog of NCBI NO: 30687733 NR Description: Protein phosphatase 2C PPH1 (PPH1) (PP2C)
  misc_feature (1)..(216): Homolog of NCBI NO: 995839 NR Description: protein phosphatase homolog
  misc_feature (1)..(247): Homolog of NCBI NO: 7488010 NR Description: phosphoprotein phosphatase homolog T27E11.40 -
  misc_feature (1)..(247): Homolog of NCBI NO: 15234274 NR Description: protein phosphatase homolog (PPH1)
  misc_feature (1)..(248): Homolog of NCBI NO: 3643090 NR Description: protein phosphatase-2C; PP2C [Mesembryanthemum
MDANLSTWLQQMDKEDDSGATATALFLRNDVLVVSHIGDSCLVISRGGRPQSLTNFHRPYGNNKTSLEEVKRIRAAGGWIRDGRVCGDISVSRAFGDIRFKTRKNEMLVKGVKEGRWTEKFVSRINFKGDLIISSPDVSLVELGPDVEFVLVATDGLWDYIKSTEAVAFVRDQLCQHGDVQRACEALGEKALDRRSQDNISIVIADLGRTNWQELPVPRPNVLLELSQAVATVGAVSVGIWISSLLTLQ

SEQ ID NO: 68852 - DNA, 1921 bp, Triticum aestivum
  misc_feature (1)..(1921): Ceres Seq. ID no. 15170095
aaaaaaaagatccgaaacccctgacctgcgcgcctgtccatcccagcatggccgccgcctcgtcctcctcctgcggcggcgccggctgcggggcccgctgctcctcctccacctcgtcatccgtagaggatgctccggaggggattctgggccgtctctccatatccggtgccgccgcctcctgcggcaagtgcggcggcggcgccgtgttgccggaggcgtcggtctgtgcggagagtgcttgcgggcccagctgttcgggaagttcaagctcgccgtcacaagcaacgccatggttcggccaaccgactccgtcctcgtcgccttctccggcggccccgcctctagggttgctctgcaatttatacatgagatgcggtccaaggcaatcgaaagctgggacgccagcaattcgcaagccctaccggtcttcaatgtcggggtggcgttcgttgacgagagtgttttgttgtcgaagcccgaatgcgaagttgagcaggcaactgaagatattaagtcaattgtgtcgagtttgttgccgggagataacgcaatgcacattgcctctcttgatgacgtgttctccccggaatcaaaagacggtgaaggcaggctgagggagctagttggaatgattactgatgatactgggagggaggatcttcttcagtgcttgcgcatgctttcgttgcagaagattgcactggaaaatgggtacacaaagatcatgctgggatcatgtgcttctacaatagcatgtcatgtgctatctgcaacagtaaagggccaaggttattccttaccagctgatatccaatatgttgatacacggtgggaagtgcctgtcgttcttccacttcgtgattgcctggcccaagagcttagcctgctctgtgaatttgatagtttaaagacacagcaacttcttgataggccttgcagtggcatcaatggcttagtcgcatcttttgttgcacgactaagggaggagaatccttctcgtgagcatactattgtaagaactgcacaaaaacttaagccattcccttttaacaagttctcagcaaatggctatcatgatttcctgccgtcgcggctgcgtcccaagttccaggatgttgatagcgatgagtctgctttctctgaggttctctgcctgatatgtcgaagtccattcagtgaatcagaactccagaatgttgaaagcacaaggcacacgtctcagaagaaaattgatctgtatactgcttattgctgtcaaagctgtcatttccagattctaccaggaggtagagacctgtatgaccatttcttttcactactaccaaggttctggactgagagagtagatactgcatctgccagccatagctcgctaagagatcaaatagaagactatcttcttgaagacgatgatgatgggaactgacacttgttcattgagtgaatcccaaacttacttgccagaagcctgcagagattccttcctagttgggcctcacaaatcatgacataaaccaaacttgcttgggataacagtgttcgcatctagtaaggcactggtttattcagacttctgccatattcttagaattaccctccattatattttttatttaattttctggtgtacctgtaagtcctccctcaagttaaaacatgtctgaaacttgtagtgataaaggaaaccatcacttgccagcagttttgcactgatctcaaacagctgactttgggtagctgcaggctcccaacttccatgtgattacagtattctgattggtctcacctactgtaccaactatttgcctgcaagattgtaatcagatgaatttacaaaatgggtttacaacaactattgtgctgtataaacttttgtactcgcttgattataatctattacactgttgcatttgtttcg

SEQ ID NO: 68853 - protein, 475 aa, Triticum aestivum
  peptide (1)..(475): Ceres Seq. ID no. 15170096
  misc_feature (77)..(345): Homolog of NCBI NO: 31213451 NR Description: ENSANGP00000021847 [Anopheles gambiae]
  misc_feature (70)..(153): Homolog of NCBI NO: 39645134 NR Description: Unknown (protein for IMAGE:3877613) [Homo sapiens]
  misc_feature (205)..(349): Homolog of NCBI NO: 39645134 NR Description: Unknown (protein for IMAGE:3877613) [Homo sapiens]
  misc_feature (303)..(442): Homolog of NCBI NO: 7486391 NR Description: hypothetical protein F4B14.180 - Arabidopsis
  misc_feature (39)..(301): Homolog of NCBI NO: 7486391 NR Description: hypothetical protein F4B14.180 - Arabidopsis
  misc_feature (39)..(473): Homolog of NCBI NO: 18419746 NR Description: expressed protein [Arabidopsis thaliana]
  misc_feature (39)..(473): Homolog of NCBI NO: 21553405 NR Description: unknown [Arabidopsis thaliana]
KKRSETPDLRACPSQHGRRLVLLLRRRRLRGPLLLLHLVIRRGCSGGDSGPSLHIRCRRLLRQVRRRRRVAGGVGLCGECLRAQLFGKFKLAVTSNAMVRPTDSVLVAFSGGPASRVALQFIHEMRSKAIESWDASNSQALPVFNVGVAFVDESVLLSKPECEVEQATEDIKSIVSSLLPGDNAMHIASLDDVFSPESKDGEGRLRELVGMITDDTGREDLLQCLRMLSLQKIALENGYTKIMLGSCASTIACHVLSATVKGQGYSLPADIQYVDTRWEVPVVLPLRDCLAQELSLLCEFDSLKTQQLLDRPCSGINGLVASFVARLREENPSREHTIVRTAQKLKPFPFNKFSANGYHDFLPSRLRPKFQDVDSDESAFSEVLCLICRSPFSESELQNVESTRHTSQKKIDLYTAYCCQSCHFQILPGGRDLYDHFFSLLPRFWTERVDTASASHSSLRDQIEDYLLEDDDDGN

SEQ ID NO: 68854 - protein, 378 aa, Triticum aestivum
  peptide (1)..(378): Ceres Seq. ID no. 15170097
  misc_feature (1)..(248): Homolog of NCBI NO: 31213451 NR Description: ENSANGP00000021847 [Anopheles gambiae]
  misc_feature (1)..(56): Homolog of NCBI NO: 39645134 NR Description: Unknown (protein for IMAGE:3877613) [Homo sapiens]
  misc_feature (108)..(252): Homolog of NCBI NO: 39645134 NR Description: Unknown (protein for IMAGE:3877613) [Homo sapiens]
  misc_feature (206)..(345): Homolog of NCBI NO: 7486391 NR Description: hypothetical protein F4B14.180 - Arabidopsis
  misc_feature (1)..(204): Homolog of NCBI NO: 7486391 NR Description: hypothetical protein F4B14.180 - Arabidopsis
  misc_feature (1)..(376): Homolog of NCBI NO: 18419746 NR Description: expressed protein [Arabidopsis thaliana]
  misc_feature (1)..(376): Homolog of NCBI NO: 21553405 NR Description: unknown [Arabidopsis thaliana]
MVRPTDSVLVAFSGGPASRVALQFIHEMRSKAIESWDASNSQALPVFNVGVAFVDESVLLSKPECEVEQATEDIKSIVSSLLPGDNAMHIASLDDVFSPESKDGEGRLRELVGMITDDTGREDLLQCLRMLSLQKIALENGYTKIMLGSCASTIACHVLSATVKGQGYSLPADIQYVDTRWEVPVVLPLRDCLAQELSLLCEFDSLKTQQLLDRPCSGINGLVASFVARLREENPSREHTIVRTAQKLKPFPFNKFSANGYHDFLPSRLRPKFQDVDSDESAFSEVLCLICRSPFSESELQNVESTRHTSQKKIDLYTAYCCQSCHFQILPGGRDLYDHFFSLLPRFWTERVDTASASHSSLRDQIEDYLLEDDDDGN

SEQ ID NO: 68855 - protein, 351 aa, Triticum aestivum
  peptide (1)..(351): Ceres Seq. ID no. 15170098
  misc_feature (1)..(221): Homolog of NCBI NO: 31213451 NR Description: ENSANGP00000021847 [Anopheles gambiae]
  misc_feature (1)..(29): Homolog of NCBI NO: 39645134 NR Description: Unknown (protein for IMAGE:3877613) [Homo sapiens]
  misc_feature (81)..(225): Homolog of NCBI NO: 39645134 NR Description: Unknown (protein for IMAGE:3877613) [Homo sapiens]
  misc_feature (179)..(318): Homolog of NCBI NO: 7486391 NR Description: hypothetical protein F4B14.180 - Arabidopsis
  misc_feature (1)..(177): Homolog of NCBI NO: 7486391 NR Description: hypothetical protein F4B14.180 - Arabidopsis
  misc_feature (1)..(349): Homolog of NCBI NO: 18419746 NR Description: expressed protein [Arabidopsis thaliana]
  misc_feature (1)..(349): Homolog of NCBI NO: 21553405 NR Description: unknown [Arabidopsis thaliana]
MRSKAIESWDASNSQALPVFNVGVAFVDESVLLSKPECEVEQATEDIKSIVSSLLPGDNAMHIASLDDVFSPESKDGEGRLRELVGMITDDTGREDLLQCLRMLSLQKIALENGYTKIMLGSCASTIACHVLSATVKGQGYSLPADIQYVDTRWEVPVVLPLRDCLAQELSLLCEFDSLKTQQLLDRPCSGINGLVASFVARLREENPSREHTIVRTAQKLKPFPFNKFSANGYHDFLPSRLRPKFQDVDSDESAFSEVLCLICRSPFSESELQNVESTRHTSQKKIDLYTAYCCQSCHFQILPGGRDLYDHFFSLLPRFWTERVDTASASHSSLRDQIEDYLLEDDDDGN

SEQ ID NO: 68856 - DNA, 773 bp, Triticum aestivum
  misc_feature (1)..(773): Ceres Seq. ID no. 13598422
acgacgaggctccccacaattccctcctcctgcgaacgcatcgtatcccaagaaaccaagaaacagagcaagaaatatcatagagggagcagagtacagagagagaaagagggataagcgcttgcttgctgggagagccatggatgagatcatgaacaagatgggctcctactggctggggcagagggccaacaaagagatgtcgtcggccggtgacgacatcgagtcgctctcaaccagtgtcggggacggagcaaaatggctggtaaacaagctcaagggtaagatgcagaagccgctggcggagctgctccaggagcacgaccttccggcggggctgttcccgcgggaggccaccaactacgagttcgagccggagacgcggcggctgacggtgcacatcccggcggtctgcgaggtcggctacagggacggctccgagctgcgtttcgacaccacggtgaccggcacgctggacaagggcagcctgacgggggtggagggcctcaaagccaaggtgctcgtctgggccagggtcaccgccgtcaaggccgacgccgcaaaggtctacttcgccgtaggcatcaagaagtcgcgcagccgcgaggcatacgaggtcgtcagaggcgccatcaccgtcgacgagttctagattctagtcgcgcgctcgccgagatgattattctaccgaaataattgatcatgtgctcacactacctgctgtaagaggaggatgcttgtaaatggggattcataattcagtttcgcagctc

SEQ ID NO: 68857 - protein, 216 aa, Triticum aestivum
  peptide (1)..(216): Ceres Seq. ID no. 13598423
  misc_feature (78)..(216): Pfam Name: Protein of unknown function, DUF538 Pfam Description: Protein of unknown function, DUF538
  misc_feature (102)..(213): Homolog of NCBI NO: 18397959 NR Description: expressed protein [Arabidopsis thaliana]
  misc_feature (102)..(213): Homolog of NCBI NO: 6041854 NR Description: unknown protein [Arabidopsis thaliana]
  misc_feature (45)..(216): Homolog of NCBI NO: 21553803 NR Description: unknown [Arabidopsis thaliana]
  misc_feature (45)..(216): Homolog of NCBI NO: 18395537 NR Description: expressed protein [Arabidopsis thaliana]
  misc_feature (47)..(216): Homolog of NCBI NO: 34914210 NR Description: OSJNBb0049O23.18 [Oryza sativa (japonica
  misc_feature (47)..(216): Homolog of NCBI NO: 40642817 NR Description: cp protein [Celosia cristata]
  misc_feature (47)..(216): Homolog of NCBI NO: 28466909 NR Description: At5g01610 [Arabidopsis thaliana]
  misc_feature (47)..(216): Homolog of NCBI NO: 18398279 NR Description: expressed protein [Arabidopsis thaliana]
  misc_feature (47)..(216): Homolog of NCBI NO: 15241019 NR Description: expressed protein [Arabidopsis thaliana]
  misc_feature (47)..(216): Homolog of NCBI NO: 15240103 NR Description: hypothetical protein [Arabidopsis thaliana]
RRGSPQFPPPANASYPKKPRNRARNIIEGAEYRERKRDKRLLAGRAMDEIMNKMGSYWLGQRANKEMSSAGDDIESLSTSVGDGAKWLVNKLKGKMQKPLAELLQEHDLPAGLFPREATNYEFEPETRRLTVHIPAVCEVGYRDGSELRFDTTVTGTLDKGSLTGVEGLKAKVLVWARVTAVKADAAKVYFAVGIKKSRSREAYEVVRGAITVDEF

SEQ ID NO: 68858 - protein, 170 aa, Triticum aestivum
  peptide (1)..(170): Ceres Seq. ID no. 13598424
  misc_feature (32)..(170): Pfam Name: Protein of unknown function, DUF538 Pfam Description: Protein of unknown function, DUF538
  misc_feature (56)..(167): Homolog of NCBI NO: 18397959 NR Description: expressed protein [Arabidopsis thaliana]
  misc_feature (56)..(167): Homolog of NCBI NO: 6041854 NR Description: unknown protein [Arabidopsis thaliana]
  misc_feature (1)..(170): Homolog of NCBI NO: 21553803 NR Description: unknown [Arabidopsis thaliana]
  misc_feature (1)..(170): Homolog of NCBI NO: 18395537 NR Description: expressed protein [Arabidopsis thaliana]
  misc_feature (1)..(170): Homolog of NCBI NO: 34914210 NR Description: OSJNBb0049O23.18 [Oryza sativa (japonica
  misc_feature (1)..(170): Homolog of NCBI NO: 40642817 NR Description: cp protein [Celosia cristata]
  misc_feature (1)..(170): Homolog of NCBI NO: 28466909 NR Description: At5g01610 [Arabidopsis thaliana]
  misc_feature (1)..(170): Homolog of NCBI NO: 18398279 NR Description: expressed protein [Arabidopsis thaliana]
  misc_feature (1)..(170): Homolog of NCBI NO: 15241019 NR Description: expressed protein [Arabidopsis thaliana]
  misc_feature (1)..(170): Homolog of NCBI NO: 15240103 NR Description: hypothetical protein [Arabidopsis thaliana]
MDEIMNKMGSYWLGQRANKEMSSAGDDIESLSTSVGDGAKWLVNKLKGKMQKPLAELLQEHDLPAGLFPREATNYEFEPETRRLTVHIPAVCEVGYRDGSELRFDTTVTGTLDKGSLTGVEGLKAKVLVWARVTAVKADAAKVYFAVGIKKSRSREAYEVVRGAITVDEF

SEQ ID NO: 68859 - protein, 166 aa, Triticum aestivum
  peptide (1)..(166): Ceres Seq. ID no. 13598425
  misc_feature (28)..(166): Pfam Name: Protein of unknown function, DUF538 Pfam Description: Protein of unknown function, DUF538
  misc_feature (52)..(163): Homolog of NCBI NO: 18397959 NR Description: expressed protein [Arabidopsis thaliana]
  misc_feature (52)..(163): Homolog of NCBI NO: 6041854 NR Description: unknown protein [Arabidopsis thaliana]
  misc_feature (1)..(166): Homolog of NCBI NO: 21553803 NR Description: unknown [Arabidopsis thaliana]
  misc_feature (1)..(166): Homolog of NCBI NO: 18395537 NR Description: expressed protein [Arabidopsis thaliana]
  misc_feature (1)..(166): Homolog of NCBI NO: 34914210 NR Description: OSJNBb0049O23.18 [Oryza sativa (japonica
  misc_feature (1)..(166): Homolog of NCBI NO: 40642817 NR Description: cp protein [Celosia cristata]
  misc_feature (1)..(166): Homolog of NCBI NO: 28466909 NR Description: At5g01610 [Arabidopsis thaliana]
  misc_feature (1)..(166): Homolog of NCBI NO: 18398279 NR Description: expressed protein [Arabidopsis thaliana]
  misc_feature (1)..(166): Homolog of NCBI NO: 15241019 NR Description: expressed protein [Arabidopsis thaliana]
  misc_feature (1)..(166): Homolog of NCBI NO: 15240103 NR Description: hypothetical protein [Arabidopsis thaliana]
MNKMGSYWLGQRANKEMSSAGDDIESLSTSVGDGAKWLVNKLKGKMQKPLAELLQEHDLPAGLFPREATNYEFEPETRRLTVHIPAVCEVGYRDGSELRFDTTVTGTLDKGSLTGVEGLKAKVLVWARVTAVKADAAKVYFAVGIKKSRSREAYEVVRGAITVDEF

SEQ ID NO: 68860 - DNA, 2114 bp, Triticum aestivum
  misc_feature (1)..(2114): Ceres Seq. ID no. 14314100
gcctggttcaccaccaccgctgcttagcccggaagattcctcctaccctccctcgtctcgtgcgtcgtgtccaaaccccaaaccctcacgcgaagtcacgcacccccggcgacggcgatggatctccgccgcccgccgcgctcgacgtccggcggcgtcgagcccaagatccgccaggtcggcttcgtcacccctggcgtttcggccccgtccgagccgcccgccgccgccgccgcggcggtatcactgcctggcgcggccgccgggtcgcctccggcgtcggacctctccccgggctcgctctcccccgtcatgatccctcctccgcggcacgtggatcacctctcccccgactccccctctcccccggcgtccgacgtcctcctcctcgcgtcctcggcgcctcagccttcctccatgcgcttcgccgctgcatccgagttcggagaggaggattcgaggtccctggccccttccgcgggggagctagaaacaaacaagggagatttggctgaaataaggaatgaagatgctccagcgtccattccgcaaaagcagaaaccttctaaagcagagaggcgtgctattcaggaggctcagcgtgctgcgaaagctgctgcgaaggaggcaggtttatcaggaaagtcaacaggcgctgcttctggggctaatcctgcaacatccaagcaagccaagccagctaaaatttctcagaagaaagatgtgccccatgctccaagtacagttgcttctgagaagaaggttactgaacgccaaccagagagagatagaaaaaaagatgttcctcatccgagaatgcagtttgatgatgtgcatcgggtggagaaagcaaaaaaacgtgcaattgtcaaccaatcagaggctcgaaacagagttgaattgtttaggcatctgccacagtacgtccatggcactcaacttcctgacctcgagtcaaaattctttcagctggaaccaattcatccttctgtgtacaaggtcggtctccaatatttgtctggtgaggtatctggtggcaatggtcgttgcatagcaatgcttcttgcgttcagagaggcaataaaagattactccacaccgccaaataaaactctcagcagagaccttactgcaaaagtcagtagttatgtgtcattttttatcgagtgccgtccactatcaattagcatgggcaatgctatcaggttcctgaaaaacaggattgccaagctaccaattacattgtcggagtcagaagccaaggccagtcttcagtctgatattgatcgttttattaatgagaagatagttgttgcagatcaggttattgtcagtcatgccatcacaaaagtcagagacgatgatgtcttgctaacatatgggtcatcatcagttgttgaaatgattttggagcatgctcatgaacttggtaggaagttccgtgttatagtgatggattctcgtcccaagctcgaggggcaaggattactgcgtagattagtggcaaagggcattaactgcacatatactcatataaatgcagtttcatacatcatgcatgaagttacaagagtcttcttgggtgcatcctcaatattatcaaatggaacagtttattcccgagttggcacagcatccgtggctatggtggcacatgcatttggaattcctgttttggtttgctgcgaggcatacaaatttcatgagagggtgcaacttgattctatatgcgctaatgagcttggtgatccagatgtgatttcgaaaattcctgggagggcagacttgggcgatcttaagaactgggctgacaacgagaatctccaactgttaaatctcacgtatgatgcaaccccttctgattatgtgtcgatgatcataacggattatggaatgcttccacctacaagtgtgccggtcatcgtgagagagtaccgcaaggagcagctgtgggtatagatctacttgcagtgtgatcgcagttttggcaactgttgctgcctaggtgcagcatgagtggacatatacaacttgtatgtttttgagatgtgggctgtcaaacctctttgccgacttaccgttttgtctactcaaaatggtcgtctagttttgtc

SEQ ID NO: 68861 - protein, 613 aa, Triticum aestivum
  peptide (1)..(613): Ceres Seq. ID no. 14314101
  misc_feature (198)..(598): Pfam Name: Initiation factor 2 subunit family Pfam Description: Initiation factor 2 subunit family
  misc_feature (95)..(610): Homolog of NCBI NO: 18255869 NR Description: Eukaryotic translation initiation factor 2B,
  misc_feature (95)..(610): Homolog of NCBI NO: 6753736 NR Description: eukaryotic translation initiation factor 2B,
  misc_feature (78)..(610): Homolog of NCBI NO: 1083344 NR Description: guanine nucleotide exchange factor eIF-2B delta
  misc_feature (78)..(610): Homolog of NCBI NO: 529428 NR Description: guanine nucleotide exchange factor, eIF-2B, delta
  misc_feature (95)..(610): Homolog of NCBI NO: 16758830 NR Description: eukaryotic translation initiation factor 2B
  misc_feature (110)..(610): Homolog of NCBI NO: 2506382 NR Description: TRANSLATION INITIATION FACTOR EIF-2B DELTA
  misc_feature (110)..(610): Homolog of NCBI NO: 471329 NR Description: translation initiation factor eIF-2B-delta
  misc_feature (314)..(611): Homolog of NCBI NO: 15224811 NR Description: translation initiation factor eIF-2B delta
  misc_feature (135)..(593): Homolog of NCBI NO: 15222019 NR Description: hypothetical protein [Arabidopsis thaliana]
  misc_feature (1)..(613): Homolog of NCBI NO: 15240967 NR Description: expressed protein [Arabidopsis thaliana]
MDLRRPPRSTSGGVEPKIRQVGFVTPGVSAPSEPPAAAAAAVSLPGAAAGSPPASDLSPGSLSPVMIPPPRHVDHLSPDSPSPPASDVLLLASSAPQPSSMRFAAASEFGEEDSRSLAPSAGELETNKGDLAEIRNEDAPASIPQKQKPSKAERRAIQEAQRAAKAAAKEAGLSGKSTGAASGANPATSKQAKPAKISQKKDVPHAPSTVASEKKVTERQPERDRKKDVPHPRMQFDDVHRVEKAKKRAIVNQSEARNRVELFRHLPQYVHGTQLPDLESKFFQLEPIHPSVYKVGLQYLSGEVSGGNGRCIAMLLAFREAIKDYSTPPNKTLSRDLTAKVSSYVSFFIECRPLSISMGNAIRFLKNRIAKLPITLSESEAKASLQSDIDRFINEKIVVADQVIVSHAITKVRDDDVLLTYGSSSVVEMILEHAHELGRKFRVIVMDSRPKLEGQGLLRRLVAKGINCTYTHINAVSYIMHEVTRVFLGASSILSNGTVYSRVGTASVAMVAHAFGIPVLVCCEAYKFHERVQLDSICANELGDPDVISKIPGRADLGDLKNWADNENLQLLNLTYDATPSDYVSMIITDYGMLPPTSVPVIVREYRKEQLWV

SEQ ID NO: 68862 - protein, 548 aa, Triticum aestivum
  peptide (1)..(548): Ceres Seq. ID no. 14314102
  misc_feature (133)..(533): Pfam Name: Initiation factor 2 subunit family Pfam Description: Initiation factor 2 subunit family
  misc_feature (30)..(545): Homolog of NCBI NO: 18255869 NR Description: Eukaryotic translation initiation factor 2B,
  misc_feature (30)..(545): Homolog of NCBI NO: 6753736 NR Description: eukaryotic translation initiation factor 2B,
  misc_feature (13)..(545): Homolog of NCBI NO: 1083344 NR Description: guanine nucleotide exchange factor eIF-2B delta
  misc_feature (13)..(545): Homolog of NCBI NO: 529428 NR Description: guanine nucleotide exchange factor, eIF-2B, delta
  misc_feature (30)..(545): Homolog of NCBI NO: 16758830 NR Description: eukaryotic translation initiation factor 2B
  misc_feature (45)..(545): Homolog of NCBI NO: 2506382 NR Description: TRANSLATION INITIATION FACTOR EIF-2B DELTA
  misc_feature (45)..(545): Homolog of NCBI NO: 471329 NR Description: translation initiation factor eIF-2B-delta
  misc_feature (249)..(546): Homolog of NCBI NO: 15224811 NR Description: translation initiation factor eIF-2B delta
  misc_feature (70)..(528): Homolog of NCBI NO: 15222019 NR Description: hypothetical protein [Arabidopsis thaliana]
  misc_feature (1)..(548): Homolog of NCBI NO: 15240967 NR Description: expressed protein [Arabidopsis thaliana]
MIPPPRHVDHLSPDSPSPPASDVLLLASSAPQPSSMRFAAASEFGEEDSRSLAPSAGELETNKGDLAEIRNEDAPASIPQKQKPSKAERRAIQEAQRAAKAAAKEAGLSGKSTGAASGANPATSKQAKPAKISQKKDVPHAPSTVASEKKVTERQPERDRKKDVPHPRMQFDDVHRVEKAKKRAIVNQSEARNRVELFRHLPQYVHGTQLPDLESKFFQLEPIHPSVYKVGLQYLSGEVSGGNGRCIAMLLAFREAIKDYSTPPNKTLSRDLTAKVSSYVSFFIECRPLSISMGNAIRFLKNRIAKLPITLSESEAKASLQSDIDRFINEKIVVADQVIVSHAITKVRDDDVLLTYGSSSVVEMILEHAHELGRKFRVIVMDSRPKLEGQGLLRRLVAKGINCTYTHINAVSYIMHEVTRVFLGASSILSNGTVYSRVGTASVAMVAHAFGIPVLVCCEAYKFHERVQLDSICANELGDPDVISKIPGRADLGDLKNWADNENLQLLNLTYDATPSDYVSMIITDYGMLPPTSVPVIVREYRKEQLWV

SEQ ID NO: 68863 - protein, 513 aa, Triticum aestivum
  peptide (1)..(513): Ceres Seq. ID no. 14314103
  misc_feature (98)..(498): Pfam Name: Initiation factor 2 subunit family Pfam Description: Initiation factor 2 subunit family
  misc_feature (1)..(510): Homolog of NCBI NO: 18255869 NR Description: Eukaryotic translation initiation factor 2B,
  misc_feature (1)..(510): Homolog of NCBI NO: 6753736 NR Description: eukaryotic translation initiation factor 2B,
  misc_feature (1)..(510): Homolog of NCBI NO: 1083344 NR Description: guanine nucleotide exchange factor eIF-2B delta
  misc_feature (1)..(510): Homolog of NCBI NO: 529428 NR Description: guanine nucleotide exchange factor, eIF-2B, delta
  misc_feature (1)..(510): Homolog of NCBI NO: 16758830 NR Description: eukaryotic translation initiation factor 2B
  misc_feature (10)..(510): Homolog of NCBI NO: 2506382 NR Description: TRANSLATION INITIATION FACTOR EIF-2B DELTA
  misc_feature (10)..(510): Homolog of NCBI NO: 471329 NR Description: translation initiation factor eIF-2B-delta
  misc_feature (214)..(511): Homolog of NCBI NO: 15224811 NR Description: translation initiation factor eIF-2B delta
  misc_feature (35)..(493): Homolog of NCBI NO: 15222019 NR Description: hypothetical protein [Arabidopsis thaliana]
  misc_feature (1)..(513): Homolog of NCBI NO: 15240967 NR Description: expressed protein [Arabidopsis thaliana]
MRFAAASEFGEEDSRSLAPSAGELETNKGDLAEIRNEDAPASIPQKQKPSKAERRAIQEAQRAAKAAAKEAGLSGKSTGAASGANPATSKQAKPAKISQKKDVPHAPSTVASEKKVTERQPERDRKKDVPHPRMQFDDVHRVEKAKKRAIVNQSEARNRVELFRHLPQYVHGTQLPDLESKFFQLEPIHPSVYKVGLQYLSGEVSGGNGRCIAMLLAFREAIKDYSTPPNKTLSRDLTAKVSSYVSFFIECRPLSISMGNAIRFLKNRIAKLPITLSESEAKASLQSDIDRFINEKIVVADQVIVSHAITKVRDDDVLLTYGSSSVVEMILEHAHELGRKFRVIVMDSRPKLEGQGLLRRLVAKGINCTYTHINAVSYIMHEVTRVFLGASSILSNGTVYSRVGTASVAMVAHAFGIPVLVCCEAYKFHERVQLDSICANELGDPDVISKIPGRADLGDLKNWADNENLQLLNLTYDATPSDYVSMIITDYGMLPPTSVPVIVREYRKEQLWV

SEQ ID NO: 68864 - DNA, 1510 bp, Triticum aestivum
  misc_feature (1)..(1510): Ceres Seq. ID no. 14302279
acccaaactgctgctctttctccccggcccttgggacttgggagtgcgtgagagtgagggactcagcaaaaccctaattttcaccccaattcgccccttccaaaccctaaccctaatacgctcgatgttgtaatcccgccgcgtttgccatggctctagaggggcccgcggagcgacgggacgagggccagcagggagggatggcgaacgggaatggcgtggctccgccgccgtcgcgcatggccggccggccgttgggggcggctgcgtactctgacaggcggctgcgcctcaatccgaacacggagcacaagccgcaggactacaccgacgtgcgcggcgagtacgcgccagccgtgtacagcgccctggagcggcacctcccgcctagcctcctcgatgccgaccgtgatgtcaagctacacttcatgcgggacatactcgcgcgctattggccccatggcgagcgaaacaaggttcataggcacaaagaatacaggcagaagatagtccacctctataagccacttcatcaagaattatacagcatgcacccttcggctttcttcttaccaacattccttgaagcagtaagaaccaatacagaagaaagcattgcaagtataatgactgaaccaattcctggtgttttttcatttgctatgttacagcccaacttttgtgacatgctattggaggaggtagagaactttgaaaagtgggttcatgcaatgaaatttaagataatgaggccaaatacaatgaataaatatggtgctgtccttgatgattttggcctggaagctatgctgaatcagttcatggaggagttcatagctccaatttctaaagttttttaccctgaggttggtggaggaacattggactctcatcatgcttttgttgttgaatatgggaaagacagagatgttgaactaggtttccatgttgatgattctgaggtcacattaaatgtttgccttggcaagcaattctcaggcggtgaattatactttcgtggcattcgttgcgagaatcatgtgaactcagaaacacagcatgaggaaatgtatgattactctcatgttcctggacgagctgtacttcaccgtggccgtcatagacatggtgctagaccgacatcatcagggctcagaatgaatctgcttttgtggtgcagaagctccgtgttcagggagatgaagaaataccagatggatttttctagctggtgcggtgagtgccagcgtgaaaagacagagaggcagattcagtgcgtcaaagcgaccaagttggcatttcttaggggtgctggaggggcaatgatttaagtcatatttactgcatgtattttatgcaatcctgtattatattaaacatcctttgatcatttggaaacatctagtataattgttgtcaaatttccagctcgtatgtttgtcagtgtcattgcatcttatgtaaatctgaactttccttctgcattgccacataagccatggtttttact

SEQ ID NO: 68865 - protein, 393 aa, Triticum aestivum
  peptide (1)..(393): Ceres Seq. ID no. 14302280
  misc_feature (246)..(344): Pfam Name: 2OG-Fe(II) oxygenase superfamily Pfam Description: 2OG-Fe(II) oxygenase superfamily
  misc_feature (173)..(382): Homolog of NCBI NO: 15221938 NR Description: expressed protein [Arabidopsis thaliana]
  misc_feature (25)..(257): Homolog of NCBI NO: 34906198 NR Description: OJ1174_D05.17 [Oryza sativa (japonica
  misc_feature (23)..(390): Homolog of NCBI NO: 15221946 NR Description: expressed protein [Arabidopsis thaliana]
  misc_feature (45)..(381): Homolog of NCBI NO: 15239932 NR Description: expressed protein [Arabidopsis thaliana]
  misc_feature (235)..(388): Homolog of NCBI NO: 25518648 NR Description: hypothetical protein F19G10.9 [imported] -
  misc_feature (12)..(236): Homolog of NCBI NO: 25518648 NR Description: hypothetical protein F19G10.9 [imported] -
  misc_feature (235)..(388): Homolog of NCBI NO: 15219973 NR Description: oxidoreductase, 2OG-Fe(II) oxygenase family
  misc_feature (18)..(236): Homolog of NCBI NO: 15219973 NR Description: oxidoreductase, 2OG-Fe(II) oxygenase family
  misc_feature (7)..(381): Homolog of NCBI NO: 18401806 NR Description: oxidoreductase, 2OG-Fe(II) oxygenase family
  misc_feature (1)..(393): Homolog of NCBI NO: 34914494 NR Description: B1080D07.28 [Oryza sativa (japonica
MALEGPAERRDEGQQGGMANGNGVAPPPSRMAGRPLGAAAYSDRRLRLNPNTEHKPQDYTDVRGEYAPAVYSALERHLPPSLLDADRDVKLHFMRDILARYWPHGERNKVHRHKEYRQKIVHLYKPLHQELYSMHPSAFFLPTFLEAVRTNTEESIASIMTEPIPGVFSFAMLQPNFCDMLLEEVENFEKWVHAMKFKIMRPNTMNKYGAVLDDFGLEAMLNQFMEEFIAPISKVFYPEVGGGTLDSHHAFVVEYGKDRDVELGFHVDDSEVTLNVCLGKQFSGGELYFRGIRCENHVNSETQHEEMYDYSHVPGRAVLHRGRHRHGARPTSSGLRMNLLLWCRSSVFREMKKYQMDFSSWCGECQREKTERQIQCVKATKLAFLRGAGGAMI

SEQ ID NO: 68866 - protein, 376 aa, Triticum aestivum
  peptide (1)..(376): Ceres Seq. ID no. 14302281
  misc_feature (229)..(327): Pfam Name: 2OG-Fe(II) oxygenase superfamily Pfam Description: 2OG-Fe(II) oxygenase superfamily
  misc_feature (156)..(365): Homolog of NCBI NO: 15221938 NR Description: expressed protein [Arabidopsis thaliana]
  misc_feature (8)..(240): Homolog of NCBI NO: 34906198 NR Description: OJ1174_D05.17 [Oryza sativa (japonica
  misc_feature (6)..(373): Homolog of NCBI NO: 15221946 NR Description: expressed protein [Arabidopsis thaliana]
  misc_feature (28)..(364): Homolog of NCBI NO: 15239932 NR Description: expressed protein [Arabidopsis thaliana]
  misc_feature (218)..(371): Homolog of NCBI NO: 25518648 NR Description: hypothetical protein F19G10.9 [imported] -
  misc_feature (1)..(219): Homolog of NCBI NO: 25518648 NR Description: hypothetical protein F19G10.9 [imported] -
  misc_feature (218)..(371): Homolog of NCBI NO: 15219973 NR Description: oxidoreductase, 2OG-Fe(II) oxygenase family
  misc_feature (1)..(219): Homolog of NCBI NO: 15219973 NR Description: oxidoreductase, 2OG-Fe(II) oxygenase family
  misc_feature (1)..(364): Homolog of NCBI NO: 18401806 NR Description: oxidoreductase, 2OG-Fe(II) oxygenase family
  misc_feature (1)..(376): Homolog of NCBI NO: 34914494 NR Description: B1080D07.28 [Oryza sativa (japonica
MANGNGVAPPPSRMAGRPLGAAAYSDRRLRLNPNTEHKPQDYTDVRGEYAPAVYSALERHLPPSLLDADRDVKLHFMRDILARYWPHGERNKVHRHKEYRQKIVHLYKPLHQELYSMHPSAFFLPTFLEAVRTNTEESIASIMTEPIPGVFSFAMLQPNFCDMLLEEVENFEKWVHAMKFKIMRPNTMNKYGAVLDDFGLEAMLNQFMEEFIAPISKVFYPEVGGGTLDSHHAFVVEYGKDRDVELGFHVDDSEVTLNVCLGKQFSGGELYFRGIRCENHVNSETQHEEMYDYSHVPGRAVLHRGRHRHGARPTSSGLRMNLLLWCRSSVFREMKKYQMDFSSWCGECQREKTERQIQCVKATKLAFLRGAGGAMI

SEQ ID NO: 68867 - protein, 363 aa, Triticum aestivum
  peptide (1)..(363): Ceres Seq. ID no. 14302282
  misc_feature (216)..(314): Pfam Name: 2OG-Fe(II) oxygenase superfamily Pfam Description: 2OG-Fe(II) oxygenase superfamily
  misc_feature (143)..(352): Homolog of NCBI NO: 15221938 NR Description: expressed protein [Arabidopsis thaliana]
  misc_feature (1)..(227): Homolog of NCBI NO: 34906198 NR Description: OJ1174_D05.17 [Oryza sativa (japonica
  misc_feature (1)..(360): Homolog of NCBI NO: 15221946 NR Description: expressed protein [Arabidopsis thaliana]
  misc_feature (15)..(351): Homolog of NCBI NO: 15239932 NR Description: expressed protein [Arabidopsis thaliana]
  misc_feature (205)..(358): Homolog of NCBI NO: 25518648 NR Description: hypothetical protein F19G10.9 [imported] -
  misc_feature (1)..(206): Homolog of NCBI NO: 25518648 NR Description: hypothetical protein F19G10.9 [imported] -
  misc_feature (205)..(358): Homolog of NCBI NO: 15219973 NR Description: oxidoreductase, 2OG-Fe(II) oxygenase family
  misc_feature (1)..(206): Homolog of NCBI NO: 15219973 NR Description: oxidoreductase, 2OG-Fe(II) oxygenase family
  misc_feature (1)..(351): Homolog of NCBI NO: 18401806 NR Description: oxidoreductase, 2OG-Fe(II) oxygenase family
  misc_feature (1)..(363): Homolog of NCBI NO: 34914494 NR Description: B1080D07.28 [Oryza sativa (japonica
MAGRPLGAAAYSDRRLRLNPNTEHKPQDYTDVRGEYAPAVYSALERHLPPSLLDADRDVKLHFMRDILARYWPHGERNKVHRHKEYRQKIVHLYKPLHQELYSMHPSAFFLPTFLEAVRTNTEESIASIMTEPIPGVFSFAMLQPNFCDMLLEEVENFEKWVHAMKFKIMRPNTMNKYGAVLDDFGLEAMLNQFMEEFIAPISKVFYPEVGGGTLDSHHAFVVEYGKDRDVELGFHVDDSEVTLNVCLGKQFSGGELYFRGIRCENHVNSETQHEEMYDYSHVPGRAVLHRGRHRHGARPTSSGLRMNLLLWCRSSVFREMKKYQMDFSSWCGECQREKTERQIQCVKATKLAFLRGAGGAMI

SEQ ID NO: 68868 - DNA, 753 bp, Triticum aestivum
  misc_feature (1)..(753): Ceres Seq. ID no. 12587416
cctagaacatcctaaatcgaaaaaaaagggataacttgaccgacttcgccattgacaacaatctatccgcgattcaaacaagaaacagcagcagcgacaccagcaatcgactccgcgagaacccagcaagggggaggatgaaatccttcaagaaggaattcaccctggaggagagggcgaatgagtcggccgccatgatcgccaagtaccccggcaggatccccgtgattgttgaaaggttttcaaggagtaatcttccagaaatggagaagaggaagtacctggttccttgtgacatgccagttgggcagttcattttcatcctgcgctccaggttacatctgtctccagggacggcgcttttcgtgtttgtgcgcgacaccttgccccagaccgctaacctgatgggtagcgtgtatgattcgtacaaagataagcaggatggcttcctctacatgtgttacagcagcgagaagacatttgggtgacatctgcctgactgcaatttggcgtagtgcacccaatcccagtgtacatatgtgacatcaatctcttgttaaatgttaagtgtagcagcctctgccgatctctagtttattttacttgcacgtttcacatctgtattgctcccggaaaaaaggaaaaaaaactgtattgttgtatcaccgaagtaaacttatgcccctgtgcatgatgctgcttgcgaagtcctttggcaaggatggacgtatatatgaatagaagtgttgatgt

SEQ ID NO: 68869 - protein, 116 aa, Triticum aestivum
  peptide (1)..(116): Ceres Seq. ID no. 12587417
  misc_feature (12)..(116): Pfam Name: Microtubule associated protein 1A/1B, light chain 3 Pfam Description: Microtubule associated protein 1A/1B, light
  misc_feature (1)..(116): Homolog of NCBI NO: 23394382 NR Description: microtubial binding protein [Phytophthora
  misc_feature (3)..(116): Homolog of NCBI NO: 38344173 NR Description: OSJNBa0053K19.12 [Oryza sativa (japonica
  misc_feature (4)..(116): Homolog of NCBI NO: 32401365 NR Description: autophagy [Triticum aestivum]
  misc_feature (3)..(116): Homolog of NCBI NO: 15220686 NR Description: symbiosis-related protein, putative
  misc_feature (3)..(116): Homolog of NCBI NO: 33146967 NR Description: putative microtubule associated protein
  misc_feature (1)..(116): Homolog of NCBI NO: 15224577 NR Description: putative microtubule-associated protein
  misc_feature (1)..(116): Homolog of NCBI NO: 21592920 NR Description: putative microtubule-associated protein
  misc_feature (1)..(116): Homolog of NCBI NO: 6437547 NR Description: hypothetical protein [Arabidopsis thaliana]
  misc_feature (1)..(116): Homolog of NCBI NO: 18397569 NR Description: expressed protein
  misc_feature (1)..(116): Homolog of NCBI NO: 18400815 NR Description: expressed protein
MKSFKKEFTLEERANESAAMIAKYPGRIPVIVERFSRSNLPEMEKRKYLVPCDMPVGQFIFILRSRLHLSPGTALFVFVRDTLPQTANLMGSVYDSYKDKQDGFLYMCYSSEKTFG

SEQ ID NO: 68870 - protein, 97 aa, Triticum aestivum
  peptide (1)..(97): Ceres Seq. ID no. 12587418
  misc_feature (1)..(97): Pfam Name: Microtubule associated protein 1A/1B, light chain 3 Pfam Description: Microtubule associated protein 1A/1B, light
  misc_feature (1)..(97): Homolog of NCBI NO: 23394382 NR Description: microtubial binding protein [Phytophthora
  misc_feature (1)..(97): Homolog of NCBI NO: 38344173 NR Description: OSJNBa0053K19.12 [Oryza sativa (japonica
  misc_feature (1)..(97): Homolog of NCBI NO: 32401365 NR Description: autophagy [Triticum aestivum]
  misc_feature (1)..(97): Homolog of NCBI NO: 15220686 NR Description: symbiosis-related protein, putative
  misc_feature (1)..(97): Homolog of NCBI NO: 33146967 NR Description: putative microtubule associated protein
  misc_feature (1)..(97): Homolog of NCBI NO: 15224577 NR Description: putative microtubule-associated protein
  misc_feature (1)..(97): Homolog of NCBI NO: 21592920 NR Description: putative microtubule-associated protein
  misc_feature (1)..(97): Homolog of NCBI NO: 6437547 NR Description: hypothetical protein [Arabidopsis thaliana]
  misc_feature (1)..(97): Homolog of NCBI NO: 18397569 NR Description: expressed protein
  misc_feature (1)..(97): Homolog of NCBI NO: 18400815 NR Description: expressed protein
MIAKYPGRIPVIVERFSRSNLPEMEKRKYLVPCDMPVGQFIFILRSRLHLSPGTALFVFVRDTLPQTANLMGSVYDSYKDKQDGFLYMCYSSEKTFG

SEQ ID NO: 68871 - protein, 74 aa, Triticum aestivum
  peptide (1)..(74): Ceres Seq. ID no. 12587419
  misc_feature (1)..(74): Pfam Name: Microtubule associated protein 1A/1B, light chain 3 Pfam Description: Microtubule associated protein 1A/1B, light
  misc_feature (1)..(74): Homolog of NCBI NO: 23394382 NR Description: microtubial binding protein [Phytophthora
  misc_feature (1)..(74): Homolog of NCBI NO: 38344173 NR Description: OSJNBa0053K19.12 [Oryza sativa (japonica
  misc_feature (1)..(74): Homolog of NCBI NO: 32401365 NR Description: autophagy [Triticum aestivum]
  misc_feature (1)..(74): Homolog of NCBI NO: 15220686 NR Description: symbiosis-related protein, putative
  misc_feature (1)..(74): Homolog of NCBI NO: 33146967 NR Description: putative microtubule associated protein
  misc_feature (1)..(74): Homolog of NCBI NO: 15224577 NR Description: putative microtubule-associated protein
  misc_feature (1)..(74): Homolog of NCBI NO: 21592920 NR Description: putative microtubule-associated protein
  misc_feature (1)..(74): Homolog of NCBI NO: 6437547 NR Description: hypothetical protein [Arabidopsis thaliana]
  misc_feature (1)..(74): Homolog of NCBI NO: 18397569 NR Description: expressed protein
  misc_feature (1)..(74): Homolog of NCBI NO: 18400815 NR Description: expressed protein
MEKRKYLVPCDMPVGQFIFILRSRLHLSPGTALFVFVRDTLPQTANLMGSVYDSYKDKQDGFLYMCYSSEKTFG

SEQ ID NO: 68872 - DNA, 1415 bp, Triticum aestivum
  misc_feature (1)..(1415): Ceres Seq. ID no. 13655218
aaaacctccaccgcgactgcgcgatcgatcgtcatctcatctcggcgtaccactactccctcaaacttgcccccttctcgatatcctgccttctcgtttacgtgctcggcgtgtgtgctagctagaggtgctgaacgaccgacatcggccggctgccatggggcgtggcgacggacacgacgacgcgctgcggcggtggctgcgggaagcgggcgggtggctggtggtcgacggggccctgggcacggagctggaggcgcacggcgcggacctgcaggacgagctctggagcgcccggtgcctcgtctccgctccccacctcatccgcaaggtccatctggactacctcgacgcaggcgccaacatcataaccacggcctcctaccaggccacgctgcaggggttccagtcgcgaggcgtgtcgagggagcagggcgaggcgctgctccggcggagcgtgcagatcgcgcaggaggcgcgcgccatcttcgtggaaggccggtcgaaaggcccctacgccgcgcgcgatgagtacgacggcgtggcgtccagagcgcaccggcccgtgctcgtggcggcctccgtcgggagctacggggcgtacctcgcggacggctccgagtacaccggggactatggcagatccgtcaccaaggaagcgctcaagaacttccacaggaggcggctccaggtgctggcggacgcagggccggatctcatcgccttcgagaccatcccaaacaagctggaagcacaggcttacgctgagctgttggaggagaacgacatcaggattcccgcctggttctccttcacctccaaggacggggccaacgcggcgagcggtgaccccatcaccgagtgcgccgccgtcgccgactcctgcaggagggtggccgccgtcgggataaactgcacggctcccaggctaatccatggcctcgtcctctccattagcaaggtgacgagcaagccgatcgtggtgtaccccaacaccggggagacgtacgtggccgagaccaaggagtgggtggactcggctgctgctggtggtggtgttgcggggacggacttcgtgtcgtgcgtcggcaagtggaggcaggcaggagcttccctcgtgggagggtgctgcaggacgggcccggcgacggtgagggccatcgcgcgggcgctgcgggaggaggatgctgccgccgacgccgataccgacgatgactaccctgccgtggccgtcctgtagagcctataggccaccctttctacatcgaccgcgatgctggcgtagaggtgtatgtagatcgtcgttctcatggccctgttgtgatgtaaatcgttatcatggctctttttgttatgacgaagcttggttctttgatctttctaattttagtcgtattctccgctgtgttgctgtc

SEQ ID NO: 68873 - protein, 360 aa, Triticum aestivum
  peptide (1)..(360): Ceres Seq. ID no. 13655219
  misc_feature (23)..(341): Pfam Name: Homocysteine S-methyltransferase Pfam Description: Homocysteine S-methyltransferase
  misc_feature (9)..(339): Homolog of NCBI NO: 25453566 NR Description: homocysteine S-methyltransferase (EC 2.1.1.10)
  misc_feature (9)..(339): Homolog of NCBI NO: 15229396 NR Description: homocysteine S-methyltransferase AtHMT-2
  misc_feature (14)..(346): Homolog of NCBI NO: 21593147 NR Description: putative selenocysteine methyltransferase
  misc_feature (14)..(346): Homolog of NCBI NO: 18403505 NR Description: selenocysteine methyltransferase -related
  misc_feature (8)..(341): Homolog of NCBI NO: 10732787 NR Description: homocysteine S-methyltransferase-2 [Zea mays]
  misc_feature (6)..(341): Homolog of NCBI NO: 10732789 NR Description: homocysteine S-methyltransferase-3 [Zea mays]
  misc_feature (3)..(339): Homolog of NCBI NO: 37534456 NR Description: putative homocysteine S-methyltransferase-2
  misc_feature (10)..(360): Homolog of NCBI NO: 10732791 NR Description: homocysteine S-methyltransferase-4 [Zea mays]
  misc_feature (228)..(360): Homolog of NCBI NO: 34909958 NR Description: putative homocysteine S-methyltransferase-4
  misc_feature (1)..(208): Homolog of NCBI NO: 34909958 NR Description: putative homocysteine S-methyltransferase-4
MGRGDGHDDALRRWLREAGGWLVVDGALGTELEAHGADLQDELWSARCLVSAPHLIRKVHLDYLDAGANIITTASYQATLQGFQSRGVSREQGEALLRRSVQIAQEARAIFVEGRSKGPYAARDEYDGVASRAHRPVLVAASVGSYGAYLADGSEYTGDYGRSVTKEALKNFHRRRLQVLADAGPDLIAFETIPNKLEAQAYAELLEENDIRIPAWFSFTSKDGANAASGDPITECAAVADSCRRVAAVGINCTAPRLIHGLVLSISKVTSKPIVVYPNTGETYVAETKEWVDSAAAGGGVAGTDFVSCVGKWRQAGASLVGGCCRTGPATVRAIARALREEDAAADADTDDDYPAVAVL

SEQ ID NO: 68874 - DNA, 689 bp, Triticum aestivum
  misc_feature (1)..(689): Ceres Seq. ID no. 12585656
ccctcccacacacctccgcctccacaccacccgtcccgacccctctcctccaaggtaagcccgcggcggcggcgagcgagcgagcggcggcgatgacgacccgcttcaagaagaaccggaagaagcgcggccacgtgtccgccgggcacgggcgtgtgggcaagcaccgcaagcatcccggaggccgcggtaacgccggagacatgcaccaccaccgcatcctcttcgacaagtaccatcccggctacttcggcaaggtcggtatgcgctacttccacaagctcagcaacaggttctacacaccgacggtcaacgtcgagaggctctggtccatggttccgtccgacaaggcggcggaggccggcggcgacaaggcccccgtggtcgacgtctcgcagttcggctacttcaaggtgctcggcaaggggatgctgccggagaagcccatcgtcgtcaaggccaagctcatctccaagatcgccgaaaagaagatcaaggccgccggcggcgcagtcgtgctcgttgcctagggttctgttcccgaccgtgccccgagatctatatctgaactattagttgtttcccgtaccagcaatttgtgttgaagaagacatcgttagtttgttatcctggttcctgtgtggtaaaccaacatcttatgagaattttgcgctatgttatgccagttt

SEQ ID NO: 68875 - protein, 175 aa, Triticum aestivum
  peptide (1)..(175): Ceres Seq. ID no. 12585657
  misc_feature (137)..(169): Pfam Name: Ribosomal protein L15 Pfam Description: Ribosomal protein L15
  misc_feature (31)..(175): Homolog of NCBI NO: 23612262 NR Description: 60S ribosomal protein L27a, putative [Plasmodium
  misc_feature (31)..(175): Homolog of NCBI NO: 17509867 NR Description: Ribosomal protein L15 (16.2 kD) [Caenorhabditis
  misc_feature (33)..(175): Homolog of NCBI NO: 22758850 NR Description: ribosomal protein L22 [Argopecten irradians]
  misc_feature (31)..(175): Homolog of NCBI NO: 15220698 NR Description: 60s ribosomal protein l27a.
  misc_feature (31)..(175): Homolog of NCBI NO: 7959355 NR Description: 60S ribosomal protein L27a [Panax ginseng]
  misc_feature (31)..(175): Homolog of NCBI NO: 21553702 NR Description: 60S ribosomal protein L27A [Arabidopsis thaliana]
  misc_feature (31)..(175): Homolog of NCBI NO: 15223190 NR Description: 60S ribosomal protein L27A
  misc_feature (31)..(175): Homolog of NCBI NO: 3608481 NR Description: ribosomal protein L27a [Petunia x hybrida]
  misc_feature (31)..(175): Homolog of NCBI NO: 23237917 NR Description: putative 60S ribosomal protein L27a
  misc_feature (31)..(175): Homolog of NCBI NO: 30017566 NR Description: putative ribosomal protein L27a
LPHTSASTPPVPTPLLQGKPAAAASERAAAMTTRFKKNRKKRGHVSAGHGRVGKHRKHPGGRGNAGDMHHHRILFDKYHPGYFGKVGMRYFHKLSNRFYTPTVNVERLWSMVPSDKAAEAGGDKAPVVDVSQFGYFKVLGKGMLPEKPIVVKAKLISKIAEKKIKAAGGAVVLVA

SEQ ID NO: 68876 - protein, 145 aa, Triticum aestivum
  peptide (1)..(145): Ceres Seq. ID no. 12585658
  misc_feature (107)..(139): Pfam Name: Ribosomal protein L15 Pfam Description: Ribosomal protein L15
  misc_feature (1)..(145): Homolog of NCBI NO: 23612262 NR Description: 60S ribosomal protein L27a, putative [Plasmodium
  misc_feature (1)..(145): Homolog of NCBI NO: 17509867 NR Description: Ribosomal protein L15 (16.2 kD) [Caenorhabditis
  misc_feature (3)..(145): Homolog of NCBI NO: 22758850 NR Description: ribosomal protein L22 [Argopecten irradians]
  misc_feature (1)..(145): Homolog of NCBI NO: 15220698 NR Description: 60s ribosomal protein l27a.
  misc_feature (1)..(145): Homolog of NCBI NO: 7959355 NR Description: 60S ribosomal protein L27a [Panax ginseng]
  misc_feature (1)..(145): Homolog of NCBI NO: 21553702 NR Description: 60S ribosomal protein L27A [Arabidopsis thaliana]
  misc_feature (1)..(145): Homolog of NCBI NO: 15223190 NR Description: 60S ribosomal protein L27A
  misc_feature (1)..(145): Homolog of NCBI NO: 3608481 NR Description: ribosomal protein L27a [Petunia x hybrida]
  misc_feature (1)..(145): Homolog of NCBI NO: 23237917 NR Description: putative 60S ribosomal protein L27a
  misc_feature (1)..(145): Homolog of NCBI NO: 30017566 NR Description: putative ribosomal protein L27a
MTTRFKKNRKKRGHVSAGHGRVGKHRKHPGGRGNAGDMHHHRILFDKYHPGYFGKVGMRYFHKLSNRFYTPTVNVERLWSMVPSDKAAEAGGDKAPVVDVSQFGYFKVLGKGMLPEKPIVVKAKLISKIAEKKIKAAGGAVVLVA

SEQ ID NO: 68877 - protein, 108 aa, Triticum aestivum
  peptide (1)..(108): Ceres Seq. ID no. 12585659
  misc_feature (70)..(102): Pfam Name: Ribosomal protein L15 Pfam Description: Ribosomal protein L15
  misc_feature (1)..(108): Homolog of NCBI NO: 23612262 NR Description: 60S ribosomal protein L27a, putative [Plasmodium
  misc_feature (1)..(108): Homolog of NCBI NO: 17509867 NR Description: Ribosomal protein L15 (16.2 kD) [Caenorhabditis
  misc_feature (1)..(108): Homolog of NCBI NO: 22758850 NR Description: ribosomal protein L22 [Argopecten irradians]
  misc_feature (1)..(108): Homolog of NCBI NO: 15220698 NR Description: 60s ribosomal protein l27a.
  misc_feature (1)..(108): Homolog of NCBI NO: 7959355 NR Description: 60S ribosomal protein L27a [Panax ginseng]
  misc_feature (1)..(108): Homolog of NCBI NO: 21553702 NR Description: 60S ribosomal protein L27A [Arabidopsis thaliana]
  misc_feature (1)..(108): Homolog of NCBI NO: 15223190 NR Description: 60S ribosomal protein L27A
  misc_feature (1)..(108): Homolog of NCBI NO: 3608481 NR Description: ribosomal protein L27a [Petunia x hybrida]
  misc_feature (1)..(108): Homolog of NCBI NO: 23237917 NR Description: putative 60S ribosomal protein L27a
  misc_feature (1)..(108): Homolog of NCBI NO: 30017566 NR Description: putative ribosomal protein L27a
MHHHRILFDKYHPGYFGKVGMRYFHKLSNRFYTPTVNVERLWSMVPSDKAAEAGGDKAPVVDVSQFGYFKVLGKGMLPEKPIVVKAKLISKIAEKKIKAAGGAVVLVA

SEQ ID NO: 68878 - DNA, 920 bp, Triticum aestivum
  misc_feature (1)..(920): Ceres Seq. ID no. 12585194
agatacaaatacatcccggcgaaaatcaggcaggcggagcatggaagggaggagcacggccgccgcgatgtcgtcggagccggtgaggctcatcggctgcttcgccagcccggtggtccaccgcgccgagctggccctgcgcctcaagggcgtcccctacgagctcatcgaggaggacctcaacaacaagagcgagctgctgctgacgcacaaccccatccacaagaccgtccccgtgctcctccacggcgaccgctccatcccggagtcgctcgtcatcgtcgagtatgtcgacgaggccttccccgccggcccgccgctcctccccgtcgaccccctcgcccgtgcaaccgcccgcttctgggtccgattcctcgaagaggaggagtgcaagaagcctatgtggatcgcgctgtgggcggacggcgaggcgcaggctgcggcggcgagggagacgaaggagaagctggcgctgctggaggcgcagctgccggaggggaagaggttcttcggcggcgacgccatcggcttcctcgacatcgccgccggcggggcgctcgcgcactggatgggggtgttcgaggagatggccggggtgcggctgctcaccgaggaggcgcacccggcgctgtgccgctgggcgagggagtacagggccgacgagaccgtgcgtgggtgcctcccggacaggtcccgcgtgctcgctgccttggcggcgaggaaggatctgtatgtctccattgctaaggccatggctgcacagaagtagtagcacggttcacgaccaagaaggggatatgcatgcttgtgaccatggcgtactggtcaatgatgctgaaatcagggctatgtatacatgtcgatgcatatccatagtggatccaatgttcttggaataaaaagaagggaaaagtgcgtcc

SEQ ID NO: 68879 - protein, 255 aa, Triticum aestivum
  peptide (1)..(255): Ceres Seq. ID no. 12585195
  misc_feature (108)..(221): Pfam Name: Glutathione S-transferase, C-terminal domain Pfam Description: Glutathione S-transferase, C-terminal domain
  misc_feature (26)..(243): Homolog of NCBI NO: 19386817 NR Description: putative glutathione S-transferase GST 24
  misc_feature (25)..(254): Homolog of NCBI NO: 19386818 NR Description: putative glutathione S-transferase GST 24
  misc_feature (28)..(250): Homolog of NCBI NO: 19386820 NR Description: putative glutathione S-transferase GST 24
  misc_feature (28)..(250): Homolog of NCBI NO: 11385507 NR Description: glutathione S-transferase GST 28 [Zea mays]
  misc_feature (28)..(255): Homolog of NCBI NO: 34896730 NR Description: putative glutathione transferase
  misc_feature (25)..(254): Homolog of NCBI NO: 4468798 NR Description: GST7 protein [Zea mays]
  misc_feature (24)..(250): Homolog of NCBI NO: 13699857 NR Description: glutathione S-transferase GST 24 [Zea mays]
  misc_feature (24)..(250): Homolog of NCBI NO: 19386816 NR Description: putative glutathione S-transferase GST 24
  misc_feature (23)..(252): Homolog of NCBI NO: 11385509 NR Description: glutathione S-transferase GST 29 [Zea mays]
  misc_feature (21)..(254): Homolog of NCBI NO: 19386822 NR Description: putative glutathione S-transferase GST 24
DTNTSRRKSGRRSMEGRSTAAAMSSEPVRLIGCFASPVVHRAELALRLKGVPYELIEEDLNNKSELLLTHNPIHKTVPVLLHGDRSIPESLVIVEYVDEAFPAGPPLLPVDPLARATARFWVRFLEEEECKKPMWIALWADGEAQAAAARETKEKLALLEAQLPEGKRFFGGDAIGFLDIAAGGALAHWMGVFEEMAGVRLLTEEAHPALCRWAREYRADETVRGCLPDRSRVLAALAARKDLYVSIAKAMAAQK

SEQ ID NO: 68880 - protein, 248 aa, Triticum aestivum
  peptide (1)..(248): Ceres Seq. ID no. 12585196
  misc_feature (31)..(241): Homolog of NCBI NO: 23106420 NR Description: hypothetical protein [Azotobacter vinelandii]
  misc_feature (26)..(223): Homolog of NCBI NO: 15827818 NR Description: initiation factor IF-2 [Mycobacterium leprae]
RYKYIPAKIRQAEHGREEHGRRDVVGAGEAHRLLRQPGGPPRRAGPAPQGRPLRAHRGGPQQQERAAADAQPHPQDRPRAPPRRPLHPGVARHRRVCRRGLPRRPAAPPRRPPRPCNRPLLGPIPRRGGVQEAYVDRAVGGRRGAGCGGEGDEGEAGAAGGAAAGGEEVLRRRRHRLPRHRRRRGARALDGGVRGDGRGAAAHRGGAPGAVPLGEGVQGRRDRAWVPPGQVPRARCLGGEEGSVCLHC

SEQ ID NO: 68881 - protein, 242 aa, Triticum aestivum
  peptide (1)..(242): Ceres Seq. ID no. 12585197
  misc_feature (95)..(208): Pfam Name: Glutathione S-transferase, C-terminal domain Pfam Description: Glutathione S-transferase, C-terminal domain
  misc_feature (13)..(230): Homolog of NCBI NO: 19386817 NR Description: putative glutathione S-transferase GST 24
  misc_feature (12)..(241): Homolog of NCBI NO: 19386818 NR Description: putative glutathione S-transferase GST 24
  misc_feature (15)..(237): Homolog of NCBI NO: 19386820 NR Description: putative glutathione S-transferase GST 24
  misc_feature (15)..(237): Homolog of NCBI NO: 11385507 NR Description: glutathione S-transferase GST 28 [Zea mays]
  misc_feature (15)..(242): Homolog of NCBI NO: 34896730 NR Description: putative glutathione transferase
  misc_feature (12)..(241): Homolog of NCBI NO: 4468798 NR Description: GST7 protein [Zea mays]
  misc_feature (11)..(237): Homolog of NCBI NO: 13699857 NR Description: glutathione S-transferase GST 24 [Zea mays]
  misc_feature (11)..(237): Homolog of NCBI NO: 19386816 NR Description: putative glutathione S-transferase GST 24
  misc_feature (10)..(239): Homolog of NCBI NO: 11385509 NR Description: glutathione S-transferase GST 29 [Zea mays]
  misc_feature (8)..(241): Homolog of NCBI NO: 19386822 NR Description: putative glutathione S-transferase GST 24
MEGRSTAAAMSSEPVRLIGCFASPVVHRAELALRLKGVPYELIEEDLNNKSELLLTHNPIHKTVPVLLHGDRSIPESLVIVEYVDEAFPAGPPLLPVDPLARATARFWVRFLEEEECKKPMWIALWADGEAQAAAARETKEKLALLEAQLPEGKRFFGGDAIGFLDIAAGGALAHWMGVFEEMAGVRLLTEEAHPALCRWAREYRADETVRGCLPDRSRVLAALAARKDLYVSIAKAMAAQK

SEQ ID NO: 68882 - DNA, 1451 bp, Triticum aestivum
  misc_feature (1)..(1451): Ceres Seq. ID no. 13655338
aaaatttggtccagcgaacgcagagcggataccaaccaggtgagccatcaaagccgcttctcttcccctaaaacctagcccgcaaatcccaatccagcccacgcgcctcccccccaaaccctcgtccccaagctcgcgaacctcgccgccgccaccgcccgcaccaccaccggccgctccgcgcgaccgcccaccatggcgcgtaacgaggagaaggcgcagtccatgctgaaccgcttcatcacgatgaagcaggaggagaagcgcaagccccgcgagcgccggccgtacctcgcctccgagtgccgggacctcgctgacgccgaccgctggcgtggagagatcctgcgcgagatcggcgtcaaggtcgccgagatccagaacgagggcctcggggagcaccgcctccgagacctcaacgacgagatcaacaagctcctccgcgagcgcagccactgggagcgccgcatcctcgagctcggaggccgcgactactctcgcagctccaacgccgccctcatgaccgacctcgacggcaacatcgtcgccatccccaacccctccggccggggcccaggctaccgctactttggcgctgccaagaagctccccggcgtccgtgagctatttgacaagccacctgaggtccgcaagcgccgcacccgctatgagatccacaagcgcatcaatgccgggtactacggatactatgacgatgaggacggtgtgcttgagccccttgaggctgctgccgagaagcgcatgcgggacgaggttgtcacggagtggcaccgggtggagcgtgtgcggcgggaggccatgaagaatgtggtgagtggcgaggtggctgcagcaggtgggcgtggtggggaagctgctagggaggtgctgttcgaggaggtggaggaggaggttgaggaggagaggaggctggaggaagagaggatggaaagagagaagggggaagaggctgggagggagtttgtcgcacatgtgccgctccctgatgagaaggagattgagcggatggtgctagagaagaagaagaaggagctgctcagcaagtacacaagtgataccctgcaaggcgagcagaaggaggctaaggagatgctcaatgtgcaacgctaggagagatgttggccattgctgaatccttcacggtattgagacgagtgaagtgcgaggagcaatatgtgcagtgctggacaagcgttgacgcaaccctagaagatctgatgctgaaaacgctgaagggcttcgctgcaatcatgttgatcgatgtgatgtttattaccctagaatgattgatgccaaaagggtaaacctgagatagtggtggtgaaccgtcactgtgcatggatgtgctgtattcactggcactgtacaagtacatccattggctacgcatatatctaaaaaactactagaccataatgaaagcaattctg

SEQ ID NO: 68883 - protein, 311 aa, Triticum aestivum
  peptide (1)..(311): Ceres Seq. ID no. 13655339
  misc_feature (1)..(291): Pfam Name: Isy1-like splicing family Pfam Description: Isy1-like splicing family
  misc_feature (1)..(230): Homolog of NCBI NO: 19527549 NR Description: RE31520p [Drosophila melanogaster]
  misc_feature (7)..(295): Homolog of NCBI NO: 24644974 NR Description: CG9667-PA [Drosophila melanogaster]
  misc_feature (1)..(248): Homolog of NCBI NO: 12857516 NR Description: unnamed protein product [Mus musculus]
  misc_feature (1)..(208): Homolog of NCBI NO: 20149304 NR Description: KIAA1160 protein [Homo sapiens]
  misc_feature (1)..(248): Homolog of NCBI NO: 20149316 NR Description: expressed sequence AU020769 [Mus musculus]
  misc_feature (1)..(279): Homolog of NCBI NO: 38174132 NR Description: Unknown (protein for MGC:76019) [Silurana
  misc_feature (1)..(208): Homolog of NCBI NO: 6330157 NR Description: KIAA1160 protein [Homo sapiens]
  misc_feature (1)..(306): Homolog of NCBI NO: 34856385 NR Description: similar to RIKEN cDNA 5830446M03 [Rattus
  misc_feature (1)..(307): Homolog of NCBI NO: 13938521 NR Description: Unknown (protein for MGC:2431) [Homo sapiens]
  misc_feature (1)..(311): Homolog of NCBI NO: 15230193 NR Description: expressed protein [Arabidopsis thaliana]
MARNEEKAQSMLNRFITMKQEEKRKPRERRPYLASECRDLADADRWRGEILREIGVKVAEIQNEGLGEHRLRDLNDEINKLLRERSHWERRILELGGRDYSRSSNAALMTDLDGNIVAIPNPSGRGPGYRYFGAAKKLPGVRELFDKPPEVRKRRTRYEIHKRINAGYYGYYDDEDGVLEPLEAAAEKRMRDEVVTEWHRVERVRREAMKNVVSGEVAAAGGRGGEAAREVLFEEVEEEVEEERRLEEERMEREKGEEAGREFVAHVPLPDEKEIERMVLEKKKKELLSKYTSDTLQGEQKEAKEMLNVQR

SEQ ID NO: 68884 - protein, 301 aa, Triticum aestivum
  peptide (1)..(301): Ceres Seq. ID no. 13655340
  misc_feature (1)..(281): Pfam Name: Isy1-like splicing family Pfam Description: Isy1-like splicing family
  misc_feature (1)..(220): Homolog of NCBI NO: 19527549 NR Description: RE31520p [Drosophila melanogaster]
  misc_feature (1)..(285): Homolog of NCBI NO: 24644974 NR Description: CG9667-PA [Drosophila melanogaster]
  misc_feature (1)..(238): Homolog of NCBI NO: 12857516 NR Description: unnamed protein product [Mus musculus]
  misc_feature (1)..(198): Homolog of NCBI NO: 20149304 NR Description: KIAA1160 protein [Homo sapiens]
  misc_feature (1)..(238): Homolog of NCBI NO: 20149316 NR Description: expressed sequence AU020769 [Mus musculus]
  misc_feature (1)..(269): Homolog of NCBI NO: 38174132 NR Description: Unknown (protein for MGC:76019) [Silurana
  misc_feature (1)..(198): Homolog of NCBI NO: 6330157 NR Description: KIAA1160 protein [Homo sapiens]
  misc_feature (1)..(296): Homolog of NCBI NO: 34856385 NR Description: similar to RIKEN cDNA 5830446M03 [Rattus
  misc_feature (1)..(297): Homolog of NCBI NO: 13938521 NR Description: Unknown (protein for MGC:2431) [Homo sapiens]
  misc_feature (1)..(301): Homolog of NCBI NO: 15230193 NR Description: expressed protein [Arabidopsis thaliana]
MLNRFITMKQEEKRKPRERRPYLASECRDLADADRWRGEILREIGVKVAEIQNEGLGEHRLRDLNDEINKLLRERSHWERRILELGGRDYSRSSNAALMTDLDGNIVAIPNPSGRGPGYRYFGAAKKLPGVRELFDKPPEVRKRRTRYEIHKRINAGYYGYYDDEDGVLEPLEAAAEKRMRDEVVTEWHRVERVRREAMKNVVSGEVAAAGGRGGEAAREVLFEEVEEEVEEERRLEEERMEREKGEEAGREFVAHVPLPDEKEIERMVLEKKKKELLSKYTSDTLQGEQKEAKEMLNVQR

SEQ ID NO: 68885 - protein, 294 aa, Triticum aestivum
  peptide (1)..(294): Ceres Seq. ID no. 13655341
  misc_feature (1)..(274): Pfam Name: Isy1-like splicing family Pfam Description: Isy1-like splicing family
  misc_feature (1)..(213): Homolog of NCBI NO: 19527549 NR Description: RE31520p [Drosophila melanogaster]
  misc_feature (1)..(278): Homolog of NCBI NO: 24644974 NR Description: CG9667-PA [Drosophila melanogaster]
  misc_feature (1)..(231): Homolog of NCBI NO: 12857516 NR Description: unnamed protein product [Mus musculus]
  misc_feature (1)..(191): Homolog of NCBI NO: 20149304 NR Description: KIAA1160 protein [Homo sapiens]
  misc_feature (1)..(231): Homolog of NCBI NO: 20149316 NR Description: expressed sequence AU020769 [Mus musculus]
  misc_feature (1)..(262): Homolog of NCBI NO: 38174132 NR Description: Unknown (protein for MGC:76019) [Silurana
  misc_feature (1)..(191): Homolog of NCBI NO: 6330157 NR Description: KIAA1160 protein [Homo sapiens]
  misc_feature (1)..(289): Homolog of NCBI NO: 34856385 NR Description: similar to RIKEN cDNA 5830446M03 [Rattus
  misc_feature (1)..(290): Homolog of NCBI NO: 13938521 NR Description: Unknown (protein for MGC:2431) [Homo sapiens]
  misc_feature (1)..(294): Homolog of NCBI NO: 15230193 NR Description: expressed protein [Arabidopsis thaliana]
MKQEEKRKPRERRPYLASECRDLADADRWRGEILREIGVKVAEIQNEGLGEHRLRDLNDEINKLLRERSHWERRILELGGRDYSRSSNAALMTDLDGNIVAIPNPSGRGPGYRYFGAAKKLPGVRELFDKPPEVRKRRTRYEIHKRINAGYYGYYDDEDGVLEPLEAAAEKRMRDEVVTEWHRVERVRREAMKNVVSGEVAAAGGRGGEAAREVLFEEVEEEVEEERRLEEERMEREKGEEAGREFVAHVPLPDEKEIERMVLEKKKKELLSKYTSDTLQGEQKEAKEMLNVQR

SEQ ID NO: 68886 - DNA, 710 bp, Triticum aestivum
  misc_feature (1)..(710): Ceres Seq. ID no. 15173684
ctttttttgtccggccatttggtgaaccaccgagccgcatgatcgttctgcatttctccacatatatatctcgatcggcgaccgaagcgatggcgtcctcccggcgagatctgctcgtggcgctctgcgtggcggcgctcctggccgtcgggtcggagtcccacgggctggaggacttcggcagcgaggggaagacggaggcgacgcccgagatggcctccttcttcggcgccaagcccgaggccgccgtgctcccggaggcgctggacaactccatggccgccaagccggaggcggcatcggcgatgcccaccaccaccagcaccaacccgcgtgcgtccccgccgcgcagatccgtggccgtcgcggccggcgtggcctgcggcgtcgcggccctggcggtggtcggcgtggccgtcgccgtcgccttcgtggtgcgcgccaggcgcggcgagaggcgcgaggccgaggtccatctcggctaagcccgccggcttggtttcattaggggttgctcgtcaattcattagcgtcgtggtttgcgtttagttaattgcgtgtttagttcgatgatgaatgatttcttccgttcttccgctgtttgtgtgtgtgtgatggagatttggggaagcacgctgtaacataaataacgcttcattggcatgcatgttactgtgatgtctagaccttgaatgaagtatttcactagg

SEQ ID NO: 68887 - protein, 160 aa, Triticum aestivum
  peptide (1)..(160): Ceres Seq. ID no. 15173685
  misc_feature (30)..(160): Homolog of NCBI NO: 38344333 NR Description: OSJNBa0058K23.15 [Oryza sativa (japonica
  misc_feature (30)..(160): Homolog of NCBI NO: 5679839 NR Description: hypothetical protein [Oryza sativa (indica
FFVRPFGEPPSRMIVLHFSTYISRSATEAMASSRRDLLVALCVAALLAVGSESHGLEDFGSEGKTEATPEMASFFGAKPEAAVLPEALDNSMAAKPEAASAMPTTTSTNPRASPPRRSVAVAAGVACGVAALAVVGVAVAVAFVVRARRGERREAEVHLG

SEQ ID NO: 68888 - protein, 148 aa, Triticum aestivum
  peptide (1)..(148): Ceres Seq. ID no. 15173686
  misc_feature (18)..(148): Homolog of NCBI NO: 38344333 NR Description: OSJNBa0058K23.15 [Oryza sativa (japonica
  misc_feature (18)..(148): Homolog of NCBI NO: 5679839 NR Description: hypothetical protein [Oryza sativa (indica
MIVLHFSTYISRSATEAMASSRRDLLVALCVAALLAVGSESHGLEDFGSEGKTEATPEMASFFGAKPEAAVLPEALDNSMAAKPEAASAMPTTTSTNPRASPPRRSVAVAAGVACGVAALAVVGVAVAVAFVVRARRGERREAEVHLG

SEQ ID NO: 68889 - protein, 131 aa, Triticum aestivum
  peptide (1)..(131): Ceres Seq. ID no. 15173687
  misc_feature (1)..(131): Homolog of NCBI NO: 38344333 NR Description: OSJNBa0058K23.15 [Oryza sativa (japonica
  misc_feature (1)..(131): Homolog of NCBI NO: 5679839 NR Description: hypothetical protein [Oryza sativa (indica
MASSRRDLLVALCVAALLAVGSESHGLEDFGSEGKTEATPEMASFFGAKPEAAVLPEALDNSMAAKPEAASAMPTTTSTNPRASPPRRSVAVAAGVACGVAALAVVGVAVAVAFVVRARRGERREAEVHLG

SEQ ID NO: 68890 - DNA, 908 bp, Triticum aestivum
  misc_feature (1)..(908): Ceres Seq. ID no. 13583691
aatcccaatcgagccctcctccccttccgccgccgccgccgccgccatgtcccgcttcgtgcggcgcctcgccggcatcccgtggcgccagatcgccggggaggcctcctccgtcggtctgctaatggcgcagggcctctgcgccgtccacgtcgtcagcgagcacgtcctcggcgtcgccttcccacggggccccagcatgctgccggcgctgaacatggcgggggacgtgctgctcaccgacaaggtgagcccgcggcgcgggtgggtggggccgggggacgtcgtgctcctcctctcgccggaggacccgcgcaagatcgtcgccaagcgcgtgctcgggatggagggcgacgaggtcacctaccccgtcgacgccggcaacagcgacgccaccaagaccgtcgtggtaccgcaaggtcatatctgggtgcagggcgacaatatctattcatctaacgactcgaggcagtttggacccgtgccttacggtctcgtaaaagggaagatgtcctatcggatttggccaccgtcaaggattggttcgattgactcaaaggagtaggacacagagtataagcgactgttcatacgatgcaaccaggccctgcatttgttggtgcatcttgatgtctaccatttgatgcttcacaattttggtccttgccccccagaagccccgttcagcgaatctatggcatgatttgattgctgtgtctcatgtcgtaacttatggtctgtgatacttgtaaagtgaactaacccgatgaacctacaagttccgggcatggctgagatcagctagtgtcttgacgttgagattgtattaaacttgtcattctcctggaccaaagcttgatgagttgtgcattgtaacatttgcttattattaaggccgttttaagcgg

SEQ ID NO: 68891 - protein, 187 aa, Triticum aestivum
  peptide (1)..(187): Ceres Seq. ID no. 13583692
  misc_feature (31)..(137): Pfam Name: Signal peptidase I Pfam Description: Signal peptidase I
  misc_feature (29)..(185): Homolog of NCBI NO: 21312276 NR Description: RIKEN cDNA 1500034J20 [Mus musculus]
  misc_feature (28)..(173): Homolog of NCBI NO: 15220621 NR Description: hypothetical protein [Arabidopsis thaliana]
  misc_feature (28)..(173): Homolog of NCBI NO: 25518432 NR Description: hypothetical protein F5O8.3 - Arabidopsis
  misc_feature (28)..(187): Homolog of NCBI NO: 22329754 NR Description: polygalacturonase, putative [Arabidopsis thaliana]
  misc_feature (16)..(60): Homolog of NCBI NO: 4680499 NR Description: hypothetical protein [Oryza sativa]
  misc_feature (50)..(173): Homolog of NCBI NO: 4680499 NR Description: hypothetical protein [Oryza sativa]
  misc_feature (28)..(183): Homolog of NCBI NO: 30695525 NR Description: expressed protein [Arabidopsis thaliana]
  misc_feature (137)..(173): Homolog of NCBI NO: 23928440 NR Description: hypothetical protein [Zea mays]
  misc_feature (16)..(137): Homolog of NCBI NO: 23928440 NR Description: hypothetical protein [Zea mays]
  misc_feature (16)..(173): Homolog of NCBI NO: 22208508 NR Description: unknown protein [Sorghum bicolor]
IPIEPSSPSAAAAAAMSRFVRRLAGIPWRQIAGEASSVGLLMAQGLCAVHVVSEHVLGVAFPRGPSMLPALNMAGDVLLTDKVSPRRGWVGPGDVVLLLSPEDPRKIVAKRVLGMEGDEVTYPVDAGNSDATKTVVVPQGHIWVQGDNIYSSNDSRQFGPVPYGLVKGKMSYRIWPPSRIGSIDSKE

SEQ ID NO: 68892 - protein, 172 aa, Triticum aestivum
  peptide (1)..(172): Ceres Seq. ID no. 13583693
  misc_feature (16)..(122): Pfam Name: Signal peptidase I Pfam Description: Signal peptidase I
  misc_feature (14)..(170): Homolog of NCBI NO: 21312276 NR Description: RIKEN cDNA 1500034J20 [Mus musculus]
  misc_feature (13)..(158): Homolog of NCBI NO: 15220621 NR Description: hypothetical protein [Arabidopsis thaliana]
  misc_feature (13)..(158): Homolog of NCBI NO: 25518432 NR Description: hypothetical protein F5O8.3 - Arabidopsis
  misc_feature (13)..(172): Homolog of NCBI NO: 22329754 NR Description: polygalacturonase, putative [Arabidopsis thaliana]
  misc_feature (1)..(45): Homolog of NCBI NO: 4680499 NR Description: hypothetical protein [Oryza sativa]
  misc_feature (35)..(158): Homolog of NCBI NO: 4680499 NR Description: hypothetical protein [Oryza sativa]
  misc_feature (13)..(168): Homolog of NCBI NO: 30695525 NR Description: expressed protein [Arabidopsis thaliana]
  misc_feature (122)..(158): Homolog of NCBI NO: 23928440 NR Description: hypothetical protein [Zea mays]
  misc_feature (1)..(122): Homolog of NCBI NO: 23928440 NR Description: hypothetical protein [Zea mays]
  misc_feature (1)..(158): Homolog of NCBI NO: 22208508 NR Description: unknown protein [Sorghum bicolor]
MSRFVRRLAGIPWRQIAGEASSVGLLMAQGLCAVHVVSEHVLGVAFPRGPSMLPALNMAGDVLLTDKVSPRRGWVGPGDVVLLLSPEDPRKIVAKRVLGMEGDEVTYPVDAGNSDATKTVVVPQGHIWVQGDNIYSSNDSRQFGPVPYGLVKGKMSYRIWPPSRIGSIDSKE

SEQ ID NO: 68893 - protein, 152 aa, Triticum aestivum
  peptide (1)..(152): Ceres Seq. ID no. 13583694
NPNRALLPFRRRRRRHVPLRAAPRRHPVAPDRRGGLLRRSANGAGPLRRPRRQRARPRRRLPTGPQHAAGAEHGGGRAAHRQGEPAARVGGAGGRRAPPLAGGPAQDRRQARARDGGRRGHLPRRRRQQRRHQDRRGTARSYLGAGRQYLFI

SEQ ID NO: 68894 - DNA, 622 bp, Triticum aestivum
  misc_feature (1)..(622): Ceres Seq. ID no. 12593148
aaagcaatcccaggacctccagctaatcatagcagccactcgactcgattcgattcgatctttctcggcgtctcgagctccccattcctcgatctcattccatccatggcgccgtccatctccattgccgccgcctcgccggcctcgggctggaagagcggcaggaaggccggggcggcgccggcggagggcgaggcggagaaggaggcgctgctgctgcggcgccgcaacgccgagctggagcgggaggtggcgctgctgcgggcggagctggaggccgcgcggctgcgcgccgaggccgcggaggaggccgaggagcggctgtgcgcgcagctgggcgaggccgagtgcgaggccctcgagctcgcgcgcgcctaccagggccacgtccaggagctcgcgcgggagctcgccgccgcacgcagcagataggcggagcgccgaggccgagctcgtcggtgattctttgacgatcgacgaagagacgtgtcgcgctctcgacacacgcggtgcggcggcagtatagatttctagacaaatgtaaaacgaggttaattagtattttcttgtccgagtatagattcctagcaagatgtccgagtaaaaagatggcagtgtttcc

SEQ ID NO: 68895 - protein, 174 aa, Triticum aestivum
  peptide (1)..(174): Ceres Seq. ID no. 12593149
  misc_feature (46)..(147): Homolog of NCBI NO: 32400889 NR Description: ocs-element binding factor 1 [Triticum aestivum]
KQSQDLQLIIAATRLDSIRSFSASRAPHSSISFHPWRRPSPLPPPRRPRAGRAAGRPGRRRRRARRRRRRCCCGAATPSWSGRWRCCGRSWRPRGCAPRPRRRPRSGCARSWARPSARPSSSRAPTRATSRSSRGSSPPHAADRRSAEAELVGDSLTIDEETCRALDTRGAAAV

SEQ ID NO: 68896 - protein, 143 aa, Triticum aestivum
  peptide (1)..(143): Ceres Seq. ID no. 12593150
  misc_feature (66)..(142): Homolog of NCBI NO: 15229169 NR Description: hypothetical protein; protein id: At3g49570.1
  misc_feature (68)..(138): Homolog of NCBI NO: 15144306 NR Description: hypothetical protein [Oryza sativa (japonica
  misc_feature (55)..(140): Homolog of NCBI NO: 37535942 NR Description: hypothetical protein [Oryza sativa (japonica
  misc_feature (66)..(142): Homolog of NCBI NO: 37528811 NR Description: unknown protein [Brassica rapa subsp. pekinensis]
KAIPGPPANHSSHSTRFDSIFLGVSSSPFLDLIPSMAPSISIAAASPASGWKSGRKAGAAPAEGEAEKEALLLRRRNAELEREVALLRAELEAARLRAEAAEEAEERLCAQLGEAECEALELARAYQGHVQELARELAAARSR

SEQ ID NO: 68897 - protein, 108 aa, Triticum aestivum
  peptide (1)..(108): Ceres Seq. ID no. 12593151
  misc_feature (31)..(107): Homolog of NCBI NO: 15229169 NR Description: hypothetical protein; protein id: At3g49570.1
  misc_feature (33)..(103): Homolog of NCBI NO: 15144306 NR Description: hypothetical protein [Oryza sativa (japonica
  misc_feature (20)..(105): Homolog of NCBI NO: 37535942 NR Description: hypothetical protein [Oryza sativa (japonica
  misc_feature (31)..(107): Homolog of NCBI NO: 37528811 NR Description: unknown protein [Brassica rapa subsp. pekinensis]
MAPSISIAAASPASGWKSGRKAGAAPAEGEAEKEALLLRRRNAELEREVALLRAELEAARLRAEAAEEAEERLCAQLGEAECEALELARAYQGHVQELARELAAARSR

SEQ ID NO: 68898 - DNA, 1691 bp, Triticum aestivum
  misc_feature (1)..(1691): Ceres Seq. ID no. 12465428
aagcaaacaaactttccttaaacccaagtagccaaagggaaagaaaaaaccccaagccatggcctcctcttccctcttcgccgccgggcgccgccttctccacttggggcgcggcaggcttctccaaggccgagtccgtccccacaatcccactcctctgctcctccctgtgcgcgccgcatcctctcctccctccaacagcgccgagaggccgccgcggcgacccccgggcctgcagtccacgctgtggccgctgggccacccggacacgcttctggtgccggagatcgagcgctgggcggagaagccccgcaaccgcctccgccccgtggagctcgagcgcatcgtcaaagagctccgcaagcgccgccgccaccgccaggccctcgaggtctccgaatggatgagtgctaagggtcatgtcagatttttgccaaaggatcatgctgttcacctggatttgatcggtcaagttcgtggaatcggagcagcagaagcctatttcaatcaactgcctgataaagataagacggagaaaccctacggtgcactcctgaactgctacacacgagaactcatggttgatgaatccttggctcattttcagaagatgaaagagctgggttttgtgttctgcagtctcccctacaacaacctcatgggcctctatactaacatagggcagcatgagaaggtcccttcagtgatagcagagatgaaaaggagtggtatcatgcctgacaacttcagctacagaatttgcataaactcttatggcacacgggcagattttttcgggatggagaacaccctggaagatatggagtgtgagcctcaaattgtagtcgattggaatacctatgccgttgcggcgagcaactacattaagggcaacctaagggagaaggcaatctctgccttaaagaaagcagaagcaaaaattgacataaaagattcagatacctacaaccacctgatgtccctctacggccagctgggggacaagtcagaggtgaagaggctgtgggcactccaaatgtcaaactgcaagaggcatattaataaggactacactacaatgcttgcaatgcttgtgagacttgatgaaattgaagaagctgaggccttgttgaaagagtgggagtcgagcgaaaacacattcgacttccatgttccgaatgtcttgatcactggataccgacagaaggacatgctggacaaggccgaagcgctgctggatgacttcttgaagaagggaaagatgcctccttcgagcagttgggccatcgtggcaatcggctatgctgagaaaggtgatgctgcgaaagcctatgagttgacaaaaaatgccctttgtgtttacgctccgaggagcggctggatcccgaggcctgcgatgattgagatgatactcaagtatcttggagacgaaggtgatctcaaggatgttgaaactttcattcaactgctgcaagctgctatgcctatgaacttagatatgaccgacgttttgtcaagggctcgtatgagagaagaaaagaaggctggagatgcagagaaggaagccctaagctcaacaaaggcatcaggataattttactgcaactctcaggaccaacttatttcaccatgtaatttatctagttagttaccggaatttatttgatattttactgagtctgaaacttgcc

SEQ ID NO: 68899 - protein, 511 aa, Triticum aestivum
  peptide (1)..(511): Ceres Seq. ID no. 12465429
  misc_feature (195)..(229): Pfam Name: PPR repeat Pfam Description: PPR repeat
  misc_feature (92)..(501): Homolog of NCBI NO: 18411800 NR Description: expressed protein
  misc_feature (39)..(498): Homolog of NCBI NO: 37535774 NR Description: putative leaf protein [Oryza sativa (japonica
  misc_feature (52)..(487): Homolog of NCBI NO: 34905490 NR Description: P0682B08.20 [Oryza sativa (japonica
  misc_feature (13)..(511): Homolog of NCBI NO: 37535776 NR Description: putative leaf protein [Oryza sativa (japonica
  misc_feature (92)..(472): Homolog of NCBI NO: 15219808 NR Description: hypothetical protein; protein id: At1g60770.1
  misc_feature (77)..(503): Homolog of NCBI NO: 20453085 NR Description: At1g02150/T7I23.8 [Arabidopsis thaliana]
  misc_feature (77)..(503): Homolog of NCBI NO: 22329290 NR Description: hypothetical protein
  misc_feature (59)..(471): Homolog of NCBI NO: 15225409 NR Description: hypothetical protein; protein id: At2g20710.1
  misc_feature (59)..(492): Homolog of NCBI NO: 22328859 NR Description: unknown protein; protein id: At4g21705.1
  misc_feature (2)..(499): Homolog of NCBI NO: 34393591 NR Description: putative DNA-binding protein
MASSSLFAAGRRLLHLGRGRLLQGRVRPHNPTPLLLPVRAASSPPSNSAERPPRRPPGLQSTLWPLGHPDTLLVPEIERWAEKPRNRLRPVELERIVKELRKRRRHRQALEVSEWMSAKGHVRFLPKDHAVHLDLIGQVRGIGAAEAYFNQLPDKDKTEKPYGALLNCYTRELMVDESLAHFQKMKELGFVFCSLPYNNLMGLYTNIGQHEKVPSVIAEMKRSGIMPDNFSYRICINSYGTRADFFGMENTLEDMECEPQIVVDWNTYAVAASNYIKGNLREKAISALKKAEAKIDIKDSDTYNHLMSLYGQLGDKSEVKRLWALQMSNCKRHINKDYTTMLAMLVRLDEIEEAEALLKEWESSENTFDFHVPNVLITGYRQKDMLDKAEALLDDFLKKGKMPPSSSWAIVAIGYAEKGDAAKAYELTKNALCVYAPRSGWIPRPAMIEMILKYLGDEGDLKDVETFIQLLQAAMPMNLDMTDVLSRARMREEKKAGDAEKEALSSTKASG

SEQ ID NO: 68900 - protein, 396 aa, Triticum aestivum
  peptide (1)..(396): Ceres Seq. ID no. 12465430
  misc_feature (80)..(114): Pfam Name: PPR repeat Pfam Description: PPR repeat
  misc_feature (1)..(386): Homolog of NCBI NO: 18411800 NR Description: expressed protein
  misc_feature (1)..(383): Homolog of NCBI NO: 37535774 NR Description: putative leaf protein [Oryza sativa (japonica
  misc_feature (1)..(372): Homolog of NCBI NO: 34905490 NR Description: P0682B08.20 [Oryza sativa (japonica
  misc_feature (1)..(396): Homolog of NCBI NO: 37535776 NR Description: putative leaf protein [Oryza sativa (japonica
  misc_feature (1)..(357): Homolog of NCBI NO: 15219808 NR Description: hypothetical protein; protein id: At1g60770.1
  misc_feature (1)..(388): Homolog of NCBI NO: 20453085 NR Description: At1g02150/T7I23.8 [Arabidopsis thaliana]
  misc_feature (1)..(388): Homolog of NCBI NO: 22329290 NR Description: hypothetical protein
  misc_feature (1)..(356): Homolog of NCBI NO: 15225409 NR Description: hypothetical protein; protein id: At2g20710.1
  misc_feature (1)..(377): Homolog of NCBI NO: 22328859 NR Description: unknown protein; protein id: At4g21705.1
  misc_feature (1)..(384): Homolog of NCBI NO: 34393591 NR Description: putative DNA-binding protein
MSAKGHVRFLPKDHAVHLDLIGQVRGIGAAEAYFNQLPDKDKTEKPYGALLNCYTRELMVDESLAHFQKMKELGFVFCSLPYNNLMGLYTNIGQHEKVPSVIAEMKRSGIMPDNFSYRICINSYGTRADFFGMENTLEDMECEPQIVVDWNTYAVAASNYIKGNLREKAISALKKAEAKIDIKDSDTYNHLMSLYGQLGDKSEVKRLWALQMSNCKRHINKDYTTMLAMLVRLDEIEEAEALLKEWESSENTFDFHVPNVLITGYRQKDMLDKAEALLDDFLKKGKMPPSSSWAIVAIGYAEKGDAAKAYELTKNALCVYAPRSGWIPRPAMIEMILKYLGDEGDLKDVETFIQLLQAAMPMNLDMTDVLSRARMREEKKAGDAEKEALSSTKASG

SEQ ID NO: 68901 - protein, 338 aa, Triticum aestivum
  peptide (1)..(338): Ceres Seq. ID no. 12465431
  misc_feature (22)..(56): Pfam Name: PPR repeat Pfam Description: PPR repeat
  misc_feature (1)..(328): Homolog of NCBI NO: 18411800 NR Description: expressed protein
  misc_feature (1)..(325): Homolog of NCBI NO: 37535774 NR Description: putative leaf protein [Oryza sativa (japonica
  misc_feature (1)..(314): Homolog of NCBI NO: 34905490 NR Description: P0682B08.20 [Oryza sativa (japonica
  misc_feature (1)..(338): Homolog of NCBI NO: 37535776 NR Description: putative leaf protein [Oryza sativa (japonica
  misc_feature (1)..(299): Homolog of NCBI NO: 15219808 NR Description: hypothetical protein; protein id: At1g60770.1
  misc_feature (1)..(330): Homolog of NCBI NO: 20453085 NR Description: At1g02150/T7I23.8 [Arabidopsis thaliana]
  misc_feature (1)..(330): Homolog of NCBI NO: 22329290 NR Description: hypothetical protein
  misc_feature (1)..(298): Homolog of NCBI NO: 15225409 NR Description: hypothetical protein; protein id: At2g20710.1
  misc_feature (1)..(319): Homolog of NCBI NO: 22328859 NR Description: unknown protein; protein id: At4g21705.1
  misc_feature (1)..(326): Homolog of NCBI NO: 34393591 NR Description: putative DNA-binding protein
MVDESLAHFQKMKELGFVFCSLPYNNLMGLYTNIGQHEKVPSVIAEMKRSGIMPDNFSYRICINSYGTRADFFGMENTLEDMECEPQIVVDWNTYAVAASNYIKGNLREKAISALKKAEAKIDIKDSDTYNHLMSLYGQLGDKSEVKRLWALQMSNCKRHINKDYTTMLAMLVRLDEIEEAEALLKEWESSENTFDFHVPNVLITGYRQKDMLDKAEALLDDFLKKGKMPPSSSWAIVAIGYAEKGDAAKAYELTKNALCVYAPRSGWIPRPAMIEMILKYLGDEGDLKDVETFIQLLQAAMPMNLDMTDVLSRARMREEKKAGDAEKEALSSTKASG

SEQ ID NO: 68902 - DNA, 1360 bp, Triticum aestivum
  misc_feature (1)..(1360): Ceres Seq. ID no. 14303608
cccccgtcctctagctcaccgccgccgccgccgccgccgccgccgctttcttccgccatggccagccccgcggagagctctcgccggcgggaagaagaccgcactccatctccttccaggtcttcctcttctcgccccagcaagtgcaggacggcggccgagagactcaccgacgacctcctcgtggaggtcctctcgcgcgtcccggccaagtcgctctgccgcttcaagtgcgtctccaaccactggctcagcgtcatcgaccaccccgaccaccgcaagaagctgccccaaaccctcaccggcttcttccacggtagcagcaacctcgaggattggattctggaatcacctgtcctcttcaccagcgtgtcgccctcccctcccatggacacctcattcgccttcctgcccaaccaccagcagttcgatctgttagacagctgctacggtctcctcctctgccgcttgtacaacgtctcggctgaggttggcaagtgccattatgtggtgtgcaatcctgccacggagaagtgggtcctgttgccggactccggccaggacagtgtcaacgcatgtttgggcttcaacccagccctgtcttcgcatttccatgtgtttgagttggtggaggagcaggataactacatttccggagtggcagtgtattcgtcagaaaccggagtttgggtttacaaggaaaacagatggaacaaacgtgtcatgctcattgagcttcagccatcatttgtatttcttaacggctatctgcattttcaagtcgatggccatgacttttcccgttatctagctgtggtggacacggacggggaaacatggatgaacttcagtgtccctggtggcctgcttaacggttttattcaacattcacaaggccgcttgcattatgccaattttcagagagatgaacatggtggtgtctttcgactagtggtttatgttcttgagaactaccaaagcaaagaatggacattgaagcatagcgttgaaacttcatacatacttggaaggacagattactgcattgatgggtttgattggattgcgattcatccggaatgcaacttgatattcttcactattgggcaggaactcaaactcatgtgctataatatggatcgtcggcaactcaaagtgatctgcaatcttgaaggtgtcacgccgccatatctgtcatatgtgccattgtatgcagagttagaggcactgcacatttgacatcagcagtagttcatatttggtcgcactttatgttgtttgtacttgtttctgtatactatcagtggttctgttcagtgctacctccatgtgctcggttaactttgcaaaatgtttcagc

SEQ ID NO: 68903 - protein, 412 aa, Triticum aestivum
  peptide (1)..(412): Ceres Seq. ID no. 14303609
  misc_feature (58)..(385): Homolog of NCBI NO: 34907324 NR Description: P0698A10.24 [Oryza sativa (japonica
  misc_feature (52)..(402): Homolog of NCBI NO: 34914902 NR Description: B1096D03.14 [Oryza sativa (japonica
  misc_feature (168)..(405): Homolog of NCBI NO: 37536818 NR Description: hypothetical protein [Oryza sativa (japonica
  misc_feature (128)..(406): Homolog of NCBI NO: 33146481 NR Description: unknown protein [Oryza sativa (japonica
  misc_feature (81)..(406): Homolog of NCBI NO: 34898802 NR Description: OJ1131_E05.28 [Oryza sativa (japonica
  misc_feature (81)..(406): Homolog of NCBI NO: 33146479 NR Description: receptor-like kinase-like [Oryza sativa (japonica
  misc_feature (57)..(400): Homolog of NCBI NO: 34898796 NR Description: OJ1131_E05.24 [Oryza sativa (japonica
  misc_feature (53)..(406): Homolog of NCBI NO: 34898810 NR Description: OJ1131_E05.32 [Oryza sativa (japonica
  misc_feature (46)..(406): Homolog of NCBI NO: 34898790 NR Description: OJ1131_E05.21 [Oryza sativa (japonica
  misc_feature (46)..(406): Homolog of NCBI NO: 34898788 NR Description: OJ1131_E05.20 [Oryza sativa (japonica
PPSSSSPPPPPPPPPLSSAMASPAESSRRREEDRTPSPSRSSSSRPSKCRTAAERLTDDLLVEVLSRVPAKSLCRFKCVSNHWLSVIDHPDHRKKLPQTLTGFFHGSSNLEDWILESPVLFTSVSPSPPMDTSFAFLPNHQQFDLLDSCYGLLLCRLYNVSAEVGKCHYVVCNPATEKWVLLPDSGQDSVNACLGFNPALSSHFHVFELVEEQDNYISGVAVYSSETGVWVYKENRWNKRVMLIELQPSFVFLNGYLHFQVDGHDFSRYLAVVDTDGETWMNFSVPGGLLNGFIQHSQGRLHYANFQRDEHGGVFRLVVYVLENYQSKEWTLKHSVETSYILGRTDYCIDGFDWIAIHPECNLIFFTIGQELKLMCYNMDRRQLKVICNLEGVTPPYLSYVPLYAELEALHI

SEQ ID NO: 68904 - protein, 393 aa, Triticum aestivum
  peptide (1)..(393): Ceres Seq. ID no. 14303610
  misc_feature (39)..(366): Homolog of NCBI NO: 34907324 NR Description: P0698A10.24 [Oryza sativa (japonica
  misc_feature (33)..(383): Homolog of NCBI NO: 34914902 NR Description: B1096D03.14 [Oryza sativa (japonica
  misc_feature (149)..(386): Homolog of NCBI NO: 37536818 NR Description: hypothetical protein [Oryza sativa (japonica
  misc_feature (109)..(387): Homolog of NCBI NO: 33146481 NR Description: unknown protein [Oryza sativa (japonica
  misc_feature (62)..(387): Homolog of NCBI NO: 34898802 NR Description: OJ1131_E05.28 [Oryza sativa (japonica
  misc_feature (62)..(387): Homolog of NCBI NO: 33146479 NR Description: receptor-like kinase-like [Oryza sativa (japonica
  misc_feature (38)..(381): Homolog of NCBI NO: 34898796 NR Description: OJ1131_E05.24 [Oryza sativa (japonica
  misc_feature (34)..(387): Homolog of NCBI NO: 34898810 NR Description: OJ1131_E05.32 [Oryza sativa (japonica
  misc_feature (27)..(387): Homolog of NCBI NO: 34898790 NR Description: OJ1131_E05.21 [Oryza sativa (japonica
  misc_feature (27)..(387): Homolog of NCBI NO: 34898788 NR Description: OJ1131_E05.20 [Oryza sativa (japonica
MASPAESSRRREEDRTPSPSRSSSSRPSKCRTAAERLTDDLLVEVLSRVPAKSLCRFKCVSNHWLSVIDHPDHRKKLPQTLTGFFHGSSNLEDWILESPVLFTSVSPSPPMDTSFAFLPNHQQFDLLDSCYGLLLCRLYNVSAEVGKCHYVVCNPATEKWVLLPDSGQDSVNACLGFNPALSSHFHVFELVEEQDNYISGVAVYSSETGVWVYKENRWNKRVMLIELQPSFVFLNGYLHFQVDGHDFSRYLAVVDTDGETWMNFSVPGGLLNGFIQHSQGRLHYANFQRDEHGGVFRLVVYVLENYQSKEWTLKHSVETSYILGRTDYCIDGFDWIAIHPECNLIFFTIGQELKLMCYNMDRRQLKVICNLEGVTPPYLSYVPLYAELEALHI

SEQ ID NO: 68905 - protein, 283 aa, Triticum aestivum
  peptide (1)..(283): Ceres Seq. ID no. 14303611
  misc_feature (1)..(256): Homolog of NCBI NO: 34907324 NR Description: P0698A10.24 [Oryza sativa (japonica
  misc_feature (1)..(273): Homolog of NCBI NO: 34914902 NR Description: B1096D03.14 [Oryza sativa (japonica
  misc_feature (39)..(276): Homolog of NCBI NO: 37536818 NR Description: hypothetical protein [Oryza sativa (japonica
  misc_feature (1)..(277): Homolog of NCBI NO: 33146481 NR Description: unknown protein [Oryza sativa (japonica
  misc_feature (1)..(277): Homolog of NCBI NO: 34898802 NR Description: OJ1131_E05.28 [Oryza sativa (japonica
  misc_feature (1)..(277): Homolog of NCBI NO: 33146479 NR Description: receptor-like kinase-like [Oryza sativa (japonica
  misc_feature (1)..(271): Homolog of NCBI NO: 34898796 NR Description: OJ1131_E05.24 [Oryza sativa (japonica
  misc_feature (1)..(277): Homolog of NCBI NO: 34898810 NR Description: OJ1131_E05.32 [Oryza sativa (japonica
  misc_feature (1)..(277): Homolog of NCBI NO: 34898790 NR Description: OJ1131_E05.21 [Oryza sativa (japonica
  misc_feature (1)..(277): Homolog of NCBI NO: 34898788 NR Description: OJ1131_E05.20 [Oryza sativa (japonica
MDTSFAFLPNHQQFDLLDSCYGLLLCRLYNVSAEVGKCHYVVCNPATEKWVLLPDSGQDSVNACLGFNPALSSHFHVFELVEEQDNYISGVAVYSSETGVWVYKENRWNKRVMLIELQPSFVFLNGYLHFQVDGHDFSRYLAVVDTDGETWMNFSVPGGLLNGFIQHSQGRLHYANFQRDEHGGVFRLVVYVLENYQSKEWTLKHSVETSYILGRTDYCIDGFDWIAIHPECNLIFFTIGQELKLMCYNMDRRQLKVICNLEGVTPPYLSYVPLYAELEALHI

SEQ ID NO: 68906 - DNA, 1438 bp, Triticum aestivum
  misc_feature (1)..(1438): Ceres Seq. ID no. 13655131
gtcggtcacgcgcttctcttctccctcagatcagatgagagcagagcagagcagagaatgattgattgattgattgattgattgattgcagaagaggacgggcgagctagggttccttctccttccttccttgggacgaccagagccatggacatggaggattcctcctcctgctcctcctcctcgccggcgccggcggcggacttggtcgactacctgggtcccgacacctccgtcaccgtcttcaccatgctccaccaccccgccgacctcgcacgcgcatccgccgtctcccgatcctggcgacaattcgttatcgacaaccagttcagcaagctgcagtgcctgcgggcctgcccggagctctccaccttcacccaagtcgacatcaccaccacctccggctccagaaccccggcacgccgggaccaggacaccaccaccgggtcgagcgccgaggacgagaagctccacagggtgtacacgcacctcggccacggcctcctctcgccctacaagcccagggactgcatcatccactgcatcggcgcctccagcaccgacaacttccccgacgagaccatcgagaacaccctcgagcccgtcgaccacctcgagtccaacaggccctcctactggtccagcggcggccagagggaccccgccgtgcccgagtgcctcatatatcgcctccaggccgatctctgcctcatccaagagatcaagctgcagccattcaaagcgtttttccagcatggcgatcccatatattcgccaaagagcatccgcatccagatgggctatccaaggtcaccgctacgccctgaagcacttgtctgtgatgaaaatgaaggccagttgattgatgatagaaactacgtctggacctacacatctccagaattcccaatgctgcaggaaaatgttttgcaatcctttaagttaccacggccggttctgtgtattggcggggtggtgaaggttgagcttcttgggagagttcagaaacaggcaatcgatggcctctactacatatgcatatctcatgtccaaatagtggggaaggcactgtcccgagacctgggggttgttcctcgcgggaacggcctggtcctgaactactatctggatccccgtacatgcggcgttccccgccgtgaaccgtcacgggacgatgggcgcagcaggtggcagggcctggcgtcaaggatctggcattctggcacggcgcgagggataggaggtctgaaccaaacgctgttgagtagactgtttggcggtccgttgcggctcgtggtcgtagcggacgaatcggaaggggaggaggaggaggatcttccttagaaggaaggaaggagctcaagggaggagggtcttatttgatttgatttgatcttctgcacaaaagaaacatgtgatagttacatatataagagtg

SEQ ID NO: 68907 - protein, 398 aa, Triticum aestivum
  peptide (1)..(398): Ceres Seq. ID no. 15219208
  misc_feature (248)..(326): Homolog of NCBI NO: 28850404 NR Description: hypothetical protein [Dictyostelium discoideum]
  misc_feature (110)..(235): Homolog of NCBI NO: 28850404 NR Description: hypothetical protein [Dictyostelium discoideum]
  misc_feature (249)..(323): Homolog of NCBI NO: 18308222 NR Description: unknown protein [Oryza sativa]
  misc_feature (19)..(221): Homolog of NCBI NO: 7452420 NR Description: hypothetical protein A_TM018A10.10 - Arabidopsis
  misc_feature (161)..(396): Homolog of NCBI NO: 28393062 NR Description: putative F-box protein [Arabidopsis thaliana]
  misc_feature (19)..(396): Homolog of NCBI NO: 18411435 NR Description: F-box protein family [Arabidopsis thaliana]
  misc_feature (19)..(395): Homolog of NCBI NO: 31193913 NR Description: unknown protein [Oryza sativa (japonica
MDMEDSSSCSSSSPAPAADLVDYLGPDTSVTVFTMLHHPADLARASAVSRSWRQFVIDNQFSKLQCLRACPELSTFTQVDITTTSGSRTPARRDQDTTTGSSAEDEKLHRVYTHLGHGLLSPYKPRDCIIHCIGASSTDNFPDETIENTLEPVDHLESNRPSYWSSGGQRDPAVPECLIYRLQADLCLIQEIKLQPFKAFFQHGDPIYSPKSIRIQMGYPRSPLRPEALVCDENEGQLIDDRNYVWTYTSPEFPMLQENVLQSFKLPRPVLCIGGVVKVELLGRVQKQAIDGLYYICISHVQIVGKALSRDLGVVPRGNGLVLNYYLDPRTCGVPRREPSRDDGRSRWQGLASRIWHSGTARGIGGLNQTLLSRLFGGPLRLVVVADESEGEEEEDLP

SEQ ID NO: 68908 - protein, 396 aa, Triticum aestivum
  peptide (1)..(396): Ceres Seq. ID no. 15219209
  misc_feature (246)..(324): Homolog of NCBI NO: 28850404 NR Description: hypothetical protein [Dictyostelium discoideum]
  misc_feature (108)..(233): Homolog of NCBI NO: 28850404 NR Description: hypothetical protein [Dictyostelium discoideum]
  misc_feature (247)..(321): Homolog of NCBI NO: 18308222 NR Description: unknown protein [Oryza sativa]
  misc_feature (17)..(219): Homolog of NCBI NO: 7452420 NR Description: hypothetical protein A_TM018A10.10 - Arabidopsis
  misc_feature (159)..(394): Homolog of NCBI NO: 28393062 NR Description: putative F-box protein [Arabidopsis thaliana]
  misc_feature (17)..(394): Homolog of NCBI NO: 18411435 NR Description: F-box protein family [Arabidopsis thaliana]
  misc_feature (17)..(393): Homolog of NCBI NO: 31193913 NR Description: unknown protein [Oryza sativa (japonica
MEDSSSCSSSSPAPAADLVDYLGPDTSVTVFTMLHHPADLARASAVSRSWRQFVIDNQFSKLQCLRACPELSTFTQVDITTTSGSRTPARRDQDTTTGSSAEDEKLHRVYTHLGHGLLSPYKPRDCIIHCIGASSTDNFPDETIENTLEPVDHLESNRPSYWSSGGQRDPAVPECLIYRLQADLCLIQEIKLQPFKAFFQHGDPIYSPKSIRIQMGYPRSPLRPEALVCDENEGQLIDDRNYVWTYTSPEFPMLQENVLQSFKLPRPVLCIGGVVKVELLGRVQKQAIDGLYYICISHVQIVGKALSRDLGVVPRGNGLVLNYYLDPRTCGVPRREPSRDDGRSRWQGLASRIWHSGTARGIGGLNQTLLSRLFGGPLRLVVVADESEGEEEEDLP

SEQ ID NO: 68909 - protein, 364 aa, Triticum aestivum
  peptide (1)..(364): Ceres Seq. ID no. 15219210
  misc_feature (214)..(292): Homolog of NCBI NO: 28850404 NR Description: hypothetical protein [Dictyostelium discoideum]
  misc_feature (76)..(201): Homolog of NCBI NO: 28850404 NR Description: hypothetical protein [Dictyostelium discoideum]
  misc_feature (215)..(289): Homolog of NCBI NO: 18308222 NR Description: unknown protein [Oryza sativa]
  misc_feature (1)..(187): Homolog of NCBI NO: 7452420 NR Description: hypothetical protein A_TM018A10.10 - Arabidopsis
  misc_feature (127)..(362): Homolog of NCBI NO: 28393062 NR Description: putative F-box protein [Arabidopsis thaliana]
  misc_feature (1)..(362): Homolog of NCBI NO: 18411435 NR Description: F-box protein family [Arabidopsis thaliana]
  misc_feature (1)..(361): Homolog of NCBI NO: 31193913 NR Description: unknown protein [Oryza sativa (japonica
MLHHPADLARASAVSRSWRQFVIDNQFSKLQCLRACPELSTFTQVDITTTSGSRTPARRDQDTTTGSSAEDEKLHRVYTHLGHGLLSPYKPRDCIIHCIGASSTDNFPDETIENTLEPVDHLESNRPSYWSSGGQRDPAVPECLIYRLQADLCLIQEIKLQPFKAFFQHGDPIYSPKSIRIQMGYPRSPLRPEALVCDENEGQLIDDRNYVWTYTSPEFPMLQENVLQSFKLPRPVLCIGGVVKVELLGRVQKQAIDGLYYICISHVQIVGKALSRDLGVVPRGNGLVLNYYLDPRTCGVPRREPSRDDGRSRWQGLASRIWHSGTARGIGGLNQTLLSRLFGGPLRLVVVADESEGEEEEDLP

SEQ ID NO: 68910 - DNA, 1226 bp, Triticum aestivum
  misc_feature (1)..(1226): Ceres Seq. ID no. 13596944
gtgcttctaagtttgctcctagctggcttgcttgctccttgtccatgccagccacggccatggagctctccagcctgccgctagtcctgctgctctgcttgatggcgggctcgtcgacggctgccctgccggcgctgcccgggatggacagggtgcggcagcaggtcgacagggcgaacaggcacggcccgtccattgggctcgtcatgtcgtacgtcgccgaggacaccgcgctccaggcctccggctacttcaggccttggcacgtccagcccttcattgacctctacggacggaggtttcacatcgggagtattcgaggtgtgaatgttatatacgcattgacagggcaacgcaggttgaatgcagctgtcactgtacaaactctcgtcgacgtctttaccgtgtctggtattgtccattatggcacagcaggaagctctaatgattcaatgtcatttggagatgtcagtgtccccaagttagttgcttatacaggcgcttggacatggaagaagtacaaatcacttaaagaagagtcaacagaactaaactttggacaatttaacgtcccgaatggaggagagaacctgctagggtctctgaaatacagaaatgaggagctatactcagttggcaagcccatggaagaagttttctggttacctgtagattcagcatggttcaaaatagcagaaggacttaaggtcaaccttgaaagatgtaatgacactttctgcttaccaaaaacgccacaagtggttcatgggctaaaaggagcatcagccgacatgtttctagacaatgcagaataccggaagttccttttcagagaatttgcagtgtcaacaatagatgaggagagcgcagcagtggtgatgacaacaacatctcctggcgtacctgtgattgtgttccggggagtatctgatctggctggagtggaaccaacatggtcatcaacaagcctgatgaacctggcatctattaatgcactcaaagtggcagtggagttcattgctacaattggcaggcagatgtcgacaccattagcacaaagttcaaaaaactgagacaaaagagagctgacatgtccatggagcaggactgtagaatagttttaaacagcaattgggaacaaaattcagagtgataagtgacccttagcttcaaagtacacaaaacattcaacagaagaattatgtattcaatatatactcaattgt

SEQ ID NO: 68911 - protein, 356 aa, Triticum aestivum
  peptide (1)..(356): Ceres Seq. ID no. 13596945
  misc_feature (65)..(339): Pfam Name: Phosphorylase family Pfam Description: Phosphorylase family
  misc_feature (18)..(342): Homolog of NCBI NO: 421813 NR Description: storage protein, bark - cottonwood
  misc_feature (20)..(342): Homolog of NCBI NO: 4775662 NR Description: major storage protein [Populus x canadensis]
  misc_feature (18)..(342): Homolog of NCBI NO: 99650 NR Description: major storage protein - Carolina poplar
  misc_feature (55)..(339): Homolog of NCBI NO: 7487317 NR Description: hypothetical protein T22A6.170 - Arabidopsis
  misc_feature (65)..(342): Homolog of NCBI NO: 481815 NR Description: vegetative storage protein win4.5 - western
  misc_feature (55)..(339): Homolog of NCBI NO: 18416327 NR Description: expressed protein [Arabidopsis thaliana]
  misc_feature (55)..(339): Homolog of NCBI NO: 21617914 NR Description: unknown [Arabidopsis thaliana]
  misc_feature (22)..(339): Homolog of NCBI NO: 21593613 NR Description: unknown [Arabidopsis thaliana]
  misc_feature (22)..(339): Homolog of NCBI NO: 30686500 NR Description: expressed protein [Arabidopsis thaliana]
  misc_feature (120)..(356): Homolog of NCBI NO: 34897886 NR Description: ESTs AU032452(S10068),C23571(S10068) correspond a region of the predicted gene.~Similar to P.trichocarpa x P.
ASKFAPSWLACSLSMPATAMELSSLPLVLLLCLMAGSSTAALPALPGMDRVRQQVDRANRHGPSIGLVMSYVAEDTALQASGYFRPWHVQPFIDLYGRRFHIGSIRGVNVIYALTGQRRLNAAVTVQTLVDVFTVSGIVHYGTAGSSNDSMSFGDVSVPKLVAYTGAWTWKKYKSLKEESTELNFGQFNVPNGGENLLGSLKYRNEELYSVGKPMEEVFWLPVDSAWFKIAEGLKVNLERCNDTFCLPKTPQVVHGLKGASADMFLDNAEYRKFLFREFAVSTIDEESAAVVMTTTSPGVPVIVFRGVSDLAGVEPTWSSTSLMNLASINALKVAVEFIATIGRQMSTPLAQSSKN

SEQ ID NO: 68912 - protein, 342 aa, Triticum aestivum
  peptide (1)..(342): Ceres Seq. ID no. 13596946
  misc_feature (51)..(325): Pfam Name: Phosphorylase family Pfam Description: Phosphorylase family
  misc_feature (4)..(328): Homolog of NCBI NO: 421813 NR Description: storage protein, bark - cottonwood
  misc_feature (6)..(328): Homolog of NCBI NO: 4775662 NR Description: major storage protein [Populus x canadensis]
  misc_feature (4)..(328): Homolog of NCBI NO: 99650 NR Description: major storage protein - Carolina poplar
  misc_feature (41)..(325): Homolog of NCBI NO: 7487317 NR Description: hypothetical protein T22A6.170 - Arabidopsis
  misc_feature (51)..(328): Homolog of NCBI NO: 481815 NR Description: vegetative storage protein win4.5 - western
  misc_feature (41)..(325): Homolog of NCBI NO: 18416327 NR Description: expressed protein [Arabidopsis thaliana]
  misc_feature (41)..(325): Homolog of NCBI NO: 21617914 NR Description: unknown [Arabidopsis thaliana]
  misc_feature (8)..(325): Homolog of NCBI NO: 21593613 NR Description: unknown [Arabidopsis thaliana]
  misc_feature (8)..(325): Homolog of NCBI NO: 30686500 NR Description: expressed protein [Arabidopsis thaliana]
  misc_feature (106)..(342): Homolog of NCBI NO: 34897886 NR Description: ESTs AU032452(S10068),C23571(S10068) correspond a region of the predicted gene.~Similar to P.trichocarpa x P.
MPATAMELSSLPLVLLLCLMAGSSTAALPALPGMDRVRQQVDRANRHGPSIGLVMSYVAEDTALQASGYFRPWHVQPFIDLYGRRFHIGSIRGVNVIYALTGQRRLNAAVTVQTLVDVFTVSGIVHYGTAGSSNDSMSFGDVSVPKLVAYTGAWTWKKYKSLKEESTELNFGQFNVPNGGENLLGSLKYRNEELYSVGKPMEEVFWLPVDSAWFKIAEGLKVNLERCNDTFCLPKTPQVVHGLKGASADMFLDNAEYRKFLFREFAVSTIDEESAAVVMTTTSPGVPVIVFRGVSDLAGVEPTWSSTSLMNLASINALKVAVEFIATIGRQMSTPLAQSSKN

SEQ ID NO: 68913 - protein, 337 aa, Triticum aestivum
  peptide (1)..(337): Ceres Seq. ID no. 13596947
  misc_feature (46)..(320): Pfam Name: Phosphorylase family Pfam Description: Phosphorylase family
  misc_feature (1)..(323): Homolog of NCBI NO: 421813 NR Description: storage protein, bark - cottonwood
  misc_feature (1)..(323): Homolog of NCBI NO: 4775662 NR Description: major storage protein [Populus x canadensis]
  misc_feature (1)..(323): Homolog of NCBI NO: 99650 NR Description: major storage protein - Carolina poplar
  misc_feature (36)..(320): Homolog of NCBI NO: 7487317 NR Description: hypothetical protein T22A6.170 - Arabidopsis
  misc_feature (46)..(323): Homolog of NCBI NO: 481815 NR Description: vegetative storage protein win4.5 - western
  misc_feature (36)..(320): Homolog of NCBI NO: 18416327 NR Description: expressed protein [Arabidopsis thaliana]
  misc_feature (36)..(320): Homolog of NCBI NO: 21617914 NR Description: unknown [Arabidopsis thaliana]
  misc_feature (3)..(320): Homolog of NCBI NO: 21593613 NR Description: unknown [Arabidopsis thaliana]
  misc_feature (3)..(320): Homolog of NCBI NO: 30686500 NR Description: expressed protein [Arabidopsis thaliana]
  misc_feature (101)..(337): Homolog of NCBI NO: 34897886 NR Description: ESTs AU032452(S10068),C23571(S10068) correspond a region of the predicted gene.~Similar to P.trichocarpa x P.
MELSSLPLVLLLCLMAGSSTAALPALPGMDRVRQQVDRANRHGPSIGLVMSYVAEDTALQASGYFRPWHVQPFIDLYGRRFHIGSIRGVNVIYALTGQRRLNAAVTVQTLVDVFTVSGIVHYGTAGSSNDSMSFGDVSVPKLVAYTGAWTWKKYKSLKEESTELNFGQFNVPNGGENLLGSLKYRNEELYSVGKPMEEVFWLPVDSAWFKIAEGLKVNLERCNDTFCLPKTPQVVHGLKGASADMFLDNAEYRKFLFREFAVSTIDEESAAVVMTTTSPGVPVIVFRGVSDLAGVEPTWSSTSLMNLASINALKVAVEFIATIGRQMSTPLAQSSKN

SEQ ID NO: 68914 - DNA, 1793 bp, Triticum aestivum
  misc_feature (1)..(1793): Ceres Seq. ID no. 13655298
tcctcccatttgctctgctcgctcgctcgccgccccctcctctcctccgatcctccccccacgtcccgcgccggagctggggagggaggggggaaattcacccccgcgccaggcggattccgccccggatccccgcgtcgggcaggccggccttcttacccggttaaccaagtacggtgcattctgaacggtagcctgtaactcttattgggtaattctaccacattatggcctcggttggtgcggtgcgtccttcctcgcgctttcagaatgacacgagtactagtggtgatgccgaccgacttccgaacgagatgggcaatatgagcataagggatgacagggaccctgaggatatagtagtcaacggcaatgggacggaaccaggccatattatagtcacaagcattgagggaagaaatgggcaagcaaaacagaccattagctacatggctgagcgcgtggttggtaatgggtcatttggaactgttttccaggctaagtgtcttgaaactggggagacggtggctataaagaaggttcttcaagacaagagatataagaaccgtgagctgcaaacgatgcgagttcttgaccacccaaatgttgtggctttaaagcaywrtwwwktctsraagactgagarggrggagctttacctcaacctggtgcttgagtatgtgccggagactgctcatcgtgtcattaagcattacaacaagatgaaccaacgcatgcccttgatatatgcaaaactgtacatgtatcagatatgtagatctttggcatacattcacaacagcattggagtatgccacagagacatcaagcctcaaaatcttctggtgaatccacatacacaccaattgaaattatgtgacttcggaagtgcgaaagtgttggtaaaaggagaaccaaatatttcctatatctgttcaaggtactatagagccccagagctcatatttggtgctactgaatacacaacggcaattgacgtttggtctgctggctgtgttcttgctgaactccttctaggacagcctatattccctggcgacagtggtgttgatcagcttgttgaaatcatcaaggttttaggtacccctacaagagaagaaattaagtgcatgaatccaaattatacagagtttaaattcccacaaatcaaagctcacccatggcacaagatcttccataaaagaatgcctgctgaagcagtagatcttgtctccagactcttgcaatattcaccaagcctgcgttcaactgctttggaagcattaattcatccattcttcgatgaactccgggacccaaacacccgtttaccgaacggccgttttcttcctcccctctttaactttaagccccatgagttgaagggcgtgccaatggacatcctggtgaagctcatccctgaacatgctcggaagaactgtgcctttgtaggatggtgatccgtcagacggctgcttgaagtttagttcagaacaaatccagttgtcgtctactagaaaccccaggaatttgagattgcctgcagccacacgggatataggcgatgacacatgtgattattattctttttctcgtccgagacctcgatgtcatgtattctttccccctactgccgatgtaacaaaccacccatgattctgtaagtagatgagaagtgtttcgaccgttttcccctgagctcatgtgctatgcaatgaaggatgcaccctatgtaccgccaatatttggtccagtatttgttcatggatccaggctataattcatttgtactc

SEQ ID NO: 68915 - protein, 410 aa, Triticum aestivum
  peptide (1)..(410): Ceres Seq. ID no. 15219731
  misc_feature (74)..(358): Pfam Name: Protein kinase domain Pfam Description: Protein kinase domain
  misc_feature (1)..(408): Homolog of NCBI NO: 15217795 NR Description: shaggy-related protein kinase kappa, putative
  misc_feature (1)..(409): Homolog of NCBI NO: 2398519 NR Description: shaggy-like kinase alpha [Arabidopsis thaliana]
  misc_feature (1)..(409): Homolog of NCBI NO: 541901 NR Description: protein kinase ASK-alpha (EC 2.7.1.-)
  misc_feature (1)..(409): Homolog of NCBI NO: 1709127 NR Description: Glycogen synthase kinase-3 homolog MsK-1
  misc_feature (1)..(409): Homolog of NCBI NO: 18421039 NR Description: shaggy-related protein kinase alpha [Arabidopsis
  misc_feature (1)..(409): Homolog of NCBI NO: 11182434 NR Description: GLYCOGEN SYNTHASE KINASE-3 HOMOLOG MSK-3
  misc_feature (1)..(409): Homolog of NCBI NO: 481018 NR Description: protein kinase MSK-3 (EC 2.7.1.-) [similarity] -
  misc_feature (1)..(408): Homolog of NCBI NO: 21553877 NR Description: shaggy related protein kinase ASK-GAMMA
  misc_feature (1)..(408): Homolog of NCBI NO: 15230058 NR Description: shaggy-related protein kinase gamma [Arabidopsis
  misc_feature (30)..(410): Homolog of NCBI NO: 21745456 NR Description: GSK-like kinase [Triticum aestivum]
  misc_feature (132)..(132): Xaa is any aa, unknown or other
  misc_feature (133)..(133): Xaa is any aa, unknown or other
  misc_feature (134)..(134): Xaa is any aa, unknown or other
  misc_feature (135)..(135): Xaa is any aa, unknown or other
  misc_feature (136)..(136): Xaa is any aa, unknown or other
  misc_feature (140)..(140): Xaa is any aa, unknown or other
  misc_feature (141)..(141): Xaa is any aa, unknown or other
MASVGAVRPSSRFQNDTSTSGDADRLPNEMGNMSIRDDRDPEDIVVNGNGTEPGHIIVTSIEGRNGQAKQTISYMAERVVGNGSFGTVFQAKCLETGETVAIKKVLQDKRYKNRELQTMRVLDHPNVVALKXXXXXKTEXXELYLNLVLEYVPETAHRVIKHYNKMNQRMPLIYAKLYMYQICRSLAYIHNSIGVCHRDIKPQNLLVNPHTHQLKLCDFGSAKVLVKGEPNISYICSRYYRAPELIFGATEYTTAIDVWSAGCVLAELLLGQPIFPGDSGVDQLVEIIKVLGTPTREEIKCMNPNYTEFKFPQIKAHPWHKIFHKRMPAEAVDLVSRLLQYSPSLRSTALEALIHPFFDELRDPNTRLPNGRFLPPLFNFKPHELKGVPMDILVKLIPEHARKNCAFVGW

SEQ ID NO: 68916 - protein, 381 aa, Triticum aestivum
  peptide (1)..(381): Ceres Seq. ID no. 15219732
  misc_feature (45)..(329): Pfam Name: Protein kinase domain Pfam Description: Protein kinase domain
  misc_feature (1)..(379): Homolog of NCBI NO: 15217795 NR Description: shaggy-related protein kinase kappa, putative
  misc_feature (1)..(380): Homolog of NCBI NO: 2398519 NR Description: shaggy-like kinase alpha [Arabidopsis thaliana]
  misc_feature (1)..(380): Homolog of NCBI NO: 541901 NR Description: protein kinase ASK-alpha (EC 2.7.1.-)
  misc_feature (1)..(380): Homolog of NCBI NO: 1709127 NR Description: Glycogen synthase kinase-3 homolog MsK-1
  misc_feature (1)..(380): Homolog of NCBI NO: 18421039 NR Description: shaggy-related protein kinase alpha [Arabidopsis
  misc_feature (1)..(380): Homolog of NCBI NO: 11182434 NR Description: GLYCOGEN SYNTHASE KINASE-3 HOMOLOG MSK-3
  misc_feature (1)..(380): Homolog of NCBI NO: 481018 NR Description: protein kinase MSK-3 (EC 2.7.1.-) [similarity] -
  misc_feature (1)..(379): Homolog of NCBI NO: 21553877 NR Description: shaggy related protein kinase ASK-GAMMA
  misc_feature (1)..(379): Homolog of NCBI NO: 15230058 NR Description: shaggy-related protein kinase gamma [Arabidopsis
  misc_feature (1)..(381): Homolog of NCBI NO: 21745456 NR Description: GSK-like kinase [Triticum aestivum]
  misc_feature (103)..(103): Xaa is any aa, unknown or other
  misc_feature (104)..(104): Xaa is any aa, unknown or other
  misc_feature (105)..(105): Xaa is any aa, unknown or other
  misc_feature (106)..(106): Xaa is any aa, unknown or other
  misc_feature (107)..(107): Xaa is any aa, unknown or other
  misc_feature (111)..(111): Xaa is any aa, unknown or other
  misc_feature (112)..(112): Xaa is any aa, unknown or other
MGNMSIRDDRDPEDIVVNGNGTEPGHIIVTSIEGRNGQAKQTISYMAERVVGNGSFGTVFQAKCLETGETVAIKKVLQDKRYKNRELQTMRVLDHPNVVALKXXXXXKTEXXELYLNLVLEYVPETAHRVIKHYNKMNQRMPLIYAKLYMYQICRSLAYIHNSIGVCHRDIKPQNLLVNPHTHQLKLCDFGSAKVLVKGEPNISYICSRYYRAPELIFGATEYTTAIDVWSAGCVLAELLLGQPIFPGDSGVDQLVEIIKVLGTPTREEIKCMNPNYTEFKFPQIKAHPWHKIFHKRMPAEAVDLVSRLLQYSPSLRSTALEALIHPFFDELRDPNTRLPNGRFLPPLFNFKPHELKGVPMDILVKLIPEHARKNCAFVGW

SEQ ID NO: 68917 - protein, 378 aa, Triticum aestivum
  peptide (1)..(378): Ceres Seq. ID no. 15219733
  misc_feature (42)..(326): Pfam Name: Protein kinase domain Pfam Description: Protein kinase domain
  misc_feature (1)..(376): Homolog of NCBI NO: 15217795 NR Description: shaggy-related protein kinase kappa, putative
  misc_feature (1)..(377): Homolog of NCBI NO: 2398519 NR Description: shaggy-like kinase alpha [Arabidopsis thaliana]
  misc_feature (1)..(377): Homolog of NCBI NO: 541901 NR Description: protein kinase ASK-alpha (EC 2.7.1.-)
  misc_feature (1)..(377): Homolog of NCBI NO: 1709127 NR Description: Glycogen synthase kinase-3 homolog MsK-1
  misc_feature (1)..(377): Homolog of NCBI NO: 18421039 NR Description: shaggy-related protein kinase alpha [Arabidopsis
  misc_feature (1)..(377): Homolog of NCBI NO: 11182434 NR Description: GLYCOGEN SYNTHASE KINASE-3 HOMOLOG MSK-3
  misc_feature (1)..(377): Homolog of NCBI NO: 481018 NR Description: protein kinase MSK-3 (EC 2.7.1.-) [similarity] -
  misc_feature (1)..(376): Homolog of NCBI NO: 21553877 NR Description: shaggy related protein kinase ASK-GAMMA
  misc_feature (1)..(376): Homolog of NCBI NO: 15230058 NR Description: shaggy-related protein kinase gamma [Arabidopsis
  misc_feature (1)..(378): Homolog of NCBI NO: 21745456 NR Description: GSK-like kinase [Triticum aestivum]
  misc_feature (100)..(100): Xaa is any aa, unknown or other
  misc_feature (101)..(101): Xaa is any aa, unknown or other
  misc_feature (102)..(102): Xaa is any aa, unknown or other
  misc_feature (103)..(103): Xaa is any aa, unknown or other
  misc_feature (104)..(104): Xaa is any aa, unknown or other
  misc_feature (108)..(108): Xaa is any aa, unknown or other
  misc_feature (109)..(109): Xaa is any aa, unknown or other
MSIRDDRDPEDIVVNGNGTEPGHIIVTSIEGRNGQAKQTISYMAERVVGNGSFGTVFQAKCLETGETVAIKKVLQDKRYKNRELQTMRVLDHPNVVALKXXXXXKTEXXELYLNLVLEYVPETAHRVIKHYNKMNQRMPLIYAKLYMYQICRSLAYIHNSIGVCHRDIKPQNLLVNPHTHQLKLCDFGSAKVLVKGEPNISYICSRYYRAPELIFGATEYTTAIDVWSAGCVLAELLLGQPIFPGDSGVDQLVEIIKVLGTPTREEIKCMNPNYTEFKFPQIKAHPWHKIFHKRMPAEAVDLVSRLLQYSPSLRSTALEALIHPFFDELRDPNTRLPNGRFLPPLFNFKPHELKGVPMDILVKLIPEHARKNCAFVGW

SEQ ID NO: 68918 - DNA, 773 bp, Triticum aestivum
  misc_feature (1)..(773): Ceres Seq. ID no. 15173496
atcaccttcaacaggctcatctaccaacccaacaaactaaaaccccacttcccaagaaaacaattcttagacaagacattgctcaaatggcatcccagctggtcgagagccaccgcgccggtgccgaggtccacaaggggagcgatatctgcaagaagaagacggtcgagcttctcgaagagctcggcctcccaaaaggcctctttcctatggatgacatcgaggaggtcgggcacaactgtgagagtgggtttgtgtggatgcttcagaagaagaagaacgagcacaccttcaacaagctcaaccagaccgtctcctatgacaccgaggtgaccgcttttgtggagaagggcaagatgaagaaggtcaccggggtcaagatcgaggaggtgtctttggtcgaggtctatgtggatgagtcttctgctgataaggtcaccgtcaagaccaacaccggtctgtctgacacccatgatgcggccgtgttcgctcccggagaatagggagctactagttaaaaaggccagaagaataaagtctgtgaatggttcggcactacagttcacatgttatgcagaaatatatgtttccgttttctttgtaatctcataaaggttgttgcatgaatgttgcttcctttcagcccatgttatgcagaaatttatgtttctgttttctttgtaatgtaataaaggatgctgcatgaatgttgcttcctttcggcccgtaagcatacgccaaatgtaatgaataacacttatccctcatcgacc

SEQ ID NO: 68919 - protein, 166 aa, Triticum aestivum
  peptide (1)..(166): Ceres Seq. ID no. 15173497
  misc_feature (32)..(165): Pfam Name: Protein of unknown function, DUF538 Pfam Description: Protein of unknown function, DUF538
  misc_feature (15)..(166): Homolog of NCBI NO: 34915430 NR Description: hypothetical protein~similar to Arabidopsis
  misc_feature (29)..(166): Homolog of NCBI NO: 34915376 NR Description: hypothetical protein~similar to Oryza sativa
  misc_feature (29)..(166): Homolog of NCBI NO: 34915426 NR Description: hypothetical protein~similar to Arabidopsis
  misc_feature (29)..(166): Homolog of NCBI NO: 34915422 NR Description: hypothetical protein~similar to Arabidopsis
  misc_feature (29)..(166): Homolog of NCBI NO: 34915418 NR Description: hypothetical protein~similar to Arabidopsis
  misc_feature (29)..(166): Homolog of NCBI NO: 33146557 NR Description: unknown protein [Oryza sativa (japonica
  misc_feature (29)..(166): Homolog of NCBI NO: 34915410 NR Description: hypothetical protein~similar to Arabidopsis
HLQQAHLPTQQTKTPLPKKTILRQDIAQMASQLVESHRAGAEVHKGSDICKKKTVELLEELGLPKGLFPMDDIEEVGHNCESGFVWMLQKKKNEHTFNKLNQTVSYDTEVTAFVEKGKMKKVTGVKIEEVSLVEVYVDESSADKVTVKTNTGLSDTHDAAVFAPGE

SEQ ID NO: 68920 - protein, 138 aa, Triticum aestivum
  peptide (1)..(138): Ceres Seq. ID no. 15173498
  misc_feature (4)..(137): Pfam Name: Protein of unknown function, DUF538 Pfam Description: Protein of unknown function, DUF538
  misc_feature (1)..(138): Homolog of NCBI NO: 34915430 NR Description: hypothetical protein~similar to Arabidopsis
  misc_feature (1)..(138): Homolog of NCBI NO: 34915376 NR Description: hypothetical protein~similar to Oryza sativa
  misc_feature (1)..(138): Homolog of NCBI NO: 34915426 NR Description: hypothetical protein~similar to Arabidopsis
  misc_feature (1)..(138): Homolog of NCBI NO: 34915422 NR Description: hypothetical protein~similar to Arabidopsis
  misc_feature (1)..(138): Homolog of NCBI NO: 34915418 NR Description: hypothetical protein~similar to Arabidopsis
  misc_feature (1)..(138): Homolog of NCBI NO: 33146557 NR Description: unknown protein [Oryza sativa (japonica
  misc_feature (1)..(138): Homolog of NCBI NO: 34915410 NR Description: hypothetical protein~similar to Arabidopsis
MASQLVESHRAGAEVHKGSDICKKKTVELLEELGLPKGLFPMDDIEEVGHNCESGFVWMLQKKKNEHTFNKLNQTVSYDTEVTAFVEKGKMKKVTGVKIEEVSLVEVYVDESSADKVTVKTNTGLSDTHDAAVFAPGE

SEQ ID NO: 68921 - protein, 110 aa, Triticum aestivum
  peptide (1)..(110): Ceres Seq. ID no. 15173499
ITFNRLIYQPNKLKPHFPRKQFLDKTLLKWHPSWSRATAPVPRSTRGAISARRRRSSFSKSSASQKASFLWMTSRRSGTTVRVGLCGCFRRRRTSTPSTSSTRPSPMTPR

SEQ ID NO: 68922 - DNA, 885 bp, Triticum aestivum
  misc_feature (1)..(885): Ceres Seq. ID no. 13596948
ctaaacctcgcaaaaccctccgccccccgctccccactccctcgccgtacaccaccgccgaagagagcgcggagagacccaccccacggcgatgtcgacggcggcggctacggtgttccgcgggtgccgggccctcatgtccccggcggcggcggcggcaaaggggggcaagaagaccgcatcggcggcggcggcggcggcgaaggggggcaagaagcccgcgccggcggccgcgaagcccaaggcggccaagaagccggtggatccgaacaatctccgcgggatcatgcggccggtgccggtctcggacgccctgcgcaagttcggcggcgccgctcacatctcccgctccggcgtactcaagatcgtctgggactacatcaaggccaatgacctccagaacccactgaacaagagggagatcatctgcgacgagaagctcaaaaccatctttccagggagggacacggttcatatgatggaggtcaccaagctcttgtcccctcatttcgtgaagagtatctaaggctgtcgagttgggggccaacgctggtgctttctgcccagggccagcgttggaatggaaggcttcttttgcgatccctgtccaagtcaaggttctactaggtagttaagttaatacggagttcagacttcagactttgtttgccatttaagggttgggggctcggtgatgcatgtaagaaggattcctcgtgttttgtggttctctcgtgccatcctgcgagggcacacccacatgcacatgcatgttgacgtggttcggtgtttttagtctgttaattccactttgcccttgtcatgtatatcatgcttctctcttggttgcagtggatggtgaatttgtgataagcaggttgtggc

SEQ ID NO: 68923 - protein, 144 aa, Triticum aestivum
  peptide (1)..(144): Ceres Seq. ID no. 13596949
  misc_feature (44)..(141): Homolog of NCBI NO: 18397658 NR Description: expressed protein [Arabidopsis thaliana]
  misc_feature (63)..(144): Homolog of NCBI NO: 18398106 NR Description: expressed protein [Arabidopsis thaliana]
  misc_feature (44)..(141): Homolog of NCBI NO: 15235320 NR Description: expressed protein [Arabidopsis thaliana]
  misc_feature (44)..(141): Homolog of NCBI NO: 21553903 NR Description: unknown [Arabidopsis thaliana]
  misc_feature (44)..(141): Homolog of NCBI NO: 14423526 NR Description: putative protein [Arabidopsis thaliana]
  misc_feature (18)..(142): Homolog of NCBI NO: 14488372 NR Description: hypothetical protein [Oryza sativa (japonica
  misc_feature (64)..(143): Homolog of NCBI NO: 18403898 NR Description: expressed protein [Arabidopsis thaliana]
  misc_feature (33)..(143): Homolog of NCBI NO: 33667910 NR Description: SWIb domain-containing protein [Solanum chacoense]
  misc_feature (1)..(143): Homolog of NCBI NO: 18396594 NR Description: expressed protein [Arabidopsis thaliana]
  misc_feature (1)..(143): Homolog of NCBI NO: 21593643 NR Description: unknown [Arabidopsis thaliana]
MSTAAATVFRGCRALMSPAAAAAKGGKKTASAAAAAAKGGKKPAPAAAKPKAAKKPVDPNNLRGIMRPVPVSDALRKFGGAAHISRSGVLKIVWDYIKANDLQNPLNKREIICDEKLKTIFPGRDTVHMMEVTKLLSPHFVKSI

SEQ ID NO: 68924 - protein, 135 aa, Triticum aestivum
  peptide (1)..(135): Ceres Seq. ID no. 13596950
  misc_feature (48)..(135): Pfam Name: TT viral orf 1 Pfam Description: TT viral orf 1
  misc_feature (48)..(135): Homolog of NCBI NO: 29250446 NR Description: GLP_39_87477_88058 [Giardia lamblia ATCC 50803]
KPRKTLRPPLPTPSPYTTAEESAERPTPRRCRRRRLRCSAGAGPSCPRRRRRQRGARRPHRRRRRRRRGARSPRRRPRSPRRPRSRWIRTISAGSCGRCRSRTPCASSAAPLTSPAPAYSRSSGTTSRPMTSRTH

SEQ ID NO: 68925 - protein, 130 aa, Triticum aestivum
  peptide (1)..(130): Ceres Seq. ID no. 13596951
  misc_feature (6)..(98): Pfam Name: Bindin Pfam Description: Bindin
  misc_feature (38)..(103): Homolog of NCBI NO: 15224564 NR Description: glycine-rich protein [Arabidopsis thaliana]
  misc_feature (34)..(97): Homolog of NCBI NO: 20152613 NR Description: putative glycine rich protein [Rumex obtusifolius]
  misc_feature (38)..(103): Homolog of NCBI NO: 30793991 NR Description: unknown protein [Arabidopsis thaliana]
LNLAKPSAPRSPLPRRTPPPKRARRDPPHGDVDGGGYGVPRVPGPHVPGGGGGKGGQEDRIGGGGGGEGGQEARAGGREAQGGQEAGGSEQSPRDHAAGAGLGRPAQVRRRRSHLPLRRTQDRLGLHQGQ

SEQ ID NO: 68926 - DNA, 1386 bp, Triticum aestivum
  misc_feature (1)..(1386): Ceres Seq. ID no. 13596954
gaacatcctaatcgaaaaataggcctcttcttagaaaaaaaaagaggacagactaagcggagaatcgagggtttcggcttccttgtcatctcgccgtctccgacgccggcgaccagggagcgagacctccaacccccgtcctctcgccggctgcgtgtttccccgttccgtagaccaggtatgaagagggccgcgccgtcggaggagccggtggagctctcttccggcgacgacctgagctcggattccgacgatgaggccgggaacgggaaaggcgagaactccttccggctgcccatgtcctccaaatctgcagctccagcaaaaggtgcattgatcaggagggctgaaatgtatcaagagtacatgaagcacatcccaattcctgatcactgcagctccttgatcccatccacatcatggctgggactcggaagatcggtgaagcagttgtacgagcagcccttgcattacctcaccaacatcctcttgagacagtgggatcaacagagggttgggagcgataatgagcaccagcctctggatgctatcattcaccctatgaaagctcaagccctcatttgggccactgaagaagtccataggctgaccacctctagtgaccacttagagaaggtctgggctaaagaccccatgtatcatgctaacatagatccagtgttcccttccctaaagttgcattagcaaacatcgcaagttggaccgtcttatcctgtctattttgtttctgcctgctgtgtaatctggcacattttggttgttagcgaagtgatatgaaccatatatcactgatgttaaacgtacgatatgtcatggtcagggtctcttttaacgctgattttagctctctgaacagcgtctttgttgaagaagaagaaacctggtggtgtggatttcagtgctttgagccggcacgggtatcgtggcggaccatctatactgacagttgctcctccaaaggttgaacctaactggacttggtccactgggaaagatcgcaacgagaaggaagttctaaccgagtcttttgaagagcgggaacgcacaagggctgcagtaactgaaggagagaagcttatcggtgtgatgaacccccaaccaaggcagaccgagaaagagaaggatgctgcttcattctcacagaaggagaagcggaagagagaccgtgggcaggccagcaggggtaagaactacgtcgaggaggagaagcggctcctgagggggagtggtgtctactctggcttcgatacttgacagtgtccagaacatatgttatttgtccgtgttagcttccgtcgttactgttggtgtgtctgctgtttagttttgtcgcgaagttcactctggtcaatcggggctatgctt

SEQ ID NO: 68927 - protein, 234 aa, Triticum aestivum
  peptide (1)..(234): Ceres Seq. ID no. 13596955
  misc_feature (67)..(187): Homolog of NCBI NO: 30102560 NR Description: At3g22680 [Arabidopsis thaliana]
  misc_feature (67)..(229): Homolog of NCBI NO: 30686741 NR Description: expressed protein [Arabidopsis thaliana]
EHPNRKIGLFLEKKRGQTKRRIEGFGFLVISPSPTPATRERDLQPPSSRRLRVSPFRRPGMKRAAPSEEPVELSSGDDLSSDSDDEAGNGKGENSFRLPMSSKSAAPAKGALIRRAEMYQEYMKHIPIPDHCSSLIPSTSWLGLGRSVKQLYEQPLHYLTNILLRQWDQQRVGSDNEHQPLDAIIHPMKAQALIWATEEVHRLTTSSDHLEKVWAKDPMYHANIDPVFPSLKLH

SEQ ID NO: 68928 - protein, 174 aa, Triticum aestivum
  peptide (1)..(174): Ceres Seq. ID no. 13596956
  misc_feature (7)..(127): Homolog of NCBI NO: 30102560 NR Description: At3g22680 [Arabidopsis thaliana]
  misc_feature (7)..(169): Homolog of NCBI NO: 30686741 NR Description: expressed protein [Arabidopsis thaliana]
MKRAAPSEEPVELSSGDDLSSDSDDEAGNGKGENSFRLPMSSKSAAPAKGALIRRAEMYQEYMKHIPIPDHCSSLIPSTSWLGLGRSVKQLYEQPLHYLTNILLRQWDQQRVGSDNEHQPLDAIIHPMKAQALIWATEEVHRLTTSSDHLEKVWAKDPMYHANIDPVFPSLKLH

SEQ ID NO: 68929 - protein, 135 aa, Triticum aestivum
  peptide (1)..(135): Ceres Seq. ID no. 13596957
  misc_feature (1)..(88): Homolog of NCBI NO: 30102560 NR Description: At3g22680 [Arabidopsis thaliana]
  misc_feature (1)..(130): Homolog of NCBI NO: 30686741 NR Description: expressed protein [Arabidopsis thaliana]
MSSKSAAPAKGALIRRAEMYQEYMKHIPIPDHCSSLIPSTSWLGLGRSVKQLYEQPLHYLTNILLRQWDQQRVGSDNEHQPLDAIIHPMKAQALIWATEEVHRLTTSSDHLEKVWAKDPMYHANIDPVFPSLKLH

SEQ ID NO: 68930 - DNA, 1818 bp, Triticum aestivum
  misc_feature (1)..(1818): Ceres Seq. ID no. 12616225
ctcgacactgcgctcctttcccctcgccagacctggccgcgtccccaccgcccccgacccctcccactcctccctggccgcgtcgactgcccggatctccgcgcccagatcgccgggacacctcctcccctggagcagctgccgtcctcaccgcgccggattcctcactctcggaatcaggtggatgctatttgcaggctggtaaagacaactaactttgttgatcctgtgcgcaagaagtaatgatccggcccagctccaaggagtcacttaattatgacaacaatagccagaaagtttatcctcaaccaattgatgaaaatatgaatcagaacatgggcagtatgattggaagaatattcaacaacatatcctctttaaaggctgcatacattcagctgcaggaagctcacaccccatatgacccggacaagatacaaactgctgataagcttgtcatagatgagctcacgagcctttcagaactcaaacatacttacagagagagaaatcctaagccagtagcagcatcacctcaagattcacgcttgctttctgaaatacaggagcagcaaaacttgttaaagacgtacgaggtcatggtaaagaagttccagtcccagatccagaatagagatactgagattacccacttacagcagcaaaccgatgaggccaaacatcggaaaacaaaactggagaagaaattgaagcaaaggggcttacttaacaaggaatcagaggaatctgatgaagaagagagctatttctctgttgagctgacaccaagcttgtttacatctactgctgataacgcataccaatcaatacatgagttctcaaagcccttgatcaacatgatgaaagctgcaggttgggatcttgatgctgctgctaacgcaattgaacctgatgtagtttacacaaggagagctcacaagaagtatgcatttgagtcttatatctgccagagaatcttcagtggtttccatcaagagaacttcttgattgacgctgctaatgccactgtttccaatgaggctttcttccatcaattccttgcagtacgagccatggatcctttggatgtattgagccaaaacccagattcagttttcggaaagttctgcagaagcaaatacctactgcttgtgcacccaaagatggaaggttctttcttcggcaacatggatcagagaaactacgtcatgagtggcgggcatccaaggacacctttctatcaggcatttctcaagttggcgaagtccatatggttgttgcacaggctggcctactctttcgacccaaaggtcagggtcttccaagtgaagaaggcaagcgagttctcagagattcacatggaaagcgttgtgaagaacatcgtcttggatgagaatgccgagaggcctagagtcgacttgatggtgatgcctggtttcttgatcgggactagcgtcatacagtctcgagtgtacctttctggtgtaaagtgtgacgactgataagtgttagggttgcctgagaagattccgggcgtctcacacatcctgcaagatcatcgtacgtcttgtatgtaatgccgcctctccaaaatgttattcgtatgaaatgtggtagcaacacctttttcgtaaaaagcatagtatgctttggtcattcgaagactgtaatgtgtgctttctctgttttgtaatgcatgtaaatcctgtcccaacgtttggtctacatataagttatgaaaaattgtcaatgtggcgtggatgtaccatctatatggtgactgtacagccatttgcaaactggcattcagttcctcgc

SEQ ID NO: 68931 - protein, 419 aa, Triticum aestivum
  peptide (1)..(419): Ceres Seq. ID no. 12616226
  misc_feature (24)..(156): Pfam Name: Plant protein of unknown function (DUF641) Pfam Description: Plant protein of unknown function (DUF641)
  misc_feature (28)..(414): Homolog of NCBI NO: 15232398 NR Description: putative protein; protein id: At3g60680.1
  misc_feature (34)..(415): Homolog of NCBI NO: 20466324 NR Description: unknown protein [Arabidopsis thaliana]
  misc_feature (34)..(415): Homolog of NCBI NO: 22329840 NR Description: unknown protein
  misc_feature (16)..(413): Homolog of NCBI NO: 15219282 NR Description: unknown protein; protein id: At1g53380.1
  misc_feature (32)..(413): Homolog of NCBI NO: 15231944 NR Description: hypothetical protein; protein id: At3g14870.1
  misc_feature (32)..(413): Homolog of NCBI NO: 8777470 NR Description: gb|AAB82637.1~gene_id:K15M2.1~similar to unknown
  misc_feature (24)..(304): Homolog of NCBI NO: 15234143 NR Description: hypothetical protein; protein id: At4g33320.1
  misc_feature (316)..(380): Homolog of NCBI NO: 15235221 NR Description: putative protein; protein id: At4g34080.1
  misc_feature (24)..(293): Homolog of NCBI NO: 15235221 NR Description: putative protein; protein id: At4g34080.1
  misc_feature (4)..(416): Homolog of NCBI NO: 15225441 NR Description: hypothetical protein
MIRPSSKESLNYDNNSQKVYPQPIDENMNQNMGSMIGRIFNNISSLKAAYIQLQEAHTPYDPDKIQTADKLVIDELTSLSELKHTYRERNPKPVAASPQDSRLLSEIQEQQNLLKTYEVMVKKFQSQIQNRDTEITHLQQQTDEAKHRKTKLEKKLKQRGLLNKESEESDEEESYFSVELTPSLFTSTADNAYQSIHEFSKPLINMMKAAGWDLDAAANAIEPDVVYTRRAHKKYAFESYICQRIFSGFHQENFLIDAANATVSNEAFFHQFLAVRAMDPLDVLSQNPDSVFGKFCRSKYLLLVHPKMEGSFFGNMDQRNYVMSGGHPRTPFYQAFLKLAKSIWLLHRLAYSFDPKVRVFQVKKASEFSEIHMESVVKNIVLDENAERPRVDLMVMPGFLIGTSVIQSRVYLSGVKCDD

SEQ ID NO: 68932 - protein, 392 aa, Triticum aestivum
  peptide (1)..(392): Ceres Seq. ID no. 12616227
  misc_feature (1)..(129): Pfam Name: Plant protein of unknown function (DUF641) Pfam Description: Plant protein of unknown function (DUF641)
  misc_feature (1)..(387): Homolog of NCBI NO: 15232398 NR Description: putative protein; protein id: At3g60680.1
  misc_feature (7)..(388): Homolog of NCBI NO: 20466324 NR Description: unknown protein [Arabidopsis thaliana]
  misc_feature (7)..(388): Homolog of NCBI NO: 22329840 NR Description: unknown protein
  misc_feature (1)..(386): Homolog of NCBI NO: 15219282 NR Description: unknown protein; protein id: At1g53380.1
  misc_feature (5)..(386): Homolog of NCBI NO: 15231944 NR Description: hypothetical protein; protein id: At3g14870.1
  misc_feature (5)..(386): Homolog of NCBI NO: 8777470 NR Description: gb|AAB82637.1~gene_id:K15M2.1~similar to unknown
  misc_feature (1)..(277): Homolog of NCBI NO: 15234143 NR Description: hypothetical protein; protein id: At4g33320.1
  misc_feature (289)..(353): Homolog of NCBI NO: 15235221 NR Description: putative protein; protein id: At4g34080.1
  misc_feature (1)..(266): Homolog of NCBI NO: 15235221 NR Description: putative protein; protein id: At4g34080.1
  misc_feature (1)..(389): Homolog of NCBI NO: 15225441 NR Description: hypothetical protein
MNQNMGSMIGRIFNNISSLKAAYIQLQEAHTPYDPDKIQTADKLVIDELTSLSELKHTYRERNPKPVAASPQDSRLLSEIQEQQNLLKTYEVMVKKFQSQIQNRDTEITHLQQQTDEAKHRKTKLEKKLKQRGLLNKESEESDEEESYFSVELTPSLFTSTADNAYQSIHEFSKPLINMMKAAGWDLDAAANAIEPDVVYTRRAHKKYAFESYICQRIFSGFHQENFLIDAANATVSNEAFFHQFLAVRAMDPLDVLSQNPDSVFGKFCRSKYLLLVHPKMEGSFFGNMDQRNYVMSGGHPRTPFYQAFLKLAKSIWLLHRLAYSFDPKVRVFQVKKASEFSEIHMESVVKNIVLDENAERPRVDLMVMPGFLIGTSVIQSRVYLSGVKCDD

SEQ ID NO: 68933 - protein, 388 aa, Triticum aestivum
  peptide (1)..(388): Ceres Seq. ID no. 12616228
  misc_feature (1)..(125): Pfam Name: Plant protein of unknown function (DUF641) Pfam Description: Plant protein of unknown function (DUF641)
  misc_feature (1)..(383): Homolog of NCBI NO: 15232398 NR Description: putative protein; protein id: At3g60680.1
  misc_feature (3)..(384): Homolog of NCBI NO: 20466324 NR Description: unknown protein [Arabidopsis thaliana]
  misc_feature (3)..(384): Homolog of NCBI NO: 22329840 NR Description: unknown protein
  misc_feature (1)..(382): Homolog of NCBI NO: 15219282 NR Description: unknown protein; protein id: At1g53380.1
  misc_feature (1)..(382): Homolog of NCBI NO: 15231944 NR Description: hypothetical protein; protein id: At3g14870.1
  misc_feature (1)..(382): Homolog of NCBI NO: 8777470 NR Description: gb|AAB82637.1~gene_id:K15M2.1~similar to unknown
  misc_feature (1)..(273): Homolog of NCBI NO: 15234143 NR Description: hypothetical protein; protein id: At4g33320.1
  misc_feature (285)..(349): Homolog of NCBI NO: 15235221 NR Description: putative protein; protein id: At4g34080.1
  misc_feature (1)..(262): Homolog of NCBI NO: 15235221 NR Description: putative protein; protein id: At4g34080.1
  misc_feature (1)..(385): Homolog of NCBI NO: 15225441 NR Description: hypothetical protein
MGSMIGRIFNNISSLKAAYIQLQEAHTPYDPDKIQTADKLVIDELTSLSELKHTYRERNPKPVAASPQDSRLLSEIQEQQNLLKTYEVMVKKFQSQIQNRDTEITHLQQQTDEAKHRKTKLEKKLKQRGLLNKESEESDEEESYFSVELTPSLFTSTADNAYQSIHEFSKPLINMMKAAGWDLDAAANAIEPDVVYTRRAHKKYAFESYICQRIFSGFHQENFLIDAANATVSNEAFFHQFLAVRAMDPLDVLSQNPDSVFGKFCRSKYLLLVHPKMEGSFFGNMDQRNYVMSGGHPRTPFYQAFLKLAKSIWLLHRLAYSFDPKVRVFQVKKASEFSEIHMESVVKNIVLDENAERPRVDLMVMPGFLIGTSVIQSRVYLSGVKCDD

SEQ ID NO: 68934 - DNA, 1379 bp, Triticum aestivum
  misc_feature (1)..(1379): Ceres Seq. ID no. 13598413
acgtcttctccttctctaccttctccccatcaagaacccaatccaaacctcagcttcgaacgaatcccaagcgattccccaagaggtttcattttgcgtcagatcaagcccagaatccgccactacccgccgagtgaagtagagcggcgagcggcgaggagggaccatggcgtcgttgccagaggaggaggaggccttcgagcacacgctgctggtggtgcgcgaggtgtcggtgttcaagatcccgccgcgcaccaccagcggcggctacaagtgcggcgagtggctgcagacggacaagatctggacgggccgcctccgcgtggtgtcgtgcggcgaccgctgcgagatccggctcgaggacccgggctccggggacctcttcgccgcctgcttcgtgctgcccggccagagggacagcgccgtcgagaccgtgctcgactcgtcgcgctacttcgtgctccgcatcgaggacggcagggggaagcatgccttcgtcggcctgggcttcggcgagcgcaatgaggccttcgacttcaacgtggccctgtcggatcacgagaagtatgtcaagagggagcaagataaggagaccggtggcgaggaggcagacgacagccagattgacatccacccggcagtgaatcgccggctcaaggaaggtgaaaccattaggataaacgtgaaaaacaagccatcaactggaagtggcatgctttcctctgctggcttatctggtggggccactgaaaaacctaaagcaagcatgcttcttgcaccaccgccaggtgcaaccgggaagcttcggtctccgctcccacctccccctaatgactctgcatctgcaagaatgagttctggacccaatgctggaaccagggcctcaaaagaacctaccaagaaaagcatcgaccccttttcagatatttctgctatagagcgaagcctaccctcgtctactgaactgggacaaacaaaaagcaccggtgccggatgggcagcattttgacaacagaatgccatctgctgtgtcacagacaaagaaaattgtgtgactgaaaaagtacacaaaatttctactcactggagcttgtaccctatgaaatcacatggtgaaaaatgacgatctgcatccacttggtacttgaaaaataaacctttggggaggtgctgttatctatcaaggcatcaacccgcatggattcagggagcttcgaaagtctgaatattttcctgaatagaagtgtgggtttccttgtttgtcatatttgtgtttgccagatctcatatactgatacaagaatcatactgacctccacttgtatttctgtcctgaaagattcgagagtactgtttatgcgaaaagcttgttttattct

SEQ ID NO: 68935 - protein, 280 aa, Triticum aestivum
  peptide (1)..(280): Ceres Seq. ID no. 13598414
  misc_feature (8)..(280): Homolog of NCBI NO: 37589671 NR Description: Unknown (protein for MGC:73124) [Danio rerio]
  misc_feature (8)..(263): Homolog of NCBI NO: 34858413 NR Description: similar to RIKEN cDNA 1200016B17 [Rattus
  misc_feature (8)..(263): Homolog of NCBI NO: 27229051 NR Description: RIKEN cDNA 1200016B17 [Mus musculus]
  misc_feature (7)..(280): Homolog of NCBI NO: 13384758 NR Description: RIKEN cDNA 1110005F07 [Mus musculus]
  misc_feature (7)..(280): Homolog of NCBI NO: 8922416 NR Description: hypothetical protein FLJ10420 [Homo sapiens]
  misc_feature (7)..(280): Homolog of NCBI NO: 10435511 NR Description: unnamed protein product [Homo sapiens]
  misc_feature (6)..(280): Homolog of NCBI NO: 25406749 NR Description: hypothetical protein [imported] - Arabidopsis
  misc_feature (6)..(260): Homolog of NCBI NO: 14596175 NR Description: Unknown protein [Arabidopsis thaliana]
  misc_feature (6)..(280): Homolog of NCBI NO: 18379172 NR Description: expressed protein [Arabidopsis thaliana]
  misc_feature (6)..(280): Homolog of NCBI NO: 37535352 NR Description: unknown protein [Oryza sativa (japonica
MASLPEEEEAFEHTLLVVREVSVFKIPPRTTSGGYKCGEWLQTDKIWTGRLRVVSCGDRCEIRLEDPGSGDLFAACFVLPGQRDSAVETVLDSSRYFVLRIEDGRGKHAFVGLGFGERNEAFDFNVALSDHEKYVKREQDKETGGEEADDSQIDIHPAVNRRLKEGETIRINVKNKPSTGSGMLSSAGLSGGATEKPKASMLLAPPPGATGKLRSPLPPPPNDSASARMSSGPNAGTRASKEPTKKSIDPFSDISAIERSLPSSTELGQTKSTGAGWAAF

SEQ ID NO: 68936 - protein, 174 aa, Triticum aestivum
  peptide (1)..(174): Ceres Seq. ID no. 13598415
TSSPSLPSPHQEPNPNLSFERIPSDSPRGFILRQIKPRIRHYPPSEVERRAARRDHGVVARGGGGLRAHAAGGARGVGVQDPAAHHQRRLQVRRVAADGQDLDGPPPRGVVRRPLRDPARGPGLRGPLRRLLRAARPEGQRRRDRARLVALLRAPHRGRQGEACLRRPGLRRAQ

SEQ ID NO: 68937 - DNA, 1290 bp, Triticum aestivum
  misc_feature (1)..(1290): Ceres Seq. ID no. 13596993
atccgaatcttcccttgcaacaatcatccgtaaggccgtcatcgccttccgccccgcggccgcggggagacgcgatgcagggactccaccgccgctaccgatggatcaaggagtgggttccgcaggacctcgtcatcgccggcggcccgtgcgcgctttacaagtgggtgcgagaggataggttggctgctcttaagtccaaggacaaggaagaaggggcatgcactgcaaagcctgaccctgccactgaggttcttttcttatgcagctatgatggctgtgggaaaacttttgttgatgcaggtgctcttaggaaacatgcccacgtgcatggggagaggcagtatgtctgtcactacgagggatgtgggaagaaatttttagatagctctaagttgaagaggcattttcttattcatacaggcgagaagaacttcgtctgccctcatgaaggttgtggcaaggctttctcattggattttaatttgaaggcacacatgaaaacccattttgcggataactatcatatgtgtccatacccagaatgtggtcgaagatttacacaggaatctaaactaagggctcatttcagggcacagcatgagaagaatccaggtgggcctgtaatgaaccgcaatgcactaggagatcaccctcataacacagcgaaatctctggtaacaccaccagttccatcagctgatcgtccgtatgtctgcccttacgatgggtgtgccaaggcatacattcacgagtacaaacttaacctccatttgaagaaagagcaccccaaccactattcagatgctggtgctcaagctggtccgtcgaggggcacagtatcgaagaattcccgtagaagcaagccaaacctcacaaccagcatgccactcgccaagatctctaagcgcagcggttatacggtgccatctccagctgtcagtatccctgaggagcatcagtggccaaggaaggtgttgtacgaagatgatagtgaggagaccgaggaagagggagataaccttgaggaggggggattgagatacagagctgctagcgacggcgatgacgatgaggagacggaggaagaagaatgagagctatgggttgctgtgcacatagtttatgatcaccggactggattatagttctgcatacatgtaacaatacatattaagggtggctagttaggcagaaacttgtgggctgcatgtaggtgtctcaatttaaggctattaattaacttattaagaagggtaatagatcatcacgcttccgtgctgagaatcc

SEQ ID NO: 68938 - protein, 364 aa, Triticum aestivum
  peptide (1)..(364): Ceres Seq. ID no. 15222013
  misc_feature (237)..(262): Pfam Name: Zinc finger, C2H2 type Pfam Description: Zinc finger, C2H2 type
  misc_feature (77)..(202): Homolog of NCBI NO: 1079317 NR Description: transcription activator/repressor protein
  misc_feature (77)..(202): Homolog of NCBI NO: 189174 NR Description: DNA-binding protein
  misc_feature (77)..(202): Homolog of NCBI NO: 88893 NR Description: transcription repressor protein YY1 - human
  misc_feature (88)..(203): Homolog of NCBI NO: 30142720 NR Description: RIKEN cDNA 9630032G22 gene [Mus musculus]
  misc_feature (88)..(207): Homolog of NCBI NO: 2565032 NR Description: transcription activator/repressor protein
  misc_feature (33)..(337): Homolog of NCBI NO: 18149203 NR Description: unknown protein [Arabidopsis thaliana]
  misc_feature (33)..(364): Homolog of NCBI NO: 4519673 NR Description: WREBP-2 [Nicotiana tabacum]
  misc_feature (273)..(364): Homolog of NCBI NO: 30680251 NR Description: expressed protein [Arabidopsis thaliana]
  misc_feature (33)..(285): Homolog of NCBI NO: 30680251 NR Description: expressed protein [Arabidopsis thaliana]
  misc_feature (72)..(320): Homolog of NCBI NO: 4927259 NR Description: putative transcription repressor maize TRM
PNLPLQQSSVRPSSPSAPRPRGDAMQGLHRRYRWIKEWVPQDLVIAGGPCALYKWVREDRLAALKSKDKEEGACTAKPDPATEVLFLCSYDGCGKTFVDAGALRKHAHVHGERQYVCHYEGCGKKFLDSSKLKRHFLIHTGEKNFVCPHEGCGKAFSLDFNLKAHMKTHFADNYHMCPYPECGRRFTQESKLRAHFRAQHEKNPGGPVMNRNALGDHPHNTAKSLVTPPVPSADRPYVCPYDGCAKAYIHEYKLNLHLKKEHPNHYSDAGAQAGPSRGTVSKNSRRSKPNLTTSMPLAKISKRSGYTVPSPAVSIPEEHQWPRKVLYEDDSEETEEEGDNLEEGGLRYRAASDGDDDEETEEEE

SEQ ID NO: 68939 - protein, 340 aa, Triticum aestivum
  peptide (1)..(340): Ceres Seq. ID no. 15222014
  misc_feature (213)..(238): Pfam Name: Zinc finger, C2H2 type Pfam Description: Zinc finger, C2H2 type
  misc_feature (53)..(178): Homolog of NCBI NO: 4507955 NR Description: YY1 transcription factor [Homo sapiens]
  misc_feature (53)..(178): Homolog of NCBI NO: 1079317 NR Description: transcription activator/repressor protein
  misc_feature (53)..(178): Homolog of NCBI NO: 88893 NR Description: transcription repressor protein YY1 - human
  misc_feature (64)..(179): Homolog of NCBI NO: 30142720 NR Description: RIKEN cDNA 9630032G22 gene [Mus musculus]
  misc_feature (64)..(183): Homolog of NCBI NO: 2565032 NR Description: transcription activator/repressor protein
  misc_feature (9)..(313): Homolog of NCBI NO: 18149203 NR Description: unknown protein [Arabidopsis thaliana]
  misc_feature (9)..(340): Homolog of NCBI NO: 4519673 NR Description: WREBP-2 [Nicotiana tabacum]
  misc_feature (249)..(340): Homolog of NCBI NO: 30680251 NR Description: expressed protein [Arabidopsis thaliana]
  misc_feature (9)..(261): Homolog of NCBI NO: 30680251 NR Description: expressed protein [Arabidopsis thaliana]
  misc_feature (48)..(296): Homolog of NCBI NO: 4927259 NR Description: putative transcription repressor maize TRM
MQGLHRRYRWIKEWVPQDLVIAGGPCALYKWVREDRLAALKSKDKEEGACTAKPDPATEVLFLCSYDGCGKTFVDAGALRKHAHVHGERQYVCHYEGCGKKFLDSSKLKRHFLIHTGEKNFVCPHEGCGKAFSLDFNLKAHMKTHFADNYHMCPYPECGRRFTQESKLRAHFRAQHEKNPGGPVMNRNALGDHPHNTAKSLVTPPVPSADRPYVCPYDGCAKAYIHEYKLNLHLKKEHPNHYSDAGAQAGPSRGTVSKNSRRSKPNLTTSMPLAKISKRSGYTVPSPAVSIPEEHQWPRKVLYEDDSEETEEEGDNLEEGGLRYRAASDGDDDEETEEEE

SEQ ID NO: 68940 - protein, 199 aa, Triticum aestivum
  peptide (1)..(199): Ceres Seq. ID no. 15222015
  misc_feature (72)..(97): Pfam Name: Zinc finger, C2H2 type Pfam Description: Zinc finger, C2H2 type
  misc_feature (1)..(37): Homolog of NCBI NO: 27545350 NR Description: YY1 transcription factor [Rattus norvegicus]
  misc_feature (1)..(37): Homolog of NCBI NO: 4507955 NR Description: YY1 transcription factor [Homo sapiens]
  misc_feature (1)..(37): Homolog of NCBI NO: 88893 NR Description: transcription repressor protein YY1 - human
  misc_feature (1)..(38): Homolog of NCBI NO: 30142720 NR Description: RIKEN cDNA 9630032G22 gene [Mus musculus]
  misc_feature (1)..(42): Homolog of NCBI NO: 2565032 NR Description: transcription activator/repressor protein
  misc_feature (1)..(172): Homolog of NCBI NO: 18149203 NR Description: unknown protein [Arabidopsis thaliana]
  misc_feature (1)..(199): Homolog of NCBI NO: 4519673 NR Description: WREBP-2 [Nicotiana tabacum]
  misc_feature (108)..(199): Homolog of NCBI NO: 30680251 NR Description: expressed protein [Arabidopsis thaliana]
  misc_feature (1)..(120): Homolog of NCBI NO: 30680251 NR Description: expressed protein [Arabidopsis thaliana]
  misc_feature (1)..(155): Homolog of NCBI NO: 4927259 NR Description: putative transcription repressor maize TRM
MKTHFADNYHMCPYPECGRRFTQESKLRAHFRAQHEKNPGGPVMNRNALGDHPHNTAKSLVTPPVPSADRPYVCPYDGCAKAYIHEYKLNLHLKKEHPNHYSDAGAQAGPSRGTVSKNSRRSKPNLTTSMPLAKISKRSGYTVPSPAVSIPEEHQWPRKVLYEDDSEETEEEGDNLEEGGLRYRAASDGDDDEETEEEE

SEQ ID NO: 68941 - DNA, 1410 bp, Triticum aestivum
  misc_feature (1)..(1410): Ceres Seq. ID no. 12625507
ctctttggagcgttctccagtctccctccctctctctctctctccctctgaatctccgtaatcactgttccattccgtggttaggagatgagcaagccacggaagaaacgcaagtatctggatgaacattgctactggaaccacacagacgagcaagataagcgtttcttcaaggttatgattggcgacttccatgagagaatggtaagctattttcagatcataccagataggtttgtccaacatttcagggggcaaacaggacgaactattaagctagtatcacgccatggttatacttttgatgttcagattaccaagaatttggagaaactagtccttgattcgggatggaaggcgtttgctcgtgcccataatttgagaacgggggactttcttgtgttcaagtatgatggcaactctgaactgaaggttttgatctttggtccgagcggttgcgagaaaattccggtgtgcaatctcaagaaaaatgctgctcctggtaaagaatggtggggaaactctgctggcattgtaaacacttgtcacaatcttcccatgaaatttccacatagtggaagacaaattaggccaagcaaggataccttaaggcaggggaatgacatcatcaatgtcagctcgtcgagctctgcttcagattcagcagaagatgatcattccctgccaggttgtatcctcgcaaatggcaccctctcgaatctaaatcaggtgcagaagaaccaacttaaagaaaaaatcagagctatgaattccgaaatccccatttatgggtgtgccataaggaagagcagtatttacggaaaaacccgcacccttgaaatatcaagaaaatatgctgaagtataccttccatttgaggaacaaatgctgacccttcagcatcatggcaagaagtgggaagtgagatgtagtgttaagaaaagcaaaggcaaaaggcttttgacaggctggaagcattttgcgtgtggcaacaacttgcagctgggagatgtctgcctctttgagctactgagaaacaaaaagaagtatgcaatgaatgtctatatcattcgcaaatccctttacaagaggaaatgagcatctgaagaaaagctagccacaagattcaagaaacagaagtagcaaaaggagttttgggtaaggccagaagagtggagccctgacaatatactaaaggaaagagctcagagtacataataaagctcaggtccagttagtttcagctgctttttgtgttatcatggatgtaatacttttaaaaccttatgtttacctttatgtttaagtggatgaactgtagtgtcagacaggacaatattatgttagaggttattgcgtggacgtactgtgggtcatgtcaggacagagttacattatggtcagttgctc

SEQ ID NO: 68942 - protein, 336 aa, Triticum aestivum
  peptide (1)..(336): Ceres Seq. ID no. 12625508
  misc_feature (211)..(331): Homolog of NCBI NO: 28201564 NR Description: putative auxin response factor
  misc_feature (9)..(148): Homolog of NCBI NO: 28201564 NR Description: putative auxin response factor
  misc_feature (184)..(331): Homolog of NCBI NO: 28201552 NR Description: putative auxin response factor
  misc_feature (211)..(331): Homolog of NCBI NO: 28201552 NR Description: putative auxin response factor
  misc_feature (6)..(195): Homolog of NCBI NO: 28201552 NR Description: putative auxin response factor
  misc_feature (16)..(305): Homolog of NCBI NO: 28201553 NR Description: putative auxin response factor
  misc_feature (1)..(291): Homolog of NCBI NO: 28201553 NR Description: putative auxin response factor
  misc_feature (39)..(127): Homolog of NCBI NO: 28201561 NR Description: putative auxin response factor
  misc_feature (145)..(330): Homolog of NCBI NO: 28201561 NR Description: putative auxin response factor
  misc_feature (1)..(330): Homolog of NCBI NO: 28201553 NR Description: putative auxin response factor
MSKPRKKRKYLDEHCYWNHTDEQDKRFFKVMIGDFHERMVSYFQIIPDRFVQHFRGQTGRTIKLVSRHGYTFDVQITKNLEKLVLDSGWKAFARAHNLRTGDFLVFKYDGNSELKVLIFGPSGCEKIPVCNLKKNAAPGKEWWGNSAGIVNTCHNLPMKFPHSGRQIRPSKDTLRQGNDIINVSSSSSASDSAEDDHSLPGCILANGTLSNLNQVQKNQLKEKIRAMNSEIPIYGCAIRKSSIYGKTRTLEISRKYAEVYLPFEEQMLTLQHHGKKWEVRCSVKKSKGKRLLTGWKHFACGNNLQLGDVCLFELLRNKKKYAMNVYIIRKSLYKRK

SEQ ID NO: 68943 - protein, 306 aa, Triticum aestivum
  peptide (1)..(306): Ceres Seq. ID no. 12625509
  misc_feature (181)..(301): Homolog of NCBI NO: 28201564 NR Description: putative auxin response factor
  misc_feature (1)..(118): Homolog of NCBI NO: 28201564 NR Description: putative auxin response factor
  misc_feature (154)..(301): Homolog of NCBI NO: 28201552 NR Description: putative auxin response factor
  misc_feature (181)..(301): Homolog of NCBI NO: 28201552 NR Description: putative auxin response factor
  misc_feature (1)..(165): Homolog of NCBI NO: 28201552 NR Description: putative auxin response factor
  misc_feature (1)..(275): Homolog of NCBI NO: 28201553 NR Description: putative auxin response factor
  misc_feature (1)..(261): Homolog of NCBI NO: 28201553 NR Description: putative auxin response factor
  misc_feature (9)..(97): Homolog of NCBI NO: 28201561 NR Description: putative auxin response factor
  misc_feature (115)..(300): Homolog of NCBI NO: 28201561 NR Description: putative auxin response factor
  misc_feature (1)..(300): Homolog of NCBI NO: 28201553 NR Description: putative auxin response factor
MIGDFHERMVSYFQIIPDRFVQHFRGQTGRTIKLVSRHGYTFDVQITKNLEKLVLDSGWKAFARAHNLRTGDFLVFKYDGNSELKVLIFGPSGCEKIPVCNLKKNAAPGKEWWGNSAGIVNTCHNLPMKFPHSGRQIRPSKDTLRQGNDIINVSSSSSASDSAEDDHSLPGCILANGTLSNLNQVQKNQLKEKIRAMNSEIPIYGCAIRKSSIYGKTRTLEISRKYAEVYLPFEEQMLTLQHHGKKWEVRCSVKKSKGKRLLTGWKHFACGNNLQLGDVCLFELLRNKKKYAMNVYIIRKSLYKRK

SEQ ID NO: 68944 - protein, 298 aa, Triticum aestivum
  peptide (1)..(298): Ceres Seq. ID no. 12625510
  misc_feature (173)..(293): Homolog of NCBI NO: 28201564 NR Description: putative auxin response factor
  misc_feature (1)..(110): Homolog of NCBI NO: 28201564 NR Description: putative auxin response factor
  misc_feature (146)..(293): Homolog of NCBI NO: 28201552 NR Description: putative auxin response factor
  misc_feature (173)..(293): Homolog of NCBI NO: 28201552 NR Description: putative auxin response factor
  misc_feature (1)..(157): Homolog of NCBI NO: 28201552 NR Description: putative auxin response factor
  misc_feature (1)..(267): Homolog of NCBI NO: 28201553 NR Description: putative auxin response factor
  misc_feature (1)..(253): Homolog of NCBI NO: 28201553 NR Description: putative auxin response factor
  misc_feature (1)..(89): Homolog of NCBI NO: 28201561 NR Description: putative auxin response factor
  misc_feature (107)..(292): Homolog of NCBI NO: 28201561 NR Description: putative auxin response factor
  misc_feature (1)..(292): Homolog of NCBI NO: 28201553 NR Description: putative auxin response factor
MVSYFQIIPDRFVQHFRGQTGRTIKLVSRHGYTFDVQITKNLEKLVLDSGWKAFARAHNLRTGDFLVFKYDGNSELKVLIFGPSGCEKIPVCNLKKNAAPGKEWWGNSAGIVNTCHNLPMKFPHSGRQIRPSKDTLRQGNDIINVSSSSSASDSAEDDHSLPGCILANGTLSNLNQVQKNQLKEKIRAMNSEIPIYGCAIRKSSIYGKTRTLEISRKYAEVYLPFEEQMLTLQHHGKKWEVRCSVKKSKGKRLLTGWKHFACGNNLQLGDVCLFELLRNKKKYAMNVYIIRKSLYKRK

SEQ ID NO: 68945 - DNA, 1315 bp, Triticum aestivum
  misc_feature (1)..(1315): Ceres Seq. ID no. 13655371
ataaaccgtagcgtagcgcgcatagcactcgcacggagacatagcacattagtatcttagcaccttgctaaaccctgaagcttagagaactcgaagcgccataaatttaatggctagcccgacgaagctcgacatggccggccatggcgacgaggtgacgaggaacaagaaggtggtgctgaggaggtacgtgacaggctacccgacggcggaggacatggaggtggtcgtcacctccgacgtccggctgcgggtgccggaggggtcggcggccgccgtggtggtcaagaacctgtacctgtcctgcgacccgtggatgcgcggccgcatgaccaagcatgacgacggcgacgccgtgccggccgaggacttcgtgcttggagaggccttggtcaatttcaccgtcggcgaggtggtcgactcgacgcacccggagttcgacgccggtgacctcgtatggggcatgagtgcatgggaggagtacaccctcatcacccaaacggagggcctgttcaagatcaaccaccccgagctgccactctcacactacacaggtgttcttggcttggcagggctcactgcatatgctggacttttcgaggttggcaagccaaagcaaggtgaaactgtttttgtgtcggcagcatctggcgccgtcggtcaggttgtcggacagctcgccaagatcgcaggatgctatgtggttggaagtgccggctccgatgagaaggtgagtctcctgaagagcaagatgggcttcgacgacgcgttcaactacaagtcggagggggacaacctcggcgcggcgctcgggcggcgcctcccggacggcatcgacgtctacttcgacaacgtgggtggtgcgacgctggacgcggcattgctgcggatgcggccgggcggcagggtggtggcgtgcgggatgatctcacagtacaatctgtcggagcaccagggggtgcgcaacctgtggtgcatcatcccaaagcgcgtccgggtggagggcttctcctgcatggactaccaccacctgtaccccaggttcgaggaggagatggccgcctatatcaacgcagggaaggtgaccgtcgcggaggacgtcgtccgagggattgagaaggcgcctgaggctctggtgggcctgttttctgggagaaatgtgggcaagctgttggttgctcttgcatgagtcgtgagtgcaagtccatggaatgatgacttctttctgtgttttattgaataagattgtacctgtgggcttataattatgatcatgtaattgtaagctacaaaaattatacacttctgttttggt

SEQ ID NO: 68946 - protein, 359 aa, Triticum aestivum
  peptide (1)..(359): Ceres Seq. ID no. 13655372
  misc_feature (109)..(356): Pfam Name: Zinc-binding dehydrogenase Pfam Description: Zinc-binding dehydrogenase
  misc_feature (17)..(359): Homolog of NCBI NO: 15237883 NR Description: NADP-dependent oxidoreductase, putative
  misc_feature (19)..(359): Homolog of NCBI NO: 17529140 NR Description: putative quinone oxidoreductase [Arabidopsis
  misc_feature (16)..(359): Homolog of NCBI NO: 21554121 NR Description: quinone oxidoreductase-like protein [Arabidopsis
  misc_feature (19)..(359): Homolog of NCBI NO: 21595408 NR Description: quinone oxidoreductase-like protein [Arabidopsis
  misc_feature (19)..(359): Homolog of NCBI NO: 21539447 NR Description: quinone oxidoreductase-like protein [Arabidopsis
  misc_feature (16)..(359): Homolog of NCBI NO: 15237890 NR Description: allyl alcohol dehydrogenase, putative
  misc_feature (19)..(359): Homolog of NCBI NO: 15237888 NR Description: NADP-dependent oxidoreductase (P1), putative
  misc_feature (9)..(359): Homolog of NCBI NO: 15228456 NR Description: NADP-dependent oxidoreductase (P2), putative
  misc_feature (14)..(359): Homolog of NCBI NO: 6692816 NR Description: allyl alcohol dehydrogenase [Nicotiana tabacum]
  misc_feature (19)..(359): Homolog of NCBI NO: 38345384 NR Description: OSJNBa0067K08.13 [Oryza sativa (japonica
MASPTKLDMAGHGDEVTRNKKVVLRRYVTGYPTAEDMEVVVTSDVRLRVPEGSAAAVVVKNLYLSCDPWMRGRMTKHDDGDAVPAEDFVLGEALVNFTVGEVVDSTHPEFDAGDLVWGMSAWEEYTLITQTEGLFKINHPELPLSHYTGVLGLAGLTAYAGLFEVGKPKQGETVFVSAASGAVGQVVGQLAKIAGCYVVGSAGSDEKVSLLKSKMGFDDAFNYKSEGDNLGAALGRRLPDGIDVYFDNVGGATLDAALLRMRPGGRVVACGMISQYNLSEHQGVRNLWCIIPKRVRVEGFSCMDYHHLYPRFEEEMAAYINAGKVTVAEDVVRGIEKAPEALVGLFSGRNVGKLLVALA

SEQ ID NO: 68947 - protein, 351 aa, Triticum aestivum
  peptide (1)..(351): Ceres Seq. ID no. 13655373
  misc_feature (101)..(348): Pfam Name: Zinc-binding dehydrogenase Pfam Description: Zinc-binding dehydrogenase
  misc_feature (9)..(351): Homolog of NCBI NO: 15237883 NR Description: NADP-dependent oxidoreductase, putative
  misc_feature (11)..(351): Homolog of NCBI NO: 17529140 NR Description: putative quinone oxidoreductase [Arabidopsis
  misc_feature (8)..(351): Homolog of NCBI NO: 21554121 NR Description: quinone oxidoreductase-like protein [Arabidopsis
  misc_feature (11)..(351): Homolog of NCBI NO: 21595408 NR Description: quinone oxidoreductase-like protein [Arabidopsis
  misc_feature (11)..(351): Homolog of NCBI NO: 21539447 NR Description: quinone oxidoreductase-like protein [Arabidopsis
  misc_feature (8)..(351): Homolog of NCBI NO: 15237890 NR Description: allyl alcohol dehydrogenase, putative
  misc_feature (11)..(351): Homolog of NCBI NO: 15237888 NR Description: NADP-dependent oxidoreductase (P1), putative
  misc_feature (1)..(351): Homolog of NCBI NO: 15228456 NR Description: NADP-dependent oxidoreductase (P2), putative
  misc_feature (6)..(351): Homolog of NCBI NO: 6692816 NR Description: allyl alcohol dehydrogenase [Nicotiana tabacum]
  misc_feature (11)..(351): Homolog of NCBI NO: 38345384 NR Description: OSJNBa0067K08.13 [Oryza sativa (japonica
MAGHGDEVTRNKKVVLRRYVTGYPTAEDMEVVVTSDVRLRVPEGSAAAVVVKNLYLSCDPWMRGRMTKHDDGDAVPAEDFVLGEALVNFTVGEVVDSTHPEFDAGDLVWGMSAWEEYTLITQTEGLFKINHPELPLSHYTGVLGLAGLTAYAGLFEVGKPKQGETVFVSAASGAVGQVVGQLAKIAGCYVVGSAGSDEKVSLLKSKMGFDDAFNYKSEGDNLGAALGRRLPDGIDVYFDNVGGATLDAALLRMRPGGRVVACGMISQYNLSEHQGVRNLWCIIPKRVRVEGFSCMDYHHLYPRFEEEMAAYINAGKVTVAEDVVRGIEKAPEALVGLFSGRNVGKLLVALA

SEQ ID NO: 68948 - protein, 323 aa, Triticum aestivum
  peptide (1)..(323): Ceres Seq. ID no. 13655374
  misc_feature (73)..(320): Pfam Name: Zinc-binding dehydrogenase Pfam Description: Zinc-binding dehydrogenase
  misc_feature (1)..(323): Homolog of NCBI NO: 15237883 NR Description: NADP-dependent oxidoreductase, putative
  misc_feature (1)..(323): Homolog of NCBI NO: 17529140 NR Description: putative quinone oxidoreductase [Arabidopsis
  misc_feature (1)..(323): Homolog of NCBI NO: 21554121 NR Description: quinone oxidoreductase-like protein [Arabidopsis
  misc_feature (1)..(323): Homolog of NCBI NO: 21595408 NR Description: quinone oxidoreductase-like protein [Arabidopsis
  misc_feature (1)..(323): Homolog of NCBI NO: 21539447 NR Description: quinone oxidoreductase-like protein [Arabidopsis
  misc_feature (1)..(323): Homolog of NCBI NO: 15237890 NR Description: allyl alcohol dehydrogenase, putative
  misc_feature (1)..(323): Homolog of NCBI NO: 15237888 NR Description: NADP-dependent oxidoreductase (P1), putative
  misc_feature (1)..(323): Homolog of NCBI NO: 15228456 NR Description: NADP-dependent oxidoreductase (P2), putative
  misc_feature (1)..(323): Homolog of NCBI NO: 6692816 NR Description: allyl alcohol dehydrogenase [Nicotiana tabacum]
  misc_feature (1)..(323): Homolog of NCBI NO: 38345384 NR Description: OSJNBa0067K08.13 [Oryza sativa (japonica
MEVVVTSDVRLRVPEGSAAAVVVKNLYLSCDPWMRGRMTKHDDGDAVPAEDFVLGEALVNFTVGEVVDSTHPEFDAGDLVWGMSAWEEYTLITQTEGLFKINHPELPLSHYTGVLGLAGLTAYAGLFEVGKPKQGETVFVSAASGAVGQVVGQLAKIAGCYVVGSAGSDEKVSLLKSKMGFDDAFNYKSEGDNLGAALGRRLPDGIDVYFDNVGGATLDAALLRMRPGGRVVACGMISQYNLSEHQGVRNLWCIIPKRVRVEGFSCMDYHHLYPRFEEEMAAYINAGKVTVAEDVVRGIEKAPEALVGLFSGRNVGKLLVALA

SEQ ID NO: 68949 - DNA, 1394 bp, Triticum aestivum
  misc_feature (1)..(1394): Ceres Seq. ID no. 13655382
aacactcgccgccgtccccgacagcaagaatcgcctagcgaaaatccttgcggctcggattccggcggccgccgccgcgatgaagctcgtccaccgcaacctcacccgcaacgggcccggctccgccaagctgctgccggaggaggaggacgacctgtggcacgcgtacaatctcatcgccgtaggggacagcctccaggccgtcactgtccggaaagttctgagagattctgcttcgggaggacgtgatgcggagcgcgtgaagctaaagttggagattgtagttgagtctgtagattatgacaaggaagggaacgttttgcgcgtccgtggcaaaaatattactgagaatgatcacgtgaagattggccagtttcatactttagaacttgagctgaagagaccttttgttctacgaaaggaatattgggattggttagcacttgataccatccaacaagcatgtgatcctactgcaagtgctgatctagcagttattcttatgcaagaaggacttgcccacttattccttattgggagaagcataacagcaacaaggtcacgtattgaaacctcgattcctaggaaacatggacctgccattgctggttacgagtcggctctcaagaagttctttgagcatgttttgcaagccttgctgaagcacattgattttgaagtggtccagtgtgttgtaattgcaagcccaggttttactaaggatcagtttcgtgattacatgcatcttgaagctgcacggcgagacttgagagtaataattgagaacaaatcacgcattattcttgcacatgcaccttcaggctacaagcatagtttgaaggaagttttggacaccccaggtgtgatgtcactgataaaagatacaaaagcggcacaggaggactcagcccgagcgtgttatggacctaagcacgttgaggtcgcacatgaacgtcttgcaatacaaactcttctgatgacagatactttgtttcggaacacggacatcgctagcaggagaaagtatgtgaacttggttgagtcagtcaagaaatatggtggtacagtgcacatattttcttcgatgcatgtctccggcgaccaattggctcagttgacaggaatagcagcaatacttcgtttccccctgccagatttggaggacatcgagatgtgattagtccagacctccggagctgcctaacatttgttgtaccaacctgttaacctatagctgatcaagtgtaataataatataacagttggttctatttaggtagcaacagaaagaaattctgatgacattttaatatatccttgttgtaaatggttagctatgccacatctattggttattcttgacttaataataagggccctctccattttttttc

SEQ ID NO: 68950 - protein, 391 aa, Triticum aestivum
  peptide (1)..(391): Ceres Seq. ID no. 13655383
  misc_feature (162)..(294): Pfam Name: eRF1 domain 2 Pfam Description: eRF1 domain 2
  misc_feature (27)..(390): Homolog of NCBI NO: 34980901 NR Description: Pelo protein [Mus musculus]
  misc_feature (27)..(390): Homolog of NCBI NO: 34854171 NR Description: similar to Pelo protein [Rattus norvegicus]
  misc_feature (27)..(388): Homolog of NCBI NO: 31222612 NR Description: ENSANGP00000006742 [Anopheles gambiae]
  misc_feature (27)..(388): Homolog of NCBI NO: 17136914 NR Description: pelota CG3959-PA [Drosophila melanogaster]
  misc_feature (27)..(388): Homolog of NCBI NO: 1352736 NR Description: PELOTA PROTEIN
  misc_feature (136)..(391): Homolog of NCBI NO: 19387279 NR Description: putative pelota [Oryza sativa (japonica
  misc_feature (27)..(90): Homolog of NCBI NO: 15231020 NR Description: pelota-related protein [Arabidopsis thaliana]
  misc_feature (85)..(391): Homolog of NCBI NO: 15231020 NR Description: pelota-related protein [Arabidopsis thaliana]
  misc_feature (27)..(391): Homolog of NCBI NO: 30687676 NR Description: pelota (PEL1) [Arabidopsis thaliana]
  misc_feature (27)..(391): Homolog of NCBI NO: 38345200 NR Description: OSJNBa0015K02.10 [Oryza sativa (japonica
TLAAVPDSKNRLAKILAARIPAAAAAMKLVHRNLTRNGPGSAKLLPEEEDDLWHAYNLIAVGDSLQAVTVRKVLRDSASGGRDAERVKLKLEIVVESVDYDKEGNVLRVRGKNITENDHVKIGQFHTLELELKRPFVLRKEYWDWLALDTIQQACDPTASADLAVILMQEGLAHLFLIGRSITATRSRIETSIPRKHGPAIAGYESALKKFFEHVLQALLKHIDFEVVQCVVIASPGFTKDQFRDYMHLEAARRDLRVIIENKSRIILAHAPSGYKHSLKEVLDTPGVMSLIKDTKAAQEDSARACYGPKHVEVAHERLAIQTLLMTDTLFRNTDIASRRKYVNLVESVKKYGGTVHIFSSMHVSGDQLAQLTGIAAILRFPLPDLEDIEM

SEQ ID NO: 68951 - protein, 365 aa, Triticum aestivum
  peptide (1)..(365): Ceres Seq. ID no. 13655384
  misc_feature (136)..(268): Pfam Name: eRF1 domain 2 Pfam Description: eRF1 domain 2
  misc_feature (1)..(364): Homolog of NCBI NO: 34980901 NR Description: Pelo protein [Mus musculus]
  misc_feature (1)..(364): Homolog of NCBI NO: 34854171 NR Description: similar to Pelo protein [Rattus norvegicus]
  misc_feature (1)..(362): Homolog of NCBI NO: 31222612 NR Description: ENSANGP00000006742 [Anopheles gambiae]
  misc_feature (1)..(362): Homolog of NCBI NO: 17136914 NR Description: pelota CG3959-PA [Drosophila melanogaster]
  misc_feature (1)..(362): Homolog of NCBI NO: 1352736 NR Description: PELOTA PROTEIN
  misc_feature (110)..(365): Homolog of NCBI NO: 19387279 NR Description: putative pelota [Oryza sativa (japonica
  misc_feature (1)..(64): Homolog of NCBI NO: 15231020 NR Description: pelota-related protein [Arabidopsis thaliana]
  misc_feature (59)..(365): Homolog of NCBI NO: 15231020 NR Description: pelota-related protein [Arabidopsis thaliana]
  misc_feature (1)..(365): Homolog of NCBI NO: 30687676 NR Description: pelota (PEL1) [Arabidopsis thaliana]
  misc_feature (1)..(365): Homolog of NCBI NO: 38345200 NR Description: OSJNBa0015K02.10 [Oryza sativa (japonica
MKLVHRNLTRNGPGSAKLLPEEEDDLWHAYNLIAVGDSLQAVTVRKVLRDSASGGRDAERVKLKLEIVVESVDYDKEGNVLRVRGKNITENDHVKIGQFHTLELELKRPFVLRKEYWDWLALDTIQQACDPTASADLAVILMQEGLAHLFLIGRSITATRSRIETSIPRKHGPAIAGYESALKKFFEHVLQALLKHIDFEVVQCVVIASPGFTKDQFRDYMHLEAARRDLRVIIENKSRIILAHAPSGYKHSLKEVLDTPGVMSLIKDTKAAQEDSARACYGPKHVEVAHERLAIQTLLMTDTLFRNTDIASRRKYVNLVESVKKYGGTVHIFSSMHVSGDQLAQLTGIAAILRFPLPDLEDIEM

SEQ ID NO: 68952 - protein, 224 aa, Triticum aestivum
  peptide (1)..(224): Ceres Seq. ID no. 13655385
  misc_feature (1)..(127): Pfam Name: eRF1 domain 2 Pfam Description: eRF1 domain 2
  misc_feature (1)..(223): Homolog of NCBI NO: 13543461 NR Description: pelota (Drosophila) homolog [Homo sapiens]
  misc_feature (1)..(223): Homolog of NCBI NO: 34980901 NR Description: Pelo protein [Mus musculus]
  misc_feature (1)..(223): Homolog of NCBI NO: 34854171 NR Description: similar to Pelo protein [Rattus norvegicus]
  misc_feature (1)..(221): Homolog of NCBI NO: 31222612 NR Description: ENSANGP00000006742 [Anopheles gambiae]
  misc_feature (1)..(221): Homolog of NCBI NO: 17136914 NR Description: pelota CG3959-PA [Drosophila melanogaster]
  misc_feature (1)..(221): Homolog of NCBI NO: 1352736 NR Description: PELOTA PROTEIN
  misc_feature (1)..(224): Homolog of NCBI NO: 19387279 NR Description: putative pelota [Oryza sativa (japonica
  misc_feature (1)..(224): Homolog of NCBI NO: 15231020 NR Description: pelota-related protein [Arabidopsis thaliana]
  misc_feature (1)..(224): Homolog of NCBI NO: 30687676 NR Description: pelota (PEL1) [Arabidopsis thaliana]
  misc_feature (1)..(224): Homolog of NCBI NO: 38345200 NR Description: OSJNBa0015K02.10 [Oryza sativa (japonica
MQEGLAHLFLIGRSITATRSRIETSIPRKHGPAIAGYESALKKFFEHVLQALLKHIDFEVVQCVVIASPGFTKDQFRDYMHLEAARRDLRVIIENKSRIILAHAPSGYKHSLKEVLDTPGVMSLIKDTKAAQEDSARACYGPKHVEVAHERLAIQTLLMTDTLFRNTDIASRRKYVNLVESVKKYGGTVHIFSSMHVSGDQLAQLTGIAAILRFPLPDLEDIEM

SEQ ID NO: 68953 - DNA, 1116 bp, Triticum aestivum
  misc_feature (1)..(1116): Ceres Seq. ID no. 13597006
gagatctcgacttgggaactctcacaagaagacgccgagaggagaggagaggatgctgctgaggagctcctccacgccattcctgcgctccttcctcacctcctcctcctcccctacgcccccttcctccctccagctccggcgggccttctccgacggccacctcccttcgctcaacccctcctcctccggcgacaacgacagcaacagaaccaccggcctccacaccgagctctccttctctgtctacaacaccttcagcaaggccaagctggagccccaccaggagcaggagatggaggaggagcaggagcaggcgccgcagcctgagctgccggagctgccgctgttcctggcgaggggcatggggatcgaccgcctcgcctccggcctcttcaccgccggcatgggctccgaggctgccctggccaggatggccagcggggtggaccagaaggcggtgctggcgctggacgcccagtacaaggagatggtggacgagcagcccggcaacgccctgttcctacgcaactacgcgcagttcctgcacgaggtgaagtgtgactcgagaagggcggaggagtactactcgcgcgcgatgctcgccgacccaaccgacggcgagatcatgtcgcagtacgcgaagctggtgtgggcggtgcaccgcgaccacgaaaggtccctcacctacttccagaagtcggtgcaggcggccccgcgggacagccacgtcctcgcggcgtacgccagcttcctgtgggagcaggacgaggacgaggacgacgacggtggtcttgggggaggcgagcagggatcacccgggcgtgctacgcagccgaggcagctggcttccacggccgtttgactaccagggtggccgagatgggctaacgatgtgcttgctgaggatgatcatgcttgtagtattgtgtttccgtgtaacctgcaaaatgtttggacggtcgaggtgcgtgcacttgctacagaataaagaacgtaaacggttgagggaatggaaggctggacctgtaaacattggtgattccgtctgcagatgctaagttgtcactatgtttattggctaaattataggagtactaagggggtgtttgttcc

SEQ ID NO: 68954 - protein, 287 aa, Triticum aestivum
  peptide (1)..(287): Ceres Seq. ID no. 13597007
  misc_feature (161)..(262): Homolog of NCBI NO: 37537130 NR Description: unknown protein [Oryza sativa (japonica
  misc_feature (156)..(262): Homolog of NCBI NO: 15236755 NR Description: expressed protein [Arabidopsis thaliana]
  misc_feature (156)..(262): Homolog of NCBI NO: 14532728 NR Description: unknown protein [Arabidopsis thaliana]
  misc_feature (161)..(262): Homolog of NCBI NO: 21592868 NR Description: unknown [Arabidopsis thaliana]
  misc_feature (161)..(262): Homolog of NCBI NO: 18414994 NR Description: expressed protein [Arabidopsis thaliana]
  misc_feature (161)..(262): Homolog of NCBI NO: 7487766 NR Description: hypothetical protein T6K21.120 - Arabidopsis
  misc_feature (112)..(269): Homolog of NCBI NO: 21555875 NR Description: unknown [Arabidopsis thaliana]
  misc_feature (112)..(269): Homolog of NCBI NO: 18390404 NR Description: expressed protein [Arabidopsis thaliana]
  misc_feature (130)..(262): Homolog of NCBI NO: 15241290 NR Description: expressed protein [Arabidopsis thaliana]
  misc_feature (7)..(270): Homolog of NCBI NO: 18412668 NR Description: expressed protein [Arabidopsis thaliana]
RSRLGNSHKKTPRGEERMLLRSSSTPFLRSFLTSSSSPTPPSSLQLRRAFSDGHLPSLNPSSSGDNDSNRTTGLHTELSFSVYNTFSKAKLEPHQEQEMEEEQEQAPQPELPELPLFLARGMGIDRLASGLFTAGMGSEAALARMASGVDQKAVLALDAQYKEMVDEQPGNALFLRNYAQFLHEVKCDSRRAEEYYSRAMLADPTDGEIMSQYAKLVWAVHRDHERSLTYFQKSVQAAPRDSHVLAAYASFLWEQDEDEDDDGGLGGGEQGSPGRATQPRQLASTAV

SEQ ID NO: 68955 - protein, 270 aa, Triticum aestivum
  peptide (1)..(270): Ceres Seq. ID no. 13597008
  misc_feature (144)..(245): Homolog of NCBI NO: 37537130 NR Description: unknown protein [Oryza sativa (japonica
  misc_feature (139)..(245): Homolog of NCBI NO: 15236755 NR Description: expressed protein [Arabidopsis thaliana]
  misc_feature (139)..(245): Homolog of NCBI NO: 14532728 NR Description: unknown protein [Arabidopsis thaliana]
  misc_feature (144)..(245): Homolog of NCBI NO: 21592868 NR Description: unknown [Arabidopsis thaliana]
  misc_feature (144)..(245): Homolog of NCBI NO: 18414994 NR Description: expressed protein [Arabidopsis thaliana]
  misc_feature (144)..(245): Homolog of NCBI NO: 7487766 NR Description: hypothetical protein T6K21.120 - Arabidopsis
  misc_feature (95)..(252): Homolog of NCBI NO: 21555875 NR Description: unknown [Arabidopsis thaliana]
  misc_feature (95)..(252): Homolog of NCBI NO: 18390404 NR Description: expressed protein [Arabidopsis thaliana]
  misc_feature (113)..(245): Homolog of NCBI NO: 15241290 NR Description: expressed protein [Arabidopsis thaliana]
  misc_feature (1)..(253): Homolog of NCBI NO: 18412668 NR Description: expressed protein [Arabidopsis thaliana]
MLLRSSSTPFLRSFLTSSSSPTPPSSLQLRRAFSDGHLPSLNPSSSGDNDSNRTTGLHTELSFSVYNTFSKAKLEPHQEQEMEEEQEQAPQPELPELPLFLARGMGIDRLASGLFTAGMGSEAALARMASGVDQKAVLALDAQYKEMVDEQPGNALFLRNYAQFLHEVKCDSRRAEEYYSRAMLADPTDGEIMSQYAKLVWAVHRDHERSLTYFQKSVQAAPRDSHVLAAYASFLWEQDEDEDDDGGLGGGEQGSPGRATQPRQLASTAV

SEQ ID NO: 68956 - protein, 189 aa, Triticum aestivum
  peptide (1)..(189): Ceres Seq. ID no. 13597009
  misc_feature (63)..(164): Homolog of NCBI NO: 37537130 NR Description: unknown protein [Oryza sativa (japonica
  misc_feature (58)..(164): Homolog of NCBI NO: 15236755 NR Description: expressed protein [Arabidopsis thaliana]
  misc_feature (58)..(164): Homolog of NCBI NO: 14532728 NR Description: unknown protein [Arabidopsis thaliana]
  misc_feature (63)..(164): Homolog of NCBI NO: 18414994 NR Description: expressed protein [Arabidopsis thaliana]
  misc_feature (63)..(164): Homolog of NCBI NO: 21592868 NR Description: unknown [Arabidopsis thaliana]
  misc_feature (63)..(164): Homolog of NCBI NO: 7487766 NR Description: hypothetical protein T6K21.120 - Arabidopsis
  misc_feature (14)..(171): Homolog of NCBI NO: 21555875 NR Description: unknown [Arabidopsis thaliana]
  misc_feature (14)..(171): Homolog of NCBI NO: 18390404 NR Description: expressed protein [Arabidopsis thaliana]
  misc_feature (32)..(164): Homolog of NCBI NO: 15241290 NR Description: expressed protein [Arabidopsis thaliana]
  misc_feature (1)..(172): Homolog of NCBI NO: 18412668 NR Description: expressed protein [Arabidopsis thaliana]
MEEEQEQAPQPELPELPLFLARGMGIDRLASGLFTAGMGSEAALARMASGVDQKAVLALDAQYKEMVDEQPGNALFLRNYAQFLHEVKCDSRRAEEYYSRAMLADPTDGEIMSQYAKLVWAVHRDHERSLTYFQKSVQAAPRDSHVLAAYASFLWEQDEDEDDDGGLGGGEQGSPGRATQPRQLASTAV

SEQ ID NO: 68957 - DNA, 1177 bp, Triticum aestivum
  misc_feature (1)..(1177): Ceres Seq. ID no. 14302454
accccccactccccatctatccccgccccgcccgtcccggatccacaccgccgccgcgatgccgtcgttcaaggccccggcgccgggcttctccgtccgcttcagcccgttccacgagcatcgcctcctcgctgccacctcgcagcacttcggtctcgtcggcaacgggcacctcctggttctcgacctctccgccgccgggcccggcgggcccggcctcaccccgctcttctccttccccacctccgacgcgctcttcgactgcgcgtggtccgagtcccacgactccctctgcgccgccgcgtcgggggacggctccgtgcggctcttcgacgtcacgctgccgccggcgcagaaccccgtccgcctcctccgggagcacgcgcgggaggtccacgggatcgactggaaccccgtccgccgcgacgccttcctctccgcctcctgggacgacaccctcaagctctggtcccccgaccgccccgcctccgtccgcaccttccgcggccacgagtactgcgtctacgccgccgcgtggtcggcccggcacccggacgtcttcgcgtcggcgtccggcgaccacacggcccgcgtctgggacgtgcgggagccggggcccaccctcgtcatcccggcccacgaccacgaggtgctctccctggattgggacaagtacgacccgtccatcctggccaccggctccgtcgacaagtcgatccgcatctgggacgtccgctcgccgcaggcgcccctcgcccagctcgcggggcacgggtacgccgtcaagcgcgtcaagttctcgccgcatcggcagggcatgctcatgtcctgctcctacgacatgacggtctgcatgtgggattaccggaaagaggacgccctgctgcaaaggtacggccaccacaccgagttcgtagctgggatcgacatgagcgtgctcaccgatgggctgctggccagcaccggctgggacgagatgatctacgtttggccatttgggagtgatcccagagcaatgtaacacaacatattttgataatctgtatcatgtctgttgagtcgatcttacattggctgtgatacatatggaatggaatggaagtaaacacctggtgagttgaagttggaataatgctacggtaccattgtttgcttcacaaattggttaagtttttag

SEQ ID NO: 68958 - protein, 339 aa, Triticum aestivum
  peptide (1)..(339): Ceres Seq. ID no. 14302455
  misc_feature (250)..(287): Pfam Name: WD domain, G-beta repeat Pfam Description: WD domain, G-beta repeat
  misc_feature (29)..(213): Homolog of NCBI NO: 40746753 NR Description: hypothetical protein AN0880.2 [Aspergillus
  misc_feature (29)..(330): Homolog of NCBI NO: 31216935 NR Description: ENSANGP00000020634 [Anopheles gambiae]
  misc_feature (18)..(330): Homolog of NCBI NO: 25090901 NR Description: Peroxisomal targeting signal 2 receptor (PTS2
  misc_feature (18)..(330): Homolog of NCBI NO: 6679283 NR Description: peroxisome biogenesis factor 7 [Mus musculus]
  misc_feature (18)..(330): Homolog of NCBI NO: 34852639 NR Description: similar to peroxisomal PTS2 receptor [Rattus
  misc_feature (29)..(330): Homolog of NCBI NO: 4505731 NR Description: peroxisomal biogenesis factor 7; peroxisome
  misc_feature (20)..(338): Homolog of NCBI NO: 16611997 NR Description: peroxisomal targeting signal 2 receptor
  misc_feature (20)..(338): Homolog of NCBI NO: 28195239 NR Description: peroxisomal targeting signal type 2 receptor
  misc_feature (20)..(338): Homolog of NCBI NO: 15218882 NR Description: peroxisomal targeting signal type 2 receptor
  misc_feature (20)..(338): Homolog of NCBI NO: 4689316 NR Description: peroxisomal targeting signal type 2 receptor
PPTPHLSPPRPSRIHTAAAMPSFKAPAPGFSVRFSPFHEHRLLAATSQHFGLVGNGHLLVLDLSAAGPGGPGLTPLFSFPTSDALFDCAWSESHDSLCAAASGDGSVRLFDVTLPPAQNPVRLLREHAREVHGIDWNPVRRDAFLSASWDDTLKLWSPDRPASVRTFRGHEYCVYAAAWSARHPDVFASASGDHTARVWDVREPGPTLVIPAHDHEVLSLDWDKYDPSILATGSVDKSIRIWDVRSPQAPLAQLAGHGYAVKRVKFSPHRQGMLMSCSYDMTVCMWDYRKEDALLQRYGHHTEFVAGIDMSVLTDGLLASTGWDEMIYVWPFGSDPRAM

SEQ ID NO: 68959 - protein, 334 aa, Triticum aestivum
  peptide (1)..(334): Ceres Seq. ID no. 14302456
  misc_feature (1)..(228): Pfam Name: Formin Homology 2 Domain Pfam Description: Formin Homology 2 Domain
TPHSPSIPAPPVPDPHRRRDAVVQGPGAGLLRPLQPVPRASPPRCHLAALRSRRQRAPPGSRPLRRRARRARPHPALLLPHLRRALRLRVVRVPRLPLRRRVGGRLRAALRRHAAAGAEPRPPPPGARAGGPRDRLEPRPPRRLPLRLLGRHPQALVPRPPRLRPHLPRPRVLRLRRRVVGPAPGRLRVGVRRPHGPRLGRAGAGAHPRHPGPRPRGALPGLGQVRPVHPGHRLRRQVDPHLGRPLAAGAPRPARGARVRRQARQVLAASAGHAHVLLLRHDGLHVGLPERGRPAAKVRPPHRVRSWDRHERAHRWAAGQHRLGRDDLRLAIWE

SEQ ID NO: 68960 - protein, 320 aa, Triticum aestivum
  peptide (1)..(320): Ceres Seq. ID no. 14302457
  misc_feature (231)..(268): Pfam Name: WD domain, G-beta repeat Pfam Description: WD domain, G-beta repeat
  misc_feature (10)..(194): Homolog of NCBI NO: 40746753 NR Description: hypothetical protein AN0880.2 [Aspergillus
  misc_feature (10)..(311): Homolog of NCBI NO: 31216935 NR Description: ENSANGP00000020634 [Anopheles gambiae]
  misc_feature (1)..(311): Homolog of NCBI NO: 25090901 NR Description: Peroxisomal targeting signal 2 receptor (PTS2
  misc_feature (1)..(311): Homolog of NCBI NO: 6679283 NR Description: peroxisome biogenesis factor 7 [Mus musculus]
  misc_feature (1)..(311): Homolog of NCBI NO: 34852639 NR Description: similar to peroxisomal PTS2 receptor [Rattus
  misc_feature (10)..(311): Homolog of NCBI NO: 4505731 NR Description: peroxisomal biogenesis factor 7; peroxisome
  misc_feature (1)..(319): Homolog of NCBI NO: 16611997 NR Description: peroxisomal targeting signal 2 receptor
  misc_feature (1)..(319): Homolog of NCBI NO: 28195239 NR Description: peroxisomal targeting signal type 2 receptor
  misc_feature (1)..(319): Homolog of NCBI NO: 15218882 NR Description: peroxisomal targeting signal type 2 receptor
  misc_feature (1)..(319): Homolog of NCBI NO: 4689316 NR Description: peroxisomal targeting signal type 2 receptor
MPSFKAPAPGFSVRFSPFHEHRLLAATSQHFGLVGNGHLLVLDLSAAGPGGPGLTPLFSFPTSDALFDCAWSESHDSLCAAASGDGSVRLFDVTLPPAQNPVRLLREHAREVHGIDWNPVRRDAFLSASWDDTLKLWSPDRPASVRTFRGHEYCVYAAAWSARHPDVFASASGDHTARVWDVREPGPTLVIPAHDHEVLSLDWDKYDPSILATGSVDKSIRIWDVRSPQAPLAQLAGHGYAVKRVKFSPHRQGMLMSCSYDMTVCMWDYRKEDALLQRYGHHTEFVAGIDMSVLTDGLLASTGWDEMIYVWPFGSDPRAM

SEQ ID NO: 68961 - DNA, 1152 bp, Triticum aestivum
  misc_feature (1)..(1152): Ceres Seq. ID no. 13597357
acatcctaatcgaaaagccgagagatcacaccgcagcacgcagacaaagcagacggggacagcacacggaaagagaggagagaggggagagagatcggagaggtgaccaccaccgccgcgccgagatgctggccgtgttcgaccagacggtggccaagtgcccggagggcctccgcagcccgccggcggccgggggagggggtacggcggcaggagggggcggaggcgcggccgcgctcatgaagggcttcgccgacgccaacgacgccgcggtcaccgtcagcctcggcgccgccggcgccctcgcctactcctcggccaacaagaaccccctcgtccccaggatgtttggttctgtgaacgacatattttgcctgttccaagggcatgttgagaacattggcaacctgaagcaacactatggtctgagcaagacagcaaatgaggttaccatcctgattgaggcctacagaaccctccgggacaggggcccgctcccagccagccaggtcgtgagagatctcagtggaaggttcgcttttatcctgtacgacaccgtgtcgaaatccaccttcgtcgctgctgatgctgatggcagtatccccttcttctggggcgtcgactctgaagaccaccttgtgttctctgacgacaatgagcttctcaaggcaggctgtggaaactcatttgcgccattccccaaaggctgcttctacaccacatctggagggctgcagagcttcgagcacccgctgaacgagctgaaggccgtgccacgtgtggacagccagggccagatgtgcggctccaccttcaaggtcgacagcgaggccaagaaggactcggggatccctcgcgtcggtagtgctgctgattggtctaaccactactagcttgatgacccttgttgtaaactgccaatcttgacactgaatcgctgagacaccgcactgcatctgcattttatttttgagcagtttacgacgctctagacaatgctgtttcaataaatgtactgtctgatgggtaatgatactgctgtaagtttaccgatactcgaacaaactctgatgccaccacctggtggtagaggtttatcagccaccctatatatgtctcgataaatagagttcagtgaaggcttagtttgtt

SEQ ID NO: 68962 - protein, 296 aa, Triticum aestivum
  peptide (1)..(296): Ceres Seq. ID no. 13597358
  misc_feature (92)..(293): Homolog of NCBI NO: 18416995 NR Description: expressed protein [Arabidopsis thaliana]
  misc_feature (42)..(293): Homolog of NCBI NO: 18400774 NR Description: expressed protein [Arabidopsis thaliana]
  misc_feature (42)..(276): Homolog of NCBI NO: 7488440 NR Description: aluminum-induced protein - rape
  misc_feature (42)..(274): Homolog of NCBI NO: 15239658 NR Description: aluminium-induced protein - like [Arabidopsis
  misc_feature (42)..(294): Homolog of NCBI NO: 542200 NR Description: hypothetical protein - garden asparagus
  misc_feature (42)..(295): Homolog of NCBI NO: 20340249 NR Description: aluminum-induced protein-like protein
  misc_feature (42)..(293): Homolog of NCBI NO: 15228883 NR Description: expressed protein [Arabidopsis thaliana]
  misc_feature (42)..(295): Homolog of NCBI NO: 15239993 NR Description: aluminum-induced protein-related [Arabidopsis
  misc_feature (14)..(296): Homolog of NCBI NO: 30017570 NR Description: unknown protein [Oryza sativa (japonica
ILIEKPRDHTAARRQSRRGQHTEREERGERDRRGDHHRRAEMLAVFDQTVAKCPEGLRSPPAAGGGGTAAGGGGGAAALMKGFADANDAAVTVSLGAAGALAYSSANKNPLVPRMFGSVNDIFCLFQGHVENIGNLKQHYGLSKTANEVTILIEAYRTLRDRGPLPASQVVRDLSGRFAFILYDTVSKSTFVAADADGSIPFFWGVDSEDHLVFSDDNELLKAGCGNSFAPFPKGCFYTTSGGLQSFEHPLNELKAVPRVDSQGQMCGSTFKVDSEAKKDSGIPRVGSAADWSNHY

SEQ ID NO: 68963 - protein, 255 aa, Triticum aestivum
  peptide (1)..(255): Ceres Seq. ID no. 13597359
  misc_feature (51)..(252): Homolog of NCBI NO: 18416995 NR Description: expressed protein [Arabidopsis thaliana]
  misc_feature (1)..(252): Homolog of NCBI NO: 18400774 NR Description: expressed protein [Arabidopsis thaliana]
  misc_feature (1)..(235): Homolog of NCBI NO: 7488440 NR Description: aluminum-induced protein - rape
  misc_feature (1)..(233): Homolog of NCBI NO: 15239658 NR Description: aluminium-induced protein - like [Arabidopsis
  misc_feature (1)..(253): Homolog of NCBI NO: 542200 NR Description: hypothetical protein - garden asparagus
  misc_feature (1)..(254): Homolog of NCBI NO: 20340249 NR Description: aluminum-induced protein-like protein
  misc_feature (1)..(252): Homolog of NCBI NO: 15228883 NR Description: expressed protein [Arabidopsis thaliana]
  misc_feature (1)..(254): Homolog of NCBI NO: 15239993 NR Description: aluminum-induced protein-related [Arabidopsis
  misc_feature (1)..(255): Homolog of NCBI NO: 30017570 NR Description: unknown protein [Oryza sativa (japonica
MLAVFDQTVAKCPEGLRSPPAAGGGGTAAGGGGGAAALMKGFADANDAAVTVSLGAAGALAYSSANKNPLVPRMFGSVNDIFCLFQGHVENIGNLKQHYGLSKTANEVTILIEAYRTLRDRGPLPASQVVRDLSGRFAFILYDTVSKSTFVAADADGSIPFFWGVDSEDHLVFSDDNELLKAGCGNSFAPFPKGCFYTTSGGLQSFEHPLNELKAVPRVDSQGQMCGSTFKVDSEAKKDSGIPRVGSAADWSNHY

SEQ ID NO: 68964 - protein, 217 aa, Triticum aestivum
  peptide (1)..(217): Ceres Seq. ID no. 13597360
  misc_feature (13)..(214): Homolog of NCBI NO: 18416995 NR Description: expressed protein [Arabidopsis thaliana]
  misc_feature (1)..(214): Homolog of NCBI NO: 18400774 NR Description: expressed protein [Arabidopsis thaliana]
  misc_feature (1)..(197): Homolog of NCBI NO: 7488440 NR Description: aluminum-induced protein - rape
  misc_feature (1)..(195): Homolog of NCBI NO: 15239658 NR Description: aluminium-induced protein - like [Arabidopsis
  misc_feature (1)..(215): Homolog of NCBI NO: 542200 NR Description: hypothetical protein - garden asparagus
  misc_feature (1)..(216): Homolog of NCBI NO: 20340249 NR Description: aluminum-induced protein-like protein
  misc_feature (1)..(214): Homolog of NCBI NO: 15228883 NR Description: expressed protein [Arabidopsis thaliana]
  misc_feature (1)..(216): Homolog of NCBI NO: 15239993 NR Description: aluminum-induced protein-related [Arabidopsis
  misc_feature (1)..(217): Homolog of NCBI NO: 30017570 NR Description: unknown protein [Oryza sativa (japonica
MKGFADANDAAVTVSLGAAGALAYSSANKNPLVPRMFGSVNDIFCLFQGHVENIGNLKQHYGLSKTANEVTILIEAYRTLRDRGPLPASQVVRDLSGRFAFILYDTVSKSTFVAADADGSIPFFWGVDSEDHLVFSDDNELLKAGCGNSFAPFPKGCFYTTSGGLQSFEHPLNELKAVPRVDSQGQMCGSTFKVDSEAKKDSGIPRVGSAADWSNHY

SEQ ID NO: 68965 - DNA, 1782 bp, Triticum aestivum
  misc_feature (1)..(1782): Ceres Seq. ID no. 13655716
gaacatcctaatcccctttggactttggcgttatatccgtcctcgagcccctcccgtcccgtcccggccctcgccctctctcccgaccccgcctgattccagtggcgctgctgcttcttctccgccgggacagacgagacacacgctggttgcggaggagctagcggcggaggtgctttcttcatcatggagtcgcagcagcagcagcagcagatggaggcggtttctgcgccggccgcctccacgaacgggggcggggagctgatcgggtacgtggacgtgcacgtgcggagcgcgcgggacatccagaacatctgcatctaccacaagcaggacgtgtacgcgcgcctctcgctgccgggggagggcgcgccggcggcgtccacgcaggtcatcaatggcggcggccgcaacccggtgtttgaccagtccgtgcgcgtcggcgtgcgcgcgggggacgtcgacgccgcgctccgctgcgaggtctggatgctcagccgggtcaagaactacctgcaggaccagctgctgggcttcgcgctcgtgccgctcccggacgtcgtcgccgccgagggtggcacgctcgcgcgcgagttcccgctctccaccaacgacctcttccactccccggccgggttcttggagctcgagctctcgtacatcggggtcgtgcccgatgtcattcccgtctcgcccacgcccaagcctgcgctggccgatccggatgagtgcgagaacgccggcggcggagccggcgctggcgcagggaaggactacgagaacatggagttccctgacatgaatcttgtggaggaaaaccagattatgctctcggaatatgttgggctgccgtgcacggccatggaaacgcagagctccgagagcctcctgacctcggaggacgtggatggcgccgccaccgagtcccacgacgctggcgtgcgcgtcgtgcagagcttctccacggactacagcaccgccgactcggccggcgccttccggagcgagacggcagccagcagcgtgtccaccacggagtccccggccgcggccgtcccggccaccccgcagtccaacccgtccgagccgtcaggaaacgccctctcatcagcaggccagaaggagaaggcctcggacgcggcggaggtcgattcgtctcccaccgttcaggagagcccggcggtgaactcgcccagcaccgtgtctgagaacgcggtggacaagccgccgccggcgatgagcttcaacttcgcggaggaggtgcaggtgaaccagaaggagatcatggacatgtacatgaagagcatgcagcagttcacggagtcgctggccaagatgaagctcccgctggacatggacaatggcagcgacaagagcgggagcggccccgccgccgcctcgcccacggattccagcggcaccgactcgagcgcggcgacgaagaaaccgacggccggggctgcgcaggagaaatctcccaaggtgttctacggaagccgagccttcttctagttctaggaggaaggaagccggagtagtgccgccggacggaccccggactagaagatggcatttgcagccatccgtctcagctgaaaacttggtagcgcagaggaataacacttttctcatgctgttgttttacttaggcttcgtcagatcccaagacacatgcggaaattagctgccctgtatgtcttacttttaatgtatcgctactctaatgagaaatgcttggcttcttttgcttgagtatacacatctgaattacttttaattcgc

SEQ ID NO: 68966 - protein, 441 aa, Triticum aestivum
  peptide (1)..(441): Ceres Seq. ID no. 15219766
  misc_feature (30)..(119): Pfam Name: C2 domain Pfam Description: C2 domain
  misc_feature (28)..(267): Homolog of NCBI NO: 18416832 NR Description: C2 domain-containing protein [Arabidopsis
  misc_feature (29)..(329): Homolog of NCBI NO: 34906644 NR Description: P0431G06.18 [Oryza sativa (japonica
  misc_feature (27)..(285): Homolog of NCBI NO: 25405379 NR Description: unknown protein [imported] - Arabidopsis thaliana
  misc_feature (27)..(285): Homolog of NCBI NO: 18403117 NR Description: C2 domain-containing protein [Arabidopsis
  misc_feature (27)..(281): Homolog of NCBI NO: 21593485 NR Description: unknown [Arabidopsis thaliana]
  misc_feature (27)..(385): Homolog of NCBI NO: 24414275 NR Description: Unknown protein [Oryza sativa (japonica
  misc_feature (22)..(329): Homolog of NCBI NO: 30696612 NR Description: C2 domain-containing protein [Arabidopsis
  misc_feature (22)..(329): Homolog of NCBI NO: 28393796 NR Description: unknown protein [Arabidopsis thaliana]
  misc_feature (22)..(329): Homolog of NCBI NO: 9758185 NR Description: gene_id:MTE17.25~pir||T07080~similar to unknown
  misc_feature (1)..(441): Homolog of NCBI NO: 34901084 NR Description: contains ESTs
MESQQQQQQMEAVSAPAASTNGGGELIGYVDVHVRSARDIQNICIYHKQDVYARLSLPGEGAPAASTQVINGGGRNPVFDQSVRVGVRAGDVDAALRCEVWMLSRVKNYLQDQLLGFALVPLPDVVAAEGGTLAREFPLSTNDLFHSPAGFLELELSYIGVVPDVIPVSPTPKPALADPDECENAGGGAGAGAGKDYENMEFPDMNLVEENQIMLSEYVGLPCTAMETQSSESLLTSEDVDGAATESHDAGVRVVQSFSTDYSTADSAGAFRSETAASSVSTTESPAAAVPATPQSNPSEPSGNALSSAGQKEKASDAAEVDSSPTVQESPAVNSPSTVSENAVDKPPPAMSFNFAEEVQVNQKEIMDMYMKSMQQFTESLAKMKLPLDMDNGSDKSGSGPAAASPTDSSGTDSSAATKKPTAGAAQEKSPKVFYGSRAFF

SEQ ID NO: 68967 - protein, 432 aa, Triticum aestivum
  peptide (1)..(432): Ceres Seq. ID no. 15219767
  misc_feature (21)..(110): Pfam Name: C2 domain Pfam Description: C2 domain
  misc_feature (19)..(258): Homolog of NCBI NO: 18416832 NR Description: C2 domain-containing protein [Arabidopsis
  misc_feature (20)..(320): Homolog of NCBI NO: 34906644 NR Description: P0431G06.18 [Oryza sativa (japonica
  misc_feature (18)..(276): Homolog of NCBI NO: 25405379 NR Description: unknown protein [imported] - Arabidopsis thaliana
  misc_feature (18)..(276): Homolog of NCBI NO: 18403117 NR Description: C2 domain-containing protein [Arabidopsis
  misc_feature (18)..(272): Homolog of NCBI NO: 21593485 NR Description: unknown [Arabidopsis thaliana]
  misc_feature (18)..(376): Homolog of NCBI NO: 24414275 NR Description: Unknown protein [Oryza sativa (japonica
  misc_feature (13)..(320): Homolog of NCBI NO: 30696612 NR Description: C2 domain-containing protein [Arabidopsis
  misc_feature (13)..(320): Homolog of NCBI NO: 28393796 NR Description: unknown protein [Arabidopsis thaliana]
  misc_feature (13)..(320): Homolog of NCBI NO: 9758185 NR Description: gene_id:MTE17.25~pir||T07080~similar to unknown
  misc_feature (1)..(432): Homolog of NCBI NO: 34901084 NR Description: contains ESTs
MEAVSAPAASTNGGGELIGYVDVHVRSARDIQNICIYHKQDVYARLSLPGEGAPAASTQVINGGGRNPVFDQSVRVGVRAGDVDAALRCEVWMLSRVKNYLQDQLLGFALVPLPDVVAAEGGTLAREFPLSTNDLFHSPAGFLELELSYIGVVPDVIPVSPTPKPALADPDECENAGGGAGAGAGKDYENMEFPDMNLVEENQIMLSEYVGLPCTAMETQSSESLLTSEDVDGAATESHDAGVRVVQSFSTDYSTADSAGAFRSETAASSVSTTESPAAAVPATPQSNPSEPSGNALSSAGQKEKASDAAEVDSSPTVQESPAVNSPSTVSENAVDKPPPAMSFNFAEEVQVNQKEIMDMYMKSMQQFTESLAKMKLPLDMDNGSDKSGSGPAAASPTDSSGTDSSAATKKPTAGAAQEKSPKVFYGSRAFF

SEQ ID NO: 68968 - protein, 340 aa, Triticum aestivum
  peptide (1)..(340): Ceres Seq. ID no. 15219768
  misc_feature (1)..(166): Homolog of NCBI NO: 18416832 NR Description: C2 domain-containing protein [Arabidopsis
  misc_feature (1)..(228): Homolog of NCBI NO: 34906644 NR Description: P0431G06.18 [Oryza sativa (japonica
  misc_feature (1)..(184): Homolog of NCBI NO: 25405379 NR Description: unknown protein [imported] - Arabidopsis thaliana
  misc_feature (1)..(184): Homolog of NCBI NO: 18403117 NR Description: C2 domain-containing protein [Arabidopsis
  misc_feature (1)..(180): Homolog of NCBI NO: 21593485 NR Description: unknown [Arabidopsis thaliana]
  misc_feature (1)..(284): Homolog of NCBI NO: 24414275 NR Description: Unknown protein [Oryza sativa (japonica
  misc_feature (1)..(228): Homolog of NCBI NO: 28393796 NR Description: unknown protein [Arabidopsis thaliana]
  misc_feature (1)..(228): Homolog of NCBI NO: 30696612 NR Description: C2 domain-containing protein [Arabidopsis
  misc_feature (1)..(228): Homolog of NCBI NO: 9758185 NR Description: gene_id:MTE17.25~pir||T07080~similar to unknown
  misc_feature (1)..(340): Homolog of NCBI NO: 34901084 NR Description: contains ESTs
MLSRVKNYLQDQLLGFALVPLPDVVAAEGGTLAREFPLSTNDLFHSPAGFLELELSYIGVVPDVIPVSPTPKPALADPDECENAGGGAGAGAGKDYENMEFPDMNLVEENQIMLSEYVGLPCTAMETQSSESLLTSEDVDGAATESHDAGVRVVQSFSTDYSTADSAGAFRSETAASSVSTTESPAAAVPATPQSNPSEPSGNALSSAGQKEKASDAAEVDSSPTVQESPAVNSPSTVSENAVDKPPPAMSFNFAEEVQVNQKEIMDMYMKSMQQFTESLAKMKLPLDMDNGSDKSGSGPAAASPTDSSGTDSSAATKKPTAGAAQEKSPKVFYGSRAFF

SEQ ID NO: 68969 - DNA, 1276 bp, Triticum aestivum
  misc_feature (1)..(1276): Ceres Seq. ID no. 13598238
ttttttctcattaaaaaaaactcttggatcgatcaaaccctagagagagagatgagagagactcatcttccatggccggcggcgattcttctcccgtggcggcggcggctgcggcgagaaagtgggagtgggaccaagaagagtatcggtgcgagtcgccggagtattcattggacccgcgatacagcgagtacgaccccaagcagggtcgtttcatatacgtccgctacttcttcaacggcaaactcgacctggacgaggagtcacctgttggtcccatgcgacatactggtaaaatcttcaaagagggattccggctcaaaaattcagtcaatgttgtctccatcaagattgtttcctctgactatggctacccactctatgtctacggtaccatcatagccagggatagtctggatagaaaatgtgtctatatattccggcgcgaccaggatgattgccagctcatcagctcaaaggatgattcattgattttgactggacccaagagaggattcatggtatgcgatgatatattcttcgaaatcaatctgaaggtgaaggatgtgcatgggatgactgtcgatgatgatagactcagtaaaggcctgatggaggtggatgctatccgcaggctggaatatagtcccagatatgtggttgatacggaaacacttgtcagcatgcacagcatattagatttaaactatacattcattaggaggtcggtggagggcactgttgagatcaagaaccttgagggacctgatgaattccatgggaagattgttgcttccactaccagcattccatgcgacattgtgctacatgatagcaaagtgagtggtgcgctaactgcgggtgaaaatggagtcctacaaatggcgcgacgcgtagtaggagtctctgtggatgaggtgctggtgttgactgttgctgctgctgtcggtgatgatgagttatctgcccgcactgttcagtttactccaaggcgcaatggttacgatgatgagagtatcacctgcggggactacaagatgcttctgaaggtcacttggtcgattgtgtatttctgatgtaactcttagttattcagtcacggcagtctgccagattctctagatacttaggatgcaatgaagtttcattatgggaaccagttatggtacatgctaaaacaatatatgtattccagcgtgtattgtatctattctgactcttctccctgatgtaagctagttttactggaagtgcttgcagtacatttatgaaattc

SEQ ID NO: 68970 - protein, 334 aa, Triticum aestivum
  peptide (1)..(334): Ceres Seq. ID no. 13598239
  misc_feature (83)..(332): Homolog of NCBI NO: 21913313 NR Description: csAtPR5 [Aegilops tauschii]
  misc_feature (101)..(293): Homolog of NCBI NO: 5777618 NR Description: CAA30376.1 protein [Oryza sativa]
  misc_feature (62)..(307): Homolog of NCBI NO: 20161235 NR Description: P0408G07.8 [Oryza sativa (japonica
  misc_feature (40)..(229): Homolog of NCBI NO: 34906344 NR Description: unnamed protein product [Oryza sativa (japonica
  misc_feature (85)..(330): Homolog of NCBI NO: 14719321 NR Description: hypothetical protein [Oryza sativa]
  misc_feature (64)..(331): Homolog of NCBI NO: 14719325 NR Description: hypothetical protein [Oryza sativa]
  misc_feature (1)..(332): Homolog of NCBI NO: 38345621 NR Description: OSJNBb0003B01.17 [Oryza sativa (japonica
MAGGDSSPVAAAAAARKWEWDQEEYRCESPEYSLDPRYSEYDPKQGRFIYVRYFFNGKLDLDEESPVGPMRHTGKIFKEGFRLKNSVNVVSIKIVSSDYGYPLYVYGTIIARDSLDRKCVYIFRRDQDDCQLISSKDDSLILTGPKRGFMVCDDIFFEINLKVKDVHGMTVDDDRLSKGLMEVDAIRRLEYSPRYVVDTETLVSMHSILDLNYTFIRRSVEGTVEIKNLEGPDEFHGKIVASTTSIPCDIVLHDSKVSGALTAGENGVLQMARRVVGVSVDEVLVLTVAAAVGDDELSARTVQFTPRRNGYDDESITCGDYKMLLKVTWSIVYF

SEQ ID NO: 68971 - protein, 265 aa, Triticum aestivum
  peptide (1)..(265): Ceres Seq. ID no. 13598240
  misc_feature (14)..(263): Homolog of NCBI NO: 21913313 NR Description: csAtPR5 [Aegilops tauschii]
  misc_feature (32)..(224): Homolog of NCBI NO: 5777618 NR Description: CAA30376.1 protein [Oryza sativa]
  misc_feature (1)..(238): Homolog of NCBI NO: 20161235 NR Description: P0408G07.8 [Oryza sativa (japonica
  misc_feature (1)..(160): Homolog of NCBI NO: 34906344 NR Description: unnamed protein product [Oryza sativa (japonica
  misc_feature (16)..(261): Homolog of NCBI NO: 14719321 NR Description: hypothetical protein [Oryza sativa]
  misc_feature (1)..(262): Homolog of NCBI NO: 14719325 NR Description: hypothetical protein [Oryza sativa]
  misc_feature (1)..(263): Homolog of NCBI NO: 38345621 NR Description: OSJNBb0003B01.17 [Oryza sativa (japonica
MRHTGKIFKEGFRLKNSVNVVSIKIVSSDYGYPLYVYGTIIARDSLDRKCVYIFRRDQDDCQLISSKDDSLILTGPKRGFMVCDDIFFEINLKVKDVHGMTVDDDRLSKGLMEVDAIRRLEYSPRYVVDTETLVSMHSILDLNYTFIRRSVEGTVEIKNLEGPDEFHGKIVASTTSIPCDIVLHDSKVSGALTAGENGVLQMARRVVGVSVDEVLVLTVAAAVGDDELSARTVQFTPRRNGYDDESITCGDYKMLLKVTWSIVYF

SEQ ID NO: 68972 - protein, 185 aa, Triticum aestivum
  peptide (1)..(185): Ceres Seq. ID no. 13598241
  misc_feature (1)..(183): Homolog of NCBI NO: 21913313 NR Description: csAtPR5 [Aegilops tauschii]
  misc_feature (1)..(144): Homolog of NCBI NO: 5777618 NR Description: CAA30376.1 protein [Oryza sativa]
  misc_feature (1)..(158): Homolog of NCBI NO: 20161235 NR Description: P0408G07.8 [Oryza sativa (japonica
  misc_feature (1)..(80): Homolog of NCBI NO: 34906344 NR Description: unnamed protein product [Oryza sativa (japonica
  misc_feature (1)..(181): Homolog of NCBI NO: 14719321 NR Description: hypothetical protein [Oryza sativa]
  misc_feature (1)..(182): Homolog of NCBI NO: 14719325 NR Description: hypothetical protein [Oryza sativa]
  misc_feature (1)..(183): Homolog of NCBI NO: 38345621 NR Description: OSJNBb0003B01.17 [Oryza sativa (japonica
MVCDDIFFEINLKVKDVHGMTVDDDRLSKGLMEVDAIRRLEYSPRYVVDTETLVSMHSILDLNYTFIRRSVEGTVEIKNLEGPDEFHGKIVASTTSIPCDIVLHDSKVSGALTAGENGVLQMARRVVGVSVDEVLVLTVAAAVGDDELSARTVQFTPRRNGYDDESITCGDYKMLLKVTWSIVYF

SEQ ID NO: 68973 - DNA, 1732 bp, Triticum aestivum
  misc_feature (1)..(1732): Ceres Seq. ID no. 13655724
cacagatagcctagagagacagggtccgcaaagcaagcaccgcccggcaaaggcaagaaagagccatccatccatccatcatccccttcctcgtgcgctgctgcctcttgcttctttcttcttcgtctagtaccaagctcaagctagatagatatccatggtttttctctccttgcttgcttgcgaattgctgcaggttgtaagtagataggtgttatacgtagtaggagctactagtagataggcggcgggtgggagaggagatgaagctccatctcctgctgaaggtcctgttcggccccgtgccggtctacttctcggcgctggccatcctcatcctgctgaccaacgcgcagtacttcgggctcggcggcgtcggcgtgccgcgcgccaccaagctggcctcctccacgcaggtggtgagcgtgatgaagtactgcgacatcttccgcggcgagtgggtgcccgacgcggaggcgccctactacaaccacaagacgtgcggcatgatccaggagcaccagaactgcctcaagtacggccgaccggacctcggcttcctcaagtggcgctggaggccgtccggctgcgagctgccgcgcttcgaccccgtccagttcctgcagttcgtccgccacaagtccctcgccttcgtcggggactccctggctcgcaaccatatgcagtccttgctctgcctcctctcacaggtggcgtatcccaaggacatctcggcgaacccgacggaccagaacaaggtgtaccactaccgggcgtacaacttcaccatcaacatgttctggtcgccgttcctggtgcgggcgcgggagcccgaccacgacgacccggcgcacacggggcactacagcctctacctggacgagccggacgacaagtgggtgtcgcaggtgccccggttcgactacgtgctggtgtcggcggccaactggttctcccgcccctcgctcttctacgagaagcggcggctgatcgggtgcagcttctgcagccggcagtacggcgtgccggacctgacgctctactactcgcagcgcaaggcgtggcgggtggcgctgcgggcgatcaacgccctggagggcaaggtgaaggcgcgggtgattgtgcggatgctgtcgcccatgtcgcacttcgagaacgggacctgggaccagggcggcaactgcaagcgcacggaaccggtccggagcaaccagacggtgatggaggggcgggacctgcagttctacacggcgcagatggaggagtaccgcgcggcggagaagaccgcgcggacaaaggggctgcggctgatgctcatggacgccacggccgccatgctgatgcggcccgacggccaccccagccggtacgggcactggcccaacgagaaggtgcagctctacaacgactgcatccattggtgcctccccggccccatcgacatctggaacgacctcttgttccagatgatgctcgtctagcccagtcccgttcccgtccatcggcacacagatctgatcaaaggatatgctccaaggcaattttgataatgaattgttccatctcatctcatctccctcctttcattcttccctactactaccagtcgatccgctttccattcctttgattgatgggtgtggtggtggtaactattgacgacgccaacttttttgtcggtcgtcacggaaagagtgagcaaaagaagctcctctccccttttcttcgtttg

SEQ ID NO: 68974 - protein, 405 aa, Triticum aestivum
  peptide (1)..(405): Ceres Seq. ID no. 15219769
  misc_feature (230)..(403): Pfam Name: Arabidopsis proteins of unknown function Pfam Description: Arabidopsis proteins of unknown function
  misc_feature (51)..(404): Homolog of NCBI NO: 7486743 NR Description: hypothetical protein F9D16.260 - Arabidopsis
  misc_feature (16)..(404): Homolog of NCBI NO: 28393189 NR Description: unknown protein [Arabidopsis thaliana]
  misc_feature (16)..(404): Homolog of NCBI NO: 15234058 NR Description: expressed protein [Arabidopsis thaliana]
  misc_feature (59)..(403): Homolog of NCBI NO: 15232914 NR Description: expressed protein [Arabidopsis thaliana]
  misc_feature (47)..(404): Homolog of NCBI NO: 30678135 NR Description: expressed protein [Arabidopsis thaliana]
  misc_feature (52)..(403): Homolog of NCBI NO: 15237213 NR Description: expressed protein [Arabidopsis thaliana]
  misc_feature (44)..(403): Homolog of NCBI NO: 15237211 NR Description: expressed protein [Arabidopsis thaliana]
  misc_feature (19)..(404): Homolog of NCBI NO: 34898638 NR Description: contains ESTs
  misc_feature (5)..(403): Homolog of NCBI NO: 34911888 NR Description: OSJNBb0032K15.21 [Oryza sativa (japonica
  misc_feature (1)..(405): Homolog of NCBI NO: 34911880 NR Description: OSJNBb0032K15.17 [Oryza sativa (japonica
MKLHLLLKVLFGPVPVYFSALAILILLTNAQYFGLGGVGVPRATKLASSTQVVSVMKYCDIFRGEWVPDAEAPYYNHKTCGMIQEHQNCLKYGRPDLGFLKWRWRPSGCELPRFDPVQFLQFVRHKSLAFVGDSLARNHMQSLLCLLSQVAYPKDISANPTDQNKVYHYRAYNFTINMFWSPFLVRAREPDHDDPAHTGHYSLYLDEPDDKWVSQVPRFDYVLVSAANWFSRPSLFYEKRRLIGCSFCSRQYGVPDLTLYYSQRKAWRVALRAINALEGKVKARVIVRMLSPMSHFENGTWDQGGNCKRTEPVRSNQTVMEGRDLQFYTAQMEEYRAAEKTARTKGLRLMLMDATAAMLMRPDGHPSRYGHWPNEKVQLYNDCIHWCLPGPIDIWNDLLFQMMLV

SEQ ID NO: 68975 - protein, 350 aa, Triticum aestivum
  peptide (1)..(350): Ceres Seq. ID no. 15219770
  misc_feature (175)..(348): Pfam Name: Arabidopsis proteins of unknown function Pfam Description: Arabidopsis proteins of unknown function
  misc_feature (1)..(349): Homolog of NCBI NO: 7486743 NR Description: hypothetical protein F9D16.260 - Arabidopsis
  misc_feature (1)..(349): Homolog of NCBI NO: 28393189 NR Description: unknown protein [Arabidopsis thaliana]
  misc_feature (1)..(349): Homolog of NCBI NO: 15234058 NR Description: expressed protein [Arabidopsis thaliana]
  misc_feature (4)..(348): Homolog of NCBI NO: 15232914 NR Description: expressed protein [Arabidopsis thaliana]
  misc_feature (1)..(349): Homolog of NCBI NO: 30678135 NR Description: expressed protein [Arabidopsis thaliana]
  misc_feature (1)..(348): Homolog of NCBI NO: 15237213 NR Description: expressed protein [Arabidopsis thaliana]
  misc_feature (1)..(348): Homolog of NCBI NO: 15237211 NR Description: expressed protein [Arabidopsis thaliana]
  misc_feature (1)..(349): Homolog of NCBI NO: 34898638 NR Description: contains ESTs
  misc_feature (1)..(348): Homolog of NCBI NO: 34911888 NR Description: OSJNBb0032K15.21 [Oryza sativa (japonica
  misc_feature (1)..(350): Homolog of NCBI NO: 34911880 NR Description: OSJNBb0032K15.17 [Oryza sativa (japonica
MKYCDIFRGEWVPDAEAPYYNHKTCGMIQEHQNCLKYGRPDLGFLKWRWRPSGCELPRFDPVQFLQFVRHKSLAFVGDSLARNHMQSLLCLLSQVAYPKDISANPTDQNKVYHYRAYNFTINMFWSPFLVRAREPDHDDPAHTGHYSLYLDEPDDKWVSQVPRFDYVLVSAANWFSRPSLFYEKRRLIGCSFCSRQYGVPDLTLYYSQRKAWRVALRAINALEGKVKARVIVRMLSPMSHFENGTWDQGGNCKRTEPVRSNQTVMEGRDLQFYTAQMEEYRAAEKTARTKGLRLMLMDATAAMLMRPDGHPSRYGHWPNEKVQLYNDCIHWCLPGPIDIWNDLLFQMMLV

SEQ ID NO: 68976 - protein, 324 aa, Triticum aestivum
  peptide (1)..(324): Ceres Seq. ID no. 15219771
  misc_feature (149)..(322): Pfam Name: Arabidopsis proteins of unknown function Pfam Description: Arabidopsis proteins of unknown function
  misc_feature (1)..(323): Homolog of NCBI NO: 7486743 NR Description: hypothetical protein F9D16.260 - Arabidopsis
  misc_feature (1)..(323): Homolog of NCBI NO: 28393189 NR Description: unknown protein [Arabidopsis thaliana]
  misc_feature (1)..(323): Homolog of NCBI NO: 15234058 NR Description: expressed protein [Arabidopsis thaliana]
  misc_feature (1)..(322): Homolog of NCBI NO: 15232914 NR Description: expressed protein [Arabidopsis thaliana]
  misc_feature (1)..(323): Homolog of NCBI NO: 30678135 NR Description: expressed protein [Arabidopsis thaliana]
  misc_feature (1)..(322): Homolog of NCBI NO: 15237213 NR Description: expressed protein [Arabidopsis thaliana]
  misc_feature (1)..(322): Homolog of NCBI NO: 15237211 NR Description: expressed protein [Arabidopsis thaliana]
  misc_feature (1)..(323): Homolog of NCBI NO: 34898638 NR Description: contains ESTs
  misc_feature (1)..(322): Homolog of NCBI NO: 34911888 NR Description: OSJNBb0032K15.21 [Oryza sativa (japonica
  misc_feature (1)..(324): Homolog of NCBI NO: 34911880 NR Description: OSJNBb0032K15.17 [Oryza sativa (japonica
MIQEHQNCLKYGRPDLGFLKWRWRPSGCELPRFDPVQFLQFVRHKSLAFVGDSLARNHMQSLLCLLSQVAYPKDISANPTDQNKVYHYRAYNFTINMFWSPFLVRAREPDHDDPAHTGHYSLYLDEPDDKWVSQVPRFDYVLVSAANWFSRPSLFYEKRRLIGCSFCSRQYGVPDLTLYYSQRKAWRVALRAINALEGKVKARVIVRMLSPMSHFENGTWDQGGNCKRTEPVRSNQTVMEGRDLQFYTAQMEEYRAAEKTARTKGLRLMLMDATAAMLMRPDGHPSRYGHWPNEKVQLYNDCIHWCLPGPIDIWNDLLFQMMLV

SEQ ID NO: 68977 - DNA, 1181 bp, Triticum aestivum
  misc_feature (1)..(1181): Ceres Seq. ID no. 13597057
agaacatcctaatcgaaaagaaccggaggaatctacccagacctaggggtcaagtagggccgtaccttaggaagtagccgttgcgaggttcgaatcgactggaatcggggggaagagcagagcaaatcatctgcggaagggtaaggattggcgtgcaggattcggagcgggagtaatctgagtaaagatggctgaagtgaggattgccagcaggacggctgtagccgatcgctctggcggtggattcttcgtcaggagggtggcgtctcccggagccgtggtggacaagggcgccgtcaagccgcttgctcgtcgggtcccgtcaccgtccagcaacaaggagaacgtgccaccagcgtgggctgcgtgggctgcacccaagaggaggagctccctgcccgagtggtacccaaggaccccactccgtgatatcacatcagtcatcaaggctgttgagaggaaaagccggctgcgagatgctgcggctcggcagcagctccagtgggatgaagaagactcctcggagcctgaggatccagcacaaacagacgagggtattcatggaagcacagcaccaacaaatgaaaccctgggtgttggctgggctaaagttgttgaaaccaccgcagcatcagcaacctgcttgggcgagggcgagagcaccacggtggtgaaggcatctgatgactgctccttgcagtctacatccagaccaagtggagaagtaggcgtggagaagcaactggccagctccatagatgcgattgagaagatggtgagccggaacctcaagcgaactgatcccgaggctactcggccttccaagaccccggctgtccagaggcgcaccctgatgtctatgcgctgagctgatgtctgctgctttcttagcggctagtcctaactaatcatggtgctcggttctctgcttgaggagtggtgttgtgctcatggttctctgcttgaggacttggggtatgggcggtggtagctgtggctctctgcttgagggcacatgtaggattacatcaccagacttgattgtgttactgtgttttgtcattcagctgatctccttgtttgttgttccactgtaactaacggtaactaataagacgatagatatggtgcatcttctgttgtggagcaaaataatatcttgttggtacgtgacatacctt

SEQ ID NO: 68978 - protein, 226 aa, Triticum aestivum
  peptide (1)..(226): Ceres Seq. ID no. 15222025
  misc_feature (51)..(226): Homolog of NCBI NO: 15230880 NR Description: expressed protein [Arabidopsis thaliana]
  misc_feature (1)..(226): Homolog of NCBI NO: 38344815 NR Description: OSJNBb0022F23.8 [Oryza sativa (japonica
MAEVRIASRTAVADRSGGGFFVRRVASPGAVVDKGAVKPLARRVPSPSSNKENVPPAWAAWAAPKRRSSLPEWYPRTPLRDITSVIKAVERKSRLRDAAARQQLQWDEEDSSEPEDPAQTDEGIHGSTAPTNETLGVGWAKVVETTAASATCLGEGESTTVVKASDDCSLQSTSRPSGEVGVEKQLASSIDAIEKMVSRNLKRTDPEATRPSKTPAVQRRTLMSMR

SEQ ID NO: 68979 - DNA, 1300 bp, Triticum aestivum
  misc_feature (1)..(1300): Ceres Seq. ID no. 14302021
ccacccagccttcctcctctccacaccgcaggctccagggaaagggaagacctcgcctcgccttgctgccgccgaagccaccagcggagggagcatgaaggtctccgtcgtgtcccggagcggccgcgaggtcgtcaagggcggcatcgagctcaaggactcggccaaggtcgcggatctgcaggaggccatccacgccaagactaagaagtattatcctgccaggcaacggctcaccctccctgcacaacctggaaaatctggaaagccagttgtcctcaatcaaaaggccagcctatcggaatactgcgagaaaggttccggttccctgacagtggtcttcaaagatttgggcccacaggtctactacagcacgctcttcttctgggaatacgtcggccctcttatcatgtaccccatcttctattacctgcctgtctacaaatactttggatatgagggagagcgggtcatccaccctgtccagacctatgccatgtactacttctgcttccactacttcaagaggatcatggagaccttcttcgtccaccgcttcagccacgcaacttcccccgtgtcaaacgtcttcaggaactgcgcctactactggacctttggagcctacattgcctactactgcaaccacccgctttacacccccgtgagtgacctgcagatgaagattgggttcggcatcggggtcgtgtgccagatcgcaaacttctactgccacatcctgctgaggaacctcaggagcccgaccggcagcggcggctaccagatcccacggggtttcctgttcaacattgtgacatgcgcaaactacaccaccgagatctaccaatggctggggttcaacatcgccacacagaccgtggcgggctacgtcttcctcgctgtggccgctgctatcatgaccaactgggcgctcggaaagcacagccgcctgaggaagctcttcgacggtaaggacgggcggcccaagtacccccgccgatgggtgattcttcctccattcctgtgaagaagtcacggtgctcgcaaggcctgcatctggagattcaacatttattctgttccagcgttccaaagttaaaagccatcagtcgatttcactcaaacattcctactaatcgtgccttgtaccagctgtcaaacctcaattatgtagtccaaatgttcttatccaaaggatgtattttcttactccatattgttgaaaaactttctctggggtttatttacgccacaccgcgacgtgttgtcatagtcaagtccaacactaagatgattcatc

SEQ ID NO: 68980 - protein, 341 aa, Triticum aestivum
  peptide (1)..(341): Ceres Seq. ID no. 14302022
  misc_feature (189)..(341): Pfam Name: 3-oxo-5-alpha-steroid 4-dehydrogenase Pfam Description: 3-oxo-5-alpha-steroid 4-dehydrogenase
  misc_feature (50)..(338): Homolog of NCBI NO: 31418870 NR Description: Unknown (protein for MGC:64025) [Danio rerio]
  misc_feature (33)..(341): Homolog of NCBI NO: 33585860 NR Description: Glycoprotein, synaptic 2 [Xenopus laevis]
  misc_feature (50)..(341): Homolog of NCBI NO: 19923070 NR Description: synaptic glycoprotein SC2
  misc_feature (50)..(341): Homolog of NCBI NO: 19924091 NR Description: synaptic glycoprotein SC2 [Rattus norvegicus]
  misc_feature (33)..(341): Homolog of NCBI NO: 30585427 NR Description: Homo sapiens glycoprotein, synaptic 2 [synthetic
  misc_feature (33)..(341): Homolog of NCBI NO: 24475816 NR Description: glycoprotein, synaptic 2
  misc_feature (33)..(341): Homolog of NCBI NO: 13111809 NR Description: Unknown (protein for IMAGE:2901253) [Homo sapiens]
  misc_feature (32)..(341): Homolog of NCBI NO: 25004880 NR Description: steroid 5-alpha reductase [Cicer arietinum]
  misc_feature (32)..(341): Homolog of NCBI NO: 15233250 NR Description: 3-oxo-5-alpha-steroid 4-dehydrogenase (steroid
  misc_feature (32)..(341): Homolog of NCBI NO: 34895848 NR Description: putative glycoprotein [Oryza sativa (japonica
HPAFLLSTPQAPGKGKTSPRLAAAEATSGGSMKVSVVSRSGREVVKGGIELKDSAKVADLQEAIHAKTKKYYPARQRLTLPAQPGKSGKPVVLNQKASLSEYCEKGSGSLTVVFKDLGPQVYYSTLFFWEYVGPLIMYPIFYYLPVYKYFGYEGERVIHPVQTYAMYYFCFHYFKRIMETFFVHRFSHATSPVSNVFRNCAYYWTFGAYIAYYCNHPLYTPVSDLQMKIGFGIGVVCQIANFYCHILLRNLRSPTGSGGYQIPRGFLFNIVTCANYTTEIYQWLGFNIATQTVAGYVFLAVAAAIMTNWALGKHSRLRKLFDGKDGRPKYPRRWVILPPFL

SEQ ID NO: 68981 - protein, 310 aa, Triticum aestivum
  peptide (1)..(310): Ceres Seq. ID no. 14302023
  misc_feature (158)..(310): Pfam Name: 3-oxo-5-alpha-steroid 4-dehydrogenase Pfam Description: 3-oxo-5-alpha-steroid 4-dehydrogenase
  misc_feature (19)..(307): Homolog of NCBI NO: 31418870 NR Description: Unknown (protein for MGC:64025) [Danio rerio]
  misc_feature (2)..(310): Homolog of NCBI NO: 33585860 NR Description: Glycoprotein, synaptic 2 [Xenopus laevis]
  misc_feature (19)..(310): Homolog of NCBI NO: 19923070 NR Description: synaptic glycoprotein SC2
  misc_feature (19)..(310): Homolog of NCBI NO: 19924091 NR Description: synaptic glycoprotein SC2 [Rattus norvegicus]
  misc_feature (2)..(310): Homolog of NCBI NO: 30585427 NR Description: Homo sapiens glycoprotein, synaptic 2 [synthetic
  misc_feature (2)..(310): Homolog of NCBI NO: 24475816 NR Description: glycoprotein, synaptic 2
  misc_feature (2)..(310): Homolog of NCBI NO: 13111809 NR Description: Unknown (protein for IMAGE:2901253) [Homo sapiens]
  misc_feature (1)..(310): Homolog of NCBI NO: 25004880 NR Description: steroid 5-alpha reductase [Cicer arietinum]
  misc_feature (1)..(310): Homolog of NCBI NO: 15233250 NR Description: 3-oxo-5-alpha-steroid 4-dehydrogenase (steroid
  misc_feature (1)..(310): Homolog of NCBI NO: 34895848 NR Description: putative glycoprotein [Oryza sativa (japonica
MKVSVVSRSGREVVKGGIELKDSAKVADLQEAIHAKTKKYYPARQRLTLPAQPGKSGKPVVLNQKASLSEYCEKGSGSLTVVFKDLGPQVYYSTLFFWEYVGPLIMYPIFYYLPVYKYFGYEGERVIHPVQTYAMYYFCFHYFKRIMETFFVHRFSHATSPVSNVFRNCAYYWTFGAYIAYYCNHPLYTPVSDLQMKIGFGIGVVCQIANFYCHILLRNLRSPTGSGGYQIPRGFLFNIVTCANYTTEIYQWLGFNIATQTVAGYVFLAVAAAIMTNWALGKHSRLRKLFDGKDGRPKYPRRWVILPPFL

SEQ ID NO: 68982 - protein, 205 aa, Triticum aestivum
  peptide (1)..(205): Ceres Seq. ID no. 14302024
  misc_feature (53)..(205): Pfam Name: 3-oxo-5-alpha-steroid 4-dehydrogenase Pfam Description: 3-oxo-5-alpha-steroid 4-dehydrogenase
  misc_feature (1)..(202): Homolog of NCBI NO: 31418870 NR Description: Unknown (protein for MGC:64025) [Danio rerio]
  misc_feature (1)..(205): Homolog of NCBI NO: 33585860 NR Description: Glycoprotein, synaptic 2 [Xenopus laevis]
  misc_feature (1)..(205): Homolog of NCBI NO: 19923070 NR Description: synaptic glycoprotein SC2
  misc_feature (1)..(205): Homolog of NCBI NO: 19924091 NR Description: synaptic glycoprotein SC2 [Rattus norvegicus]
  misc_feature (1)..(205): Homolog of NCBI NO: 24475816 NR Description: glycoprotein, synaptic 2
  misc_feature (1)..(205): Homolog of NCBI NO: 30585427 NR Description: Homo sapiens glycoprotein, synaptic 2 [synthetic
  misc_feature (1)..(205): Homolog of NCBI NO: 13111809 NR Description: Unknown (protein for IMAGE:2901253) [Homo sapiens]
  misc_feature (1)..(205): Homolog of NCBI NO: 25004880 NR Description: steroid 5-alpha reductase [Cicer arietinum]
  misc_feature (1)..(205): Homolog of NCBI NO: 15233250 NR Description: 3-oxo-5-alpha-steroid 4-dehydrogenase (steroid
  misc_feature (1)..(205): Homolog of NCBI NO: 34895848 NR Description: putative glycoprotein [Oryza sativa (japonica
MYPIFYYLPVYKYFGYEGERVIHPVQTYAMYYFCFHYFKRIMETFFVHRFSHATSPVSNVFRNCAYYWTFGAYIAYYCNHPLYTPVSDLQMKIGFGIGVVCQIANFYCHILLRNLRSPTGSGGYQIPRGFLFNIVTCANYTTEIYQWLGFNIATQTVAGYVFLAVAAAIMTNWALGKHSRLRKLFDGKDGRPKYPRRWVILPPFL

SEQ ID NO: 68983 - DNA, 1460 bp, Triticum aestivum
  misc_feature (1)..(1460): Ceres Seq. ID no. 12586366
aaagcgaaagaaaaagtgagacctcatctctttcagctaagctcgcaatggagctcccatggggtgccctgctgctggcgctgctcaccgtctccgcctcctccgccgtcgccacgctcgccgtcaccgctccccctccggcccctgcccgtgctcctgcccccgtcaccgcccctgccccggcccatgcatctcctcaagctcaggacgctgaaggtctgctgatgaacggcaacttcgagacggcgccgaggaaggtgaacaagaccctcatcgtgggccgccactcgctgccggggtggacgctgcggggccacgtcgagtacgtgtcggcggggccgcagccgggcggcatgttcttcgcggtgccgcacggcgtgcacgcgctccgcctcggcagccacgcgtcggcgtcgcagaacgtgtccgtgcgccccggctcgctctacgcgctcaccttcgccgccacccgcacctgcgcgcaggacgaggccctgcgcatcgccgtctccccgtcgctctccgcccccgccgacgtcgccgtccgcaccctctacagcgccgacaccgccgacacctgggcctggggcttccgcgcctcctcccctgtcgcggaggtcaccttcagcaaccccggcgtgcaggaggacgccgcgtgcggcccgctcatcgacgccgtcgccatcaaggagctccccacgccctaccccaccaaagataacctgatcaagaacgacggcttcgagatcgggccgcaggtgttcaagaactcgagcgttggcgtgctgctgccgccgaagcagaaggacgtgacgtcgccgctgccgggctggatcatcgagtcgctcaaggcggtgcggtacatcgacgccgcccacttctcggtgccggcgggccagtacgcggtggagctggtggcggggcgggagagcgccatcgcgcaggtcatccgcaccgtgcccaaccgcgcctacaacctctcctacgtcgtcggcgacgccaagaacggctgccacggctccatgctcgtggaggccttcgccgccaacgtcacgcagaaggtgccgttccagtccacgggcaagggcgggttcaaggcggcgagcctcaggttcgtggccgccggagtccgcaccagggtcaccttctacagctcctactaccacaccaaggtcaccgacggcgtctcgctctgcggccccgtgctcgaccaggtcaagatcatgccgctcaagctctagtcgtctatcggagtagaccagaagctcagatcaatcctgtcgcgttgattcggcatcgtcctctcgtctactatgtagtagtagtgggtatgtaatttgtgacattgatggacctctctctaatcgtgtgccagcgtggtggaatgaattgcctgtgctgtgcgtgaacctgcgagctccgtcaatttgtttgggatttgcgtaggctttctactagtt

SEQ ID NO: 68984 - protein, 412 aa, Triticum aestivum
  peptide (1)..(412): Ceres Seq. ID no. 12586367
  misc_feature (86)..(407): Pfam Name: Protein of unknown function, DUF642 Pfam Description: Protein of unknown function, DUF642
  misc_feature (70)..(408): Homolog of NCBI NO: 23397043 NR Description: unknown protein [Arabidopsis thaliana]
  misc_feature (70)..(408): Homolog of NCBI NO: 21554402 NR Description: unknown [Arabidopsis thaliana]
  misc_feature (70)..(408): Homolog of NCBI NO: 15239049 NR Description: putative protein
  misc_feature (71)..(408): Homolog of NCBI NO: 18418018 NR Description: putative protein
  misc_feature (71)..(411): Homolog of NCBI NO: 7488898 NR Description: hypothetical protein - castor bean
  misc_feature (71)..(407): Homolog of NCBI NO: 15227437 NR Description: unknown protein
  misc_feature (60)..(407): Homolog of NCBI NO: 15227439 NR Description: unknown protein; protein id: At2g41810.1
  misc_feature (86)..(407): Homolog of NCBI NO: 12321555 NR Description: unknown protein, 5' partial [Arabidopsis thaliana]
  misc_feature (67)..(407): Homolog of NCBI NO: 18398135 NR Description: expressed protein
  misc_feature (16)..(411): Homolog of NCBI NO: 30102997 NR Description: unknown protein [Oryza sativa (japonica
SERKSETSSLSAKLAMELPWGALLLALLTVSASSAVATLAVTAPPPAPARAPAPVTAPAPAHASPQAQDAEGLLMNGNFETAPRKVNKTLIVGRHSLPGWTLRGHVEYVSAGPQPGGMFFAVPHGVHALRLGSHASASQNVSVRPGSLYALTFAATRTCAQDEALRIAVSPSLSAPADVAVRTLYSADTADTWAWGFRASSPVAEVTFSNPGVQEDAACGPLIDAVAIKELPTPYPTKDNLIKNDGFEIGPQVFKNSSVGVLLPPKQKDVTSPLPGWIIESLKAVRYIDAAHFSVPAGQYAVELVAGRESAIAQVIRTVPNRAYNLSYVVGDAKNGCHGSMLVEAFAANVTQKVPFQSTGKGGFKAASLRFVAAGVRTRVTFYSSYYHTKVTDGVSLCGPVLDQVKIMPLKL

SEQ ID NO: 68985 - protein, 397 aa, Triticum aestivum
  peptide (1)..(397): Ceres Seq. ID no. 12586368
  misc_feature (71)..(392): Pfam Name: Protein of unknown function, DUF642 Pfam Description: Protein of unknown function, DUF642
  misc_feature (55)..(393): Homolog of NCBI NO: 23397043 NR Description: unknown protein [Arabidopsis thaliana]
  misc_feature (55)..(393): Homolog of NCBI NO: 21554402 NR Description: unknown [Arabidopsis thaliana]
  misc_feature (55)..(393): Homolog of NCBI NO: 15239049 NR Description: putative protein
  misc_feature (56)..(393): Homolog of NCBI NO: 18418018 NR Description: putative protein
  misc_feature (56)..(396): Homolog of NCBI NO: 7488898 NR Description: hypothetical protein - castor bean
  misc_feature (56)..(392): Homolog of NCBI NO: 15227437 NR Description: unknown protein
  misc_feature (45)..(392): Homolog of NCBI NO: 15227439 NR Description: unknown protein; protein id: At2g41810.1
  misc_feature (71)..(392): Homolog of NCBI NO: 12321555 NR Description: unknown protein, 5' partial [Arabidopsis thaliana]
  misc_feature (52)..(392): Homolog of NCBI NO: 18398135 NR Description: expressed protein
  misc_feature (1)..(396): Homolog of NCBI NO: 30102997 NR Description: unknown protein [Oryza sativa (japonica
MELPWGALLLALLTVSASSAVATLAVTAPPPAPARAPAPVTAPAPAHASPQAQDAEGLLMNGNFETAPRKVNKTLIVGRHSLPGWTLRGHVEYVSAGPQPGGMFFAVPHGVHALRLGSHASASQNVSVRPGSLYALTFAATRTCAQDEALRIAVSPSLSAPADVAVRTLYSADTADTWAWGFRASSPVAEVTFSNPGVQEDAACGPLIDAVAIKELPTPYPTKDNLIKNDGFEIGPQVFKNSSVGVLLPPKQKDVTSPLPGWIIESLKAVRYIDAAHFSVPAGQYAVELVAGRESAIAQVIRTVPNRAYNLSYVVGDAKNGCHGSMLVEAFAANVTQKVPFQSTGKGGFKAASLRFVAAGVRTRVTFYSSYYHTKVTDGVSLCGPVLDQVKIMPLKL

SEQ ID NO: 68986 - protein, 338 aa, Triticum aestivum
  peptide (1)..(338): Ceres Seq. ID no. 12586369
  misc_feature (12)..(333): Pfam Name: Protein of unknown function, DUF642 Pfam Description: Protein of unknown function, DUF642
  misc_feature (1)..(334): Homolog of NCBI NO: 23397043 NR Description: unknown protein [Arabidopsis thaliana]
  misc_feature (1)..(334): Homolog of NCBI NO: 21554402 NR Description: unknown [Arabidopsis thaliana]
  misc_feature (1)..(334): Homolog of NCBI NO: 15239049 NR Description: putative protein
  misc_feature (1)..(334): Homolog of NCBI NO: 18418018 NR Description: putative protein
  misc_feature (1)..(337): Homolog of NCBI NO: 7488898 NR Description: hypothetical protein - castor bean
  misc_feature (1)..(333): Homolog of NCBI NO: 15227437 NR Description: unknown protein
  misc_feature (1)..(333): Homolog of NCBI NO: 15227439 NR Description: unknown protein; protein id: At2g41810.1
  misc_feature (12)..(333): Homolog of NCBI NO: 12321555 NR Description: unknown protein, 5' partial [Arabidopsis thaliana]
  misc_feature (1)..(333): Homolog of NCBI NO: 18398135 NR Description: expressed protein
  misc_feature (1)..(337): Homolog of NCBI NO: 30102997 NR Description: unknown protein [Oryza sativa (japonica
MNGNFETAPRKVNKTLIVGRHSLPGWTLRGHVEYVSAGPQPGGMFFAVPHGVHALRLGSHASASQNVSVRPGSLYALTFAATRTCAQDEALRIAVSPSLSAPADVAVRTLYSADTADTWAWGFRASSPVAEVTFSNPGVQEDAACGPLIDAVAIKELPTPYPTKDNLIKNDGFEIGPQVFKNSSVGVLLPPKQKDVTSPLPGWIIESLKAVRYIDAAHFSVPAGQYAVELVAGRESAIAQVIRTVPNRAYNLSYVVGDAKNGCHGSMLVEAFAANVTQKVPFQSTGKGGFKAASLRFVAAGVRTRVTFYSSYYHTKVTDGVSLCGPVLDQVKIMPLKL

SEQ ID NO: 68987 - DNA, 606 bp, Triticum aestivum
  misc_feature (1)..(606): Ceres Seq. ID no. 12777119
actcgagagcgcgagcgagacttttctttccatccgcaggagatcccgacgagaaggcgaaggcgaagccggcggcgcaaccgaagcccctcatggcccgctcgtcctcgcagtcccagtcctccgtcggcggtgccggcgccgccggatcccgcccggccaccgccgggccccgcggcacgcccgccgccacggctggcatgcgccgccgacccggccgcacctcctcctccgcgtccggtggcggaggcttctccggcggcggagggaacaacatgctgcgcttttacaccgacgaggccccggggctgcgcctctccccgaccatggtgctcgtcatgtccgtctgcttcatcggcttcgtcaccgccctccacgtcttcggcaagctctaccgctcccgcaccgccgcctccgcgtccgcctgatcaacccggttcctgctcctgtttgttcttcgtttcagatcagatcagatggttttggtgtgtaacaaagaggctgtggttgctacctgacgagttagatctgccgaagtaccctacatgtttaattatggtgccctttctgtttccatttaccttgttgttgcgatgaattgtggct

SEQ ID NO: 68988 - protein, 198 aa, Triticum aestivum
  peptide (1)..(198): Ceres Seq. ID no. 12777120
  misc_feature (29)..(142): Pfam Name: Extensin-like region Pfam Description: Extensin-like region
  misc_feature (29)..(142): Homolog of NCBI NO: 6523547 NR Description: hydroxyproline-rich glycoprotein DZ-HRGP
  misc_feature (29)..(145): Homolog of NCBI NO: 20138131 NR Description: Vegetative cell wall protein gp1 precursor
  misc_feature (29)..(144): Homolog of NCBI NO: 81286 NR Description: extensin - Volvox carteri (fragment)
  misc_feature (29)..(145): Homolog of NCBI NO: 81286 NR Description: extensin - Volvox carteri (fragment)
  misc_feature (29)..(142): Homolog of NCBI NO: 20138131 NR Description: Vegetative cell wall protein gp1 precursor
  misc_feature (30)..(145): Homolog of NCBI NO: 6523547 NR Description: hydroxyproline-rich glycoprotein DZ-HRGP
  misc_feature (30)..(147): Homolog of NCBI NO: 27375632 NR Description: blr0521 [Bradyrhizobium japonicum]
  misc_feature (29)..(142): Homolog of NCBI NO: 14253159 NR Description: VMP3 protein [Volvox carteri f. nagariensis]
  misc_feature (29)..(142): Homolog of NCBI NO: 20138131 NR Description: Vegetative cell wall protein gp1 precursor
  misc_feature (29)..(145): Homolog of NCBI NO: 20138131 NR Description: Vegetative cell wall protein gp1 precursor
TRERERDFSFHPQEIPTRRRRRSRRRNRSPSWPARPRSPSPPSAVPAPPDPARPPPGPAARPPPRLACAADPAAPPPPRPVAEASPAAEGTTCCAFTPTRPRGCASPRPWCSSCPSASSASSPPSTSSASSTAPAPPPPRPPDQPGSCSCLFFVSDQIRWFWCVTKRLWLLPDELDLPKYPTCLIMVPFLFPFTLLLR

SEQ ID NO: 68989 - protein, 163 aa, Triticum aestivum
  peptide (1)..(163): Ceres Seq. ID no. 12777121
LESASETFLSIRRRSRREGEGEAGGATEAPHGPLVLAVPVLRRRCRRRRIPPGHRRAPRHARRHGWHAPPTRPHLLLRVRWRRLLRRRREQHAALLHRRGPGAAPLPDHGARHVRLLHRLRHRPPRLRQALPLPHRRLRVRLINPVPAPVCSSFQIRSDGFGV

SEQ ID NO: 68990 - protein, 141 aa, Triticum aestivum
  peptide (1)..(141): Ceres Seq. ID no. 12777122
  misc_feature (86)..(131): Pfam Name: Sec61beta family Pfam Description: Sec61beta family
  misc_feature (47)..(133): Homolog of NCBI NO: 34914212 NR Description: P0697C12.13 [Oryza sativa (japonica
  misc_feature (55)..(131): Homolog of NCBI NO: 26450635 NR Description: putative transport protein subunit [Arabidopsis
  misc_feature (55)..(131): Homolog of NCBI NO: 15232357 NR Description: transport protein subunit - like; protein id:
  misc_feature (55)..(131): Homolog of NCBI NO: 15225401 NR Description: putative transport protein SEC61 beta-subunit
  misc_feature (31)..(139): Homolog of NCBI NO: 15239337 NR Description: protein transport protein subunit - like; protein
SRARARLFFPSAGDPDEKAKAKPAAQPKPLMARSSSQSQSSVGGAGAAGSRPATAGPRGTPAATAGMRRRPGRTSSSASGGGGFSGGGGNNMLRFYTDEAPGLRLSPTMVLVMSVCFIGFVTALHVFGKLYRSRTAASASA

SEQ ID NO: 68991 - protein, 111 aa, Triticum aestivum
  peptide (1)..(111): Ceres Seq. ID no. 12777123
  misc_feature (56)..(101): Pfam Name: Sec61beta family Pfam Description: Sec61beta family
  misc_feature (17)..(103): Homolog of NCBI NO: 34914212 NR Description: P0697C12.13 [Oryza sativa (japonica
  misc_feature (25)..(101): Homolog of NCBI NO: 26450635 NR Description: putative transport protein subunit [Arabidopsis
  misc_feature (25)..(101): Homolog of NCBI NO: 15232357 NR Description: transport protein subunit - like; protein id:
  misc_feature (25)..(101): Homolog of NCBI NO: 15225401 NR Description: putative transport protein SEC61 beta-subunit
  misc_feature (1)..(109): Homolog of NCBI NO: 15239337 NR Description: protein transport protein subunit - like; protein
MARSSSQSQSSVGGAGAAGSRPATAGPRGTPAATAGMRRRPGRTSSSASGGGGFSGGGGNNMLRFYTDEAPGLRLSPTMVLVMSVCFIGFVTALHVFGKLYRSRTAASASA

SEQ ID NO: 68992 - DNA, 1603 bp, Triticum aestivum
  misc_feature (1)..(1603): Ceres Seq. ID no. 12616843
tccaaatcgaaaaatttctaagaaaagaggtctcctgaactaaaaagaagcccttctctctcctccaaccgccggtggtcgctccgtcgctcgccatggcttccgggtcctcggccgccgcacgtcgccttctgctattgcgccaccgccgccgccacctcgttcccaatcaccacttctcttcctcctcggcggacgaagtgctggacgggggccgcgtcaagatcttcgatcgcgatctgaagcgccgacaccgggaccgggcggcgtgggcgatgcgggaaactgacccactggtagacgcggtcgccgataacctcctcgaccgcctcgaggactgcaggaaggcgttcccctcggcgctctgcctcggcggttcggccggcgccgtccgccggtcgcttcgcggccgcggtggaatcgagaaattgaccatgatggacatgtcggtagacatggtgaacaagtggcgggagttggagagtgctactgacgacggccccgagatgaactttatcgttggagatgaagagtatcttcctatgaaagagaactcccaggatttgataatgagctgtcttgggctacattggacaaatgatctacctggagcaatgatacagtgtaggttggcgttgaagcctgatggcctttttcttgcagcaattcttggcggggagactctgaaggaactaagaattgcatgcactattgctcaaatggaacgtgagggaggcatcagtcctcgaatgtcgccattagcacaagtccgtgatgcaggaaaccttttgtcaagggcaggcttcgcccttccaggagttgatgtagatcgatatacagtcaagtacaatagtgctcttgaacttgtggaacatcttagagcaatggcagaaacgaatgctctctttcaaagaagccatatattaaagagagatacagcactagctactgcagccatttaccagtcaatgtttgggttagaagatggaaccattccagcaacctttcaggtaatttacatgactgggtggaaggagcattcatcacagcaaaagcctaagagaaggggttctgccactgtatcatttggtgacataaggaaacaatttggttccaaccaagactgaagaactttatcagctatgaaaacatctctcgaggaaggaaaaggaaacccctatttgctcacaacagaacttggggtttccgaggcttcccatttgtggaaaaagtgtactctgttggttcccaccaagattcgcggaagcgttccttgcatcgcacacaatcctcctcctgtgcatctgggttgatctcgacacgccctgaaaactggaagcggatcatggagtggaagaaggagatgctatatatttgtactccgaccctagcctacgtgtttccactgtatgcaacaaatatcccatcacatggaaaatgatatttttgtagaaaaaatgttgtgatagctttcgccaaatctcattgaagttctaactgaaacttatttgctttgagttgtgaacttatttggtttggagaccttttatgttacattgtgagacatgctatccctatctatctatctatctatctatctatc

SEQ ID NO: 68993 - protein, 343 aa, Triticum aestivum
  peptide (1)..(343): Ceres Seq. ID no. 12616844
  misc_feature (56)..(201): Pfam Name: ubiE/COQ5 methyltransferase family Pfam Description: ubiE/COQ5 methyltransferase family
  misc_feature (44)..(337): Homolog of NCBI NO: 17986466 NR Description: BIOTIN SYNTHESIS PROTEIN BIOC [Brucella
  misc_feature (44)..(337): Homolog of NCBI NO: 23502732 NR Description: conserved hypothetical protein [Brucella suis
  misc_feature (141)..(336): Homolog of NCBI NO: 13559240 NR Description: dJ842G6.1.1 (novel protein) [Homo sapiens]
  misc_feature (42)..(336): Homolog of NCBI NO: 31201829 NR Description: ENSANGP00000018272 [Anopheles gambiae]
  misc_feature (44)..(334): Homolog of NCBI NO: 19922210 NR Description: CG8067-PA [Drosophila melanogaster]
  misc_feature (42)..(336): Homolog of NCBI NO: 34858816 NR Description: similar to dJ842G6.1.1 (novel protein) [Rattus
  misc_feature (42)..(336): Homolog of NCBI NO: 40018642 NR Description: chromosome 20 open reading frame 7 isoform 1
  misc_feature (44)..(332): Homolog of NCBI NO: 22968351 NR Description: hypothetical protein [Rhodospirillum rubrum]
  misc_feature (38)..(305): Homolog of NCBI NO: 6648045 NR Description: Hypothetical protein At1g22800
  misc_feature (38)..(339): Homolog of NCBI NO: 15219953 NR Description: unknown protein; protein id: At1g22800.1
MASGSSAAARRLLLLRHRRRHLVPNHHFSSSSADEVLDGGRVKIFDRDLKRRHRDRAAWAMRETDPLVDAVADNLLDRLEDCRKAFPSALCLGGSAGAVRRSLRGRGGIEKLTMMDMSVDMVNKWRELESATDDGPEMNFIVGDEEYLPMKENSQDLIMSCLGLHWTNDLPGAMIQCRLALKPDGLFLAAILGGETLKELRIACTIAQMEREGGISPRMSPLAQVRDAGNLLSRAGFALPGVDVDRYTVKYNSALELVEHLRAMAETNALFQRSHILKRDTALATAAIYQSMFGLEDGTIPATFQVIYMTGWKEHSSQQKPKRRGSATVSFGDIRKQFGSNQD

SEQ ID NO: 68994 - protein, 283 aa, Triticum aestivum
  peptide (1)..(283): Ceres Seq. ID no. 12616845
  misc_feature (1)..(141): Pfam Name: ubiE/COQ5 methyltransferase family Pfam Description: ubiE/COQ5 methyltransferase family
  misc_feature (1)..(277): Homolog of NCBI NO: 17986466 NR Description: BIOTIN SYNTHESIS PROTEIN BIOC [Brucella
  misc_feature (1)..(277): Homolog of NCBI NO: 23502732 NR Description: conserved hypothetical protein [Brucella suis
  misc_feature (81)..(276): Homolog of NCBI NO: 13559240 NR Description: dJ842G6.1.1 (novel protein) [Homo sapiens]
  misc_feature (1)..(276): Homolog of NCBI NO: 31201829 NR Description: ENSANGP00000018272 [Anopheles gambiae]
  misc_feature (1)..(274): Homolog of NCBI NO: 19922210 NR Description: CG8067-PA [Drosophila melanogaster]
  misc_feature (1)..(276): Homolog of NCBI NO: 34858816 NR Description: similar to dJ842G6.1.1 (novel protein) [Rattus
  misc_feature (1)..(276): Homolog of NCBI NO: 40018642 NR Description: chromosome 20 open reading frame 7 isoform 1
  misc_feature (1)..(272): Homolog of NCBI NO: 22968351 NR Description: hypothetical protein [Rhodospirillum rubrum]
  misc_feature (1)..(245): Homolog of NCBI NO: 6648045 NR Description: Hypothetical protein At1g22800
  misc_feature (1)..(279): Homolog of NCBI NO: 15219953 NR Description: unknown protein; protein id: At1g22800.1
MRETDPLVDAVADNLLDRLEDCRKAFPSALCLGGSAGAVRRSLRGRGGIEKLTMMDMSVDMVNKWRELESATDDGPEMNFIVGDEEYLPMKENSQDLIMSCLGLHWTNDLPGAMIQCRLALKPDGLFLAAILGGETLKELRIACTIAQMEREGGISPRMSPLAQVRDAGNLLSRAGFALPGVDVDRYTVKYNSALELVEHLRAMAETNALFQRSHILKRDTALATAAIYQSMFGLEDGTIPATFQVIYMTGWKEHSSQQKPKRRGSATVSFGDIRKQFGSNQD

SEQ ID NO: 68995 - protein, 230 aa, Triticum aestivum
  peptide (1)..(230): Ceres Seq. ID no. 12616846
  misc_feature (1)..(88): Pfam Name: ubiE/COQ5 methyltransferase family Pfam Description: ubiE/COQ5 methyltransferase family
  misc_feature (1)..(224): Homolog of NCBI NO: 17986466 NR Description: BIOTIN SYNTHESIS PROTEIN BIOC [Brucella
  misc_feature (1)..(224): Homolog of NCBI NO: 23502732 NR Description: conserved hypothetical protein [Brucella suis
  misc_feature (28)..(223): Homolog of NCBI NO: 13559240 NR Description: dJ842G6.1.1 (novel protein) [Homo sapiens]
  misc_feature (1)..(223): Homolog of NCBI NO: 31201829 NR Description: ENSANGP00000018272 [Anopheles gambiae]
  misc_feature (1)..(221): Homolog of NCBI NO: 19922210 NR Description: CG8067-PA [Drosophila melanogaster]
  misc_feature (1)..(223): Homolog of NCBI NO: 34858816 NR Description: similar to dJ842G6.1.1 (novel protein) [Rattus
  misc_feature (1)..(223): Homolog of NCBI NO: 40018642 NR Description: chromosome 20 open reading frame 7 isoform 1
  misc_feature (1)..(219): Homolog of NCBI NO: 22968351 NR Description: hypothetical protein [Rhodospirillum rubrum]
  misc_feature (1)..(192): Homolog of NCBI NO: 6648045 NR Description: Hypothetical protein At1g22800
  misc_feature (1)..(226): Homolog of NCBI NO: 15219953 NR Description: unknown protein; protein id: At1g22800.1
MMDMSVDMVNKWRELESATDDGPEMNFIVGDEEYLPMKENSQDLIMSCLGLHWTNDLPGAMIQCRLALKPDGLFLAAILGGETLKELRIACTIAQMEREGGISPRMSPLAQVRDAGNLLSRAGFALPGVDVDRYTVKYNSALELVEHLRAMAETNALFQRSHILKRDTALATAAIYQSMFGLEDGTIPATFQVIYMTGWKEHSSQQKPKRRGSATVSFGDIRKQFGSNQD

SEQ ID NO: 68996 - DNA, 486 bp, Triticum aestivum
  misc_feature (1)..(486): Ceres Seq. ID no. 13584174
tcgtctccgtttgaagacaaggagcaaagttggaaaccgccgccgattccctgtcctgcccctcctcgtagcataccgcttctagtataaccttgccctccggggggcacagcctctcctccttcccctgaccacctcctcagttttttctcaccctcctcaatggcgaatctgccgccgtccctcgccgccggcccctccttcggcgcgccctccccgcccccgctcccgcccccgtccggctcgtcggccgcggcgccgcccgccggggggagggaccggaagatggtgtccgcggagcagctcgtgctcgacctctgcgacccggagctgcgcgagaacgccctcctcgagctctccaagaagcgagagatttttcaagaccttgctccactgctgtggcactcctttggcaccgttgctgcactgctccaggagattgtgtcaatctacccttcactttcacctcctactttgtcgccagtt

SEQ ID NO: 68997 - protein, 108 aa, Triticum aestivum
  peptide (1)..(108): Ceres Seq. ID no. 13584175
  misc_feature (47)..(107): Pfam Name: Cell differentiation family, Rcd1-like Pfam Description: Cell differentiation family, Rcd1-like
  misc_feature (28)..(106): Homolog of NCBI NO: 38174128 NR Description: Unknown (protein for MGC:76003) [Silurana
  misc_feature (39)..(106): Homolog of NCBI NO: 13937977 NR Description: rcd1 (required for cell differentiation, S.pombe)
  misc_feature (39)..(106): Homolog of NCBI NO: 4885579 NR Description: RCD1 required for cell differentiation1 homolog
  misc_feature (28)..(106): Homolog of NCBI NO: 10946722 NR Description: rcd1 (required for cell differentiation) homolog 1
  misc_feature (11)..(107): Homolog of NCBI NO: 9294407 NR Description: RCD1 [Arabidopsis thaliana]
  misc_feature (19)..(107): Homolog of NCBI NO: 15239962 NR Description: expressed protein [Arabidopsis thaliana]
  misc_feature (1)..(107): Homolog of NCBI NO: 21537250 NR Description: putative cell differentiation protein
  misc_feature (1)..(107): Homolog of NCBI NO: 15232369 NR Description: cell differentiation protein -related
  misc_feature (1)..(107): Homolog of NCBI NO: 34899762 NR Description: putative cell differentiation protein
  misc_feature (1)..(107): Homolog of NCBI NO: 34897134 NR Description: putative cell differentiation protein [Oryza
MANLPPSLAAGPSFGAPSPPPLPPPSGSSAAAPPAGGRDRKMVSAEQLVLDLCDPELRENALLELSKKREIFQDLAPLLWHSFGTVAALLQEIVSIYPSLSPPTLSPV

SEQ ID NO: 68998 - protein, 67 aa, Triticum aestivum
  peptide (1)..(67): Ceres Seq. ID no. 13584176
  misc_feature (6)..(66): Pfam Name: Cell differentiation family, Rcd1-like Pfam Description: Cell differentiation family, Rcd1-like
  misc_feature (1)..(65): Homolog of NCBI NO: 38174128 NR Description: Unknown (protein for MGC:76003) [Silurana
  misc_feature (1)..(65): Homolog of NCBI NO: 13937977 NR Description: rcd1 (required for cell differentiation, S.pombe)
  misc_feature (1)..(65): Homolog of NCBI NO: 4885579 NR Description: RCD1 required for cell differentiation1 homolog
  misc_feature (1)..(65): Homolog of NCBI NO: 10946722 NR Description: rcd1 (required for cell differentiation) homolog 1
  misc_feature (1)..(66): Homolog of NCBI NO: 9294407 NR Description: RCD1 [Arabidopsis thaliana]
  misc_feature (1)..(66): Homolog of NCBI NO: 15239962 NR Description: expressed protein [Arabidopsis thaliana]
  misc_feature (1)..(66): Homolog of NCBI NO: 21537250 NR Description: putative cell differentiation protein
  misc_feature (1)..(66): Homolog of NCBI NO: 15232369 NR Description: cell differentiation protein -related
  misc_feature (1)..(66): Homolog of NCBI NO: 34899762 NR Description: putative cell differentiation protein
  misc_feature (1)..(66): Homolog of NCBI NO: 34897134 NR Description: putative cell differentiation protein [Oryza
MVSAEQLVLDLCDPELRENALLELSKKREIFQDLAPLLWHSFGTVAALLQEIVSIYPSLSPPTLSPV

SEQ ID NO: 68999 - DNA, 439 bp, Triticum aestivum
  misc_feature (1)..(439): Ceres Seq. ID no. 13655451
acagctcgcccactccctacccatctcgccggcgcgcaggcggcgccgtcccaacatgggatgacgtccgccgtaaaatagggcccccacgaccaaacaaagccccgactagccaccaacatcgaaccccatgaaggcgtctatcaagttccgcgacgacgaccggccgctgatgcgggccaaggtgccgatcggcgtgctcgggctgccgttccagtccggcctctccgccggtggcgatccccgggagctccgcttcgatctctccaccgctttcgcctccgggccagctctccgcttatcgtatcgccccaacgaccctggtctccccttcgccatctccatccgcgccggtgtcggagccctcggctcccctgtccgggcccccttctccctcgccgccgagttcaacctcctctctgccaactccggatctcct

SEQ ID NO: 69000 - protein, 103 aa, Triticum aestivum
  peptide (1)..(103): Ceres Seq. ID no. 13655452
  misc_feature (51)..(99): Homolog of NCBI NO: 21740989 NR Description: OSJNBa0019K04.27 [Oryza sativa (japonica
  misc_feature (1)..(102): Homolog of NCBI NO: 15230911 NR Description: expressed protein [Arabidopsis thaliana]
  misc_feature (1)..(102): Homolog of NCBI NO: 28411873 NR Description: OSJNBa0016N23.25 [Oryza sativa (japonica
MKASIKFRDDDRPLMRAKVPIGVLGLPFQSGLSAGGDPRELRFDLSTAFASGPALRLSYRPNDPGLPFAISIRAGVGALGSPVRAPFSLAAEFNLLSANSGSP

SEQ ID NO: 69001 - protein, 89 aa, Triticum aestivum
  peptide (1)..(89): Ceres Seq. ID no. 13655453
  misc_feature (37)..(85): Homolog of NCBI NO: 21740989 NR Description: OSJNBa0019K04.27 [Oryza sativa (japonica
  misc_feature (1)..(88): Homolog of NCBI NO: 15230911 NR Description: expressed protein [Arabidopsis thaliana]
  misc_feature (1)..(88): Homolog of NCBI NO: 28411873 NR Description: OSJNBa0016N23.25 [Oryza sativa (japonica
MRAKVPIGVLGLPFQSGLSAGGDPRELRFDLSTAFASGPALRLSYRPNDPGLPFAISIRAGVGALGSPVRAPFSLAAEFNLLSANSGSP

SEQ ID NO: 69002 - DNA, 1659 bp, Triticum aestivum
  misc_feature (1)..(1659): Ceres Seq. ID no. 13597034
ctcccccctacgcacctcttgccaccgccgcagcacatccccgaaagctaggtttttatcactccacctatcatcatcgcctcggcggccgcacaacccaccctccccctcgaagccccgatctccttcacttctcctctccgtgccagatcgttgtttatgagctcgaaggagaagcccaccctcggaggccagcggattaagacccgcaagcggaatatcgcagctcctttggacccttcgtcgttctctgatgcaattgtccagatttatctggataatgctggagacctggaacttgttgccaaaagtatagagtcatcagatctcaacttctcacgttacggtgacactttctttgaggttgttttcattggtgtgcgtactcagcctggtacgattaaacccgaagaagagggagagcgccacccctattctctcattgactgtgcagcacaacgtgaagcaatattaccttatgtcctctttattcagaaaacactgcgcaggaggcctttcttaataaagagtcttgaaaatgttatgcgaaaatttctccagtctttggagttctttgaagaaaatgagagacaaaaacttgccattttcacggcacttgcattttctcagaaattatcaggtctgccacctgaaactgtctttcagccattgcttaaggacaatcttgttgccaaagggatagtgctttcattcattactgagttcttcaaggaatatctgaaggaaaatagtttggatgatctgattgcacttttaaagaaaggcaaaatggaggacaatttacttgaattttttccatcaggaaagagaacctctgaggctttgtctgagcatttcaccaaagaaggtttgactagccttgttgagtacaatagcaagaaaatgtttgaagttaagctcaaggagataaagtcaactctgaccactatgatcaatgaagaagctgaaatatctgaagtaactgaggttgtcaagcaacaggttaaagatgctaaatttcctgatatagaggttgttcgcatgctgtgggatgtgctgatggaggctgttcagtggtctggaaagaaccagcagcaaaattctaattcagcacttaggcaggtgaatgcttgggctggtcttatgaatgcattttgcacaagtggaaagctagaactggaactcatatacaaggtccagacacaatgttatgaggatgctaagttgatgaagctgttccctgaaattataagatcactgtatgatcaagatgtcctagctgaagataccatacttctttggttccgcaagggttcaaaccaaaaaggaaggcaatctttcgtgaaagctctggagcctttcgtcaaatggcttgaggaggcagaggaggaagaataaagaggcacggttgttgctttaaaatgagtatttccttataccccatgtttgcggagacggtggtcatccttttgctgcttattactgaacaaacattttatattcagatgtgagcattgctgtcatctgctatcattttcgacattattgtaccaggatttggaaggatcgttacctactttgtgttgtgtattagttgttacatggatatttatgcagagtgcacgtttaagaagaggcaaactcaagtttataactgcc

SEQ ID NO: 69003 - protein, 412 aa, Triticum aestivum
  peptide (1)..(412): Ceres Seq. ID no. 13597035
  misc_feature (336)..(412): Pfam Name: eIF4-gamma/eIF5/eIF2-epsilon Pfam Description: eIF4-gamma/eIF5/eIF2-epsilon
  misc_feature (4)..(411): Homolog of NCBI NO: 37589071 NR Description: Unknown (protein for MGC:63787) [Danio rerio]
  misc_feature (1)..(411): Homolog of NCBI NO: 11640562 NR Description: MSTP017 [Homo sapiens]
  misc_feature (1)..(411): Homolog of NCBI NO: 19705527 NR Description: Hfb2 protein [Rattus norvegicus]
  misc_feature (1)..(411): Homolog of NCBI NO: 7661744 NR Description: basic leucine zipper and W2 domains 2; HSPC028
  misc_feature (1)..(411): Homolog of NCBI NO: 17737777 NR Description: elongation initiation factor 5C CG2922-PG
  misc_feature (1)..(412): Homolog of NCBI NO: 25404540 NR Description: hypothetical protein T23K8.13 [imported] -
  misc_feature (1)..(412): Homolog of NCBI NO: 21554220 NR Description: unknown [Arabidopsis thaliana]
  misc_feature (1)..(412): Homolog of NCBI NO: 18408228 NR Description: expressed protein [Arabidopsis thaliana]
  misc_feature (2)..(412): Homolog of NCBI NO: 9759036 NR Description: gb|AAD26879.1~gene_id:T30G6.9~strong similarity
  misc_feature (1)..(412): Homolog of NCBI NO: 18421544 NR Description: expressed protein [Arabidopsis thaliana]
MSSKEKPTLGGQRIKTRKRNIAAPLDPSSFSDAIVQIYLDNAGDLELVAKSIESSDLNFSRYGDTFFEVVFIGVRTQPGTIKPEEEGERHPYSLIDCAAQREAILPYVLFIQKTLRRRPFLIKSLENVMRKFLQSLEFFEENERQKLAIFTALAFSQKLSGLPPETVFQPLLKDNLVAKGIVLSFITEFFKEYLKENSLDDLIALLKKGKMEDNLLEFFPSGKRTSEALSEHFTKEGLTSLVEYNSKKMFEVKLKEIKSTLTTMINEEAEISEVTEVVKQQVKDAKFPDIEVVRMLWDVLMEAVQWSGKNQQQNSNSALRQVNAWAGLMNAFCTSGKLELELIYKVQTQCYEDAKLMKLFPEIIRSLYDQDVLAEDTILLWFRKGSNQKGRQSFVKALEPFVKWLEEAEEEE

SEQ ID NO: 69004 - protein, 284 aa, Triticum aestivum
  peptide (1)..(284): Ceres Seq. ID no. 13597036
  misc_feature (208)..(284): Pfam Name: eIF4-gamma/eIF5/eIF2-epsilon Pfam Description: eIF4-gamma/eIF5/eIF2-epsilon
  misc_feature (1)..(283): Homolog of NCBI NO: 37589071 NR Description: Unknown (protein for MGC:63787) [Danio rerio]
  misc_feature (1)..(283): Homolog of NCBI NO: 11640562 NR Description: MSTP017 [Homo sapiens]
  misc_feature (1)..(283): Homolog of NCBI NO: 19705527 NR Description: Hfb2 protein [Rattus norvegicus]
  misc_feature (1)..(283): Homolog of NCBI NO: 7661744 NR Description: basic leucine zipper and W2 domains 2; HSPC028
  misc_feature (1)..(283): Homolog of NCBI NO: 17737777 NR Description: elongation initiation factor 5C CG2922-PG
  misc_feature (1)..(284): Homolog of NCBI NO: 25404540 NR Description: hypothetical protein T23K8.13 [imported] -
  misc_feature (1)..(284): Homolog of NCBI NO: 21554220 NR Description: unknown [Arabidopsis thaliana]
  misc_feature (1)..(284): Homolog of NCBI NO: 18408228 NR Description: expressed protein [Arabidopsis thaliana]
  misc_feature (1)..(284): Homolog of NCBI NO: 9759036 NR Description: gb|AAD26879.1~gene_id:T30G6.9~strong similarity
  misc_feature (1)..(284): Homolog of NCBI NO: 18421544 NR Description: expressed protein [Arabidopsis thaliana]
MRKFLQSLEFFEENERQKLAIFTALAFSQKLSGLPPETVFQPLLKDNLVAKGIVLSFITEFFKEYLKENSLDDLIALLKKGKMEDNLLEFFPSGKRTSEALSEHFTKEGLTSLVEYNSKKMFEVKLKEIKSTLTTMINEEAEISEVTEVVKQQVKDAKFPDIEVVRMLWDVLMEAVQWSGKNQQQNSNSALRQVNAWAGLMNAFCTSGKLELELIYKVQTQCYEDAKLMKLFPEIIRSLYDQDVLAEDTILLWFRKGSNQKGRQSFVKALEPFVKWLEEAEEEE

SEQ ID NO: 69005 - DNA, 1280 bp, Triticum aestivum
  misc_feature (1)..(1280): Ceres Seq. ID no. 13597037
aattcccctcccctctccaggtctcctcccgaaacccccaattcgaaaatcgatttggggatttcggcgtcccagatccgctcctccggccggttcgctcggccgcacgtccgatccgcgttcgcggccgccgtcggagctgctgaccggcccgcggctcgattcgtccgggggatttgttgcgggggctctcgcttgctcccgatggcgtcgtccccggtctcctactggtgctaccactgcagccgcttcgtgcgggtctccccggccaccgtcgtctgccccgactgcgacggcggcttcctcgagcagttcccgcagcctccgccgccgcgcggcggcggcggcagcggccggcgcggggccatgaacccggtgatcgtgctgcggggcggctcgctctccggcttcgagctctactacgaggacggctccggcgacgggctgcggccgctgcccggcgacgtctcgcacctcctcatggggtcggggttccaccgcctgctcgaccagttctcgaggctggaggctgccgccccgcgcccgccggcgtccaaggccgcggtggagtcgatgccgtccgtgacggtcgccgggggaggcggggcccactgcgcggtgtgccaggaggccttcgagcccggcgccgcggctcgggagatgccgtgcaagcacgtctaccaccaggactgcatcctcccctggctctccctccgcaactcctgccccatctgccgcagcgagcttccggcggcagccgtgcctgaggcggaggcggatgccgggctcaccatctggcgactcccccgcggcggattcgccgttggaaggttcgccggcgggcccagagagcaactgccggttgtctacacggagctggatggtggtttcagcaacggcgtcgggccgaggcgggtgacatggccagaaggagaagggcaggtggacggcggcgaaggtcggattcgccgtgtatttaggaacctgtttgggtgctttggccggggcggccggcctgagagttcctcgcagtcccgtagtggctgagcaatgttcttcctggtaactcactttcaattgatgatagtggtgaataagtaggagttagtataaggaggaaaccccaggtggtgagttattggttagtttgatgtaaatgaagggcttgcattccccaccttttgtctcgtttttaaaaaaaaaaaaaaaaaaaaaaaaaaaaaaaaaaaaaaaagaaaaaaaaaaaaaaaaaagcttatcgataccgtcgacctcgaggg

SEQ ID NO: 69006 - protein, 348 aa, Triticum aestivum
  peptide (1)..(348): Ceres Seq. ID no. 13597038
  misc_feature (205)..(245): Pfam Name: Zinc finger, C3HC4 type (RING finger) Pfam Description: Zinc finger, C3HC4 type (RING finger)
  misc_feature (69)..(104): Homolog of NCBI NO: 18405518 NR Description: RING-H2 finger protein (RHC1a) [Arabidopsis
  misc_feature (143)..(257): Homolog of NCBI NO: 18405518 NR Description: RING-H2 finger protein (RHC1a) [Arabidopsis
  misc_feature (71)..(279): Homolog of NCBI NO: 34906008 NR Description: putative RING-H2 finger protein RHC2a
  misc_feature (118)..(348): Homolog of NCBI NO: 18405141 NR Description: RING-H2 finger protein (RHC2a) [Arabidopsis
  misc_feature (115)..(316): Homolog of NCBI NO: 18424254 NR Description: expressed protein [Arabidopsis thaliana]
  misc_feature (115)..(316): Homolog of NCBI NO: 8885559 NR Description: emb|CAB62332.1~gene_id:F2O15.22~strong similarity
  misc_feature (113)..(345): Homolog of NCBI NO: 15232595 NR Description: expressed protein [Arabidopsis thaliana]
  misc_feature (68)..(110): Homolog of NCBI NO: 14719329 NR Description: putative RING-H2 finger protein [Oryza sativa]
  misc_feature (135)..(345): Homolog of NCBI NO: 14719329 NR Description: putative RING-H2 finger protein [Oryza sativa]
  misc_feature (69)..(348): Homolog of NCBI NO: 34902106 NR Description: unknown protein [Oryza sativa (japonica
NSPPLSRSPPETPNSKIDLGISASQIRSSGRFARPHVRSAFAAAVGAADRPAARFVRGICCGGSRLLPMASSPVSYWCYHCSRFVRVSPATVVCPDCDGGFLEQFPQPPPPRGGGGSGRRGAMNPVIVLRGGSLSGFELYYEDGSGDGLRPLPGDVSHLLMGSGFHRLLDQFSRLEAAAPRPPASKAAVESMPSVTVAGGGGAHCAVCQEAFEPGAAAREMPCKHVYHQDCILPWLSLRNSCPICRSELPAAAVPEAEADAGLTIWRLPRGGFAVGRFAGGPREQLPVVYTELDGGFSNGVGPRRVTWPEGEGQVDGGEGRIRRVFRNLFGCFGRGGRPESSSQSRSG

SEQ ID NO: 69007 - protein, 280 aa, Triticum aestivum
  peptide (1)..(280): Ceres Seq. ID no. 13597039
  misc_feature (137)..(177): Pfam Name: Zinc finger, C3HC4 type (RING finger) Pfam Description: Zinc finger, C3HC4 type (RING finger)
  misc_feature (1)..(36): Homolog of NCBI NO: 18405518 NR Description: RING-H2 finger protein (RHC1a) [Arabidopsis
  misc_feature (75)..(189): Homolog of NCBI NO: 18405518 NR Description: RING-H2 finger protein (RHC1a) [Arabidopsis
  misc_feature (3)..(211): Homolog of NCBI NO: 34906008 NR Description: putative RING-H2 finger protein RHC2a
  misc_feature (50)..(280): Homolog of NCBI NO: 18405141 NR Description: RING-H2 finger protein (RHC2a) [Arabidopsis
  misc_feature (47)..(248): Homolog of NCBI NO: 18424254 NR Description: expressed protein [Arabidopsis thaliana]
  misc_feature (47)..(248): Homolog of NCBI NO: 8885559 NR Description: emb|CAB62332.1~gene_id:F2O15.22~strong similarity
  misc_feature (45)..(277): Homolog of NCBI NO: 15232595 NR Description: expressed protein [Arabidopsis thaliana]
  misc_feature (1)..(42): Homolog of NCBI NO: 14719329 NR Description: putative RING-H2 finger protein [Oryza sativa]
  misc_feature (67)..(277): Homolog of NCBI NO: 14719329 NR Description: putative RING-H2 finger protein [Oryza sativa]
  misc_feature (1)..(280): Homolog of NCBI NO: 34902106 NR Description: unknown protein [Oryza sativa (japonica
MASSPVSYWCYHCSRFVRVSPATVVCPDCDGGFLEQFPQPPPPRGGGGSGRRGAMNPVIVLRGGSLSGFELYYEDGSGDGLRPLPGDVSHLLMGSGFHRLLDQFSRLEAAAPRPPASKAAVESMPSVTVAGGGGAHCAVCQEAFEPGAAAREMPCKHVYHQDCILPWLSLRNSCPICRSELPAAAVPEAEADAGLTIWRLPRGGFAVGRFAGGPREQLPVVYTELDGGFSNGVGPRRVTWPEGEGQVDGGEGRIRRVFRNLFGCFGRGGRPESSSQSRSG

SEQ ID NO: 69008 - protein, 226 aa, Triticum aestivum
  peptide (1)..(226): Ceres Seq. ID no. 13597040
  misc_feature (83)..(123): Pfam Name: Zinc finger, C3HC4 type (RING finger) Pfam Description: Zinc finger, C3HC4 type (RING finger)
  misc_feature (35)..(131): Homolog of NCBI NO: 34908968 NR Description: P0003D09.21 [Oryza sativa (japonica
  misc_feature (7)..(129): Homolog of NCBI NO: 18410530 NR Description: expressed protein [Arabidopsis thaliana]
  misc_feature (21)..(135): Homolog of NCBI NO: 18405518 NR Description: RING-H2 finger protein (RHC1a) [Arabidopsis
  misc_feature (1)..(157): Homolog of NCBI NO: 34906008 NR Description: putative RING-H2 finger protein RHC2a
  misc_feature (1)..(226): Homolog of NCBI NO: 18405141 NR Description: RING-H2 finger protein (RHC2a) [Arabidopsis
  misc_feature (1)..(194): Homolog of NCBI NO: 18424254 NR Description: expressed protein [Arabidopsis thaliana]
  misc_feature (1)..(194): Homolog of NCBI NO: 8885559 NR Description: emb|CAB62332.1~gene_id:F2O15.22~strong similarity
  misc_feature (1)..(223): Homolog of NCBI NO: 15232595 NR Description: expressed protein [Arabidopsis thaliana]
  misc_feature (13)..(223): Homolog of NCBI NO: 14719329 NR Description: putative RING-H2 finger protein [Oryza sativa]
  misc_feature (1)..(226): Homolog of NCBI NO: 34902106 NR Description: unknown protein [Oryza sativa (japonica
MNPVIVLRGGSLSGFELYYEDGSGDGLRPLPGDVSHLLMGSGFHRLLDQFSRLEAAAPRPPASKAAVESMPSVTVAGGGGAHCAVCQEAFEPGAAAREMPCKHVYHQDCILPWLSLRNSCPICRSELPAAAVPEAEADAGLTIWRLPRGGFAVGRFAGGPREQLPVVYTELDGGFSNGVGPRRVTWPEGEGQVDGGEGRIRRVFRNLFGCFGRGGRPESSSQSRSG

SEQ ID NO: 69009 - DNA, 1232 bp, Triticum aestivum
  misc_feature (1)..(1232): Ceres Seq. ID no. 15225086
ccccaaagacggccatcatcatcgtcgcgttgccttcttcccacctcccaaaaaccctacaccccgcgacgaccaaccggcggccgccatgctcctccggcgaccacttcagacgctcaccctccccctcctccgccggcacttctccgcctccgccgcagcggtttccgccccagatcacaacatcgacgaactcctgtcgccgccgttcgactacctccctggtcacccgcggccggacgcgaagcacgacgaggtgatcttcgccgtgccgagggactcctctggccggcacttcgcggccaaggaacgcaaggctgggcgtgtgccggccatcgtcttcgagcaggagaatggccaagagggcggtaacaagcgcctcgtctcggtgccgtccaagcagatccgcaagctcgtcgaccacctcggacggtccttcttcctctcccgcctcttccgtctccaggtttggtccgagcaggccgggcagggggacctcatcgagagcgtccgcgtcctgccgcgcaaggtgcacttgcacgcaggcactgatgaacctctcaatgtgacattcatgagagcaccttcttcggcactgctcaaaatagatgttcctttaatgtacattggggaggacgcctcacctggcctcaggaaaggagcttacttcaacaccataaaacgaactgtcaagtttctctgccctgctgacatagtcccgccatacattgaagtggacctaagcgagttggatgtcgggcagaaactgctgatgcgcgatctgatagtccacccggcgctgaaattgcttcagtcgccagatcaacccatctgtagcattatagggtcaagagcccccgaccagaagaaagagaaatcaaaataactcgctccgctgtgttaactatttgcaacagaataaacttgttttgctatctatgcgagttattcagttcttgattatcccacctagaacgaatactactaggatgattttgtagcaaaagaccactgttttacctgaggaatggaagccagatgctacagataagaatacggcaggaatgtccaaatatgtttatgtgattttgttcacagaaacttcactgtgatgtattttatcagaaaatcgtttacctgttgacaatccgatggttttccattgtaggattgtgtacgtgattttctagtggtcaagcacatggaatttgcattgttgtgtcatgatctcg

SEQ ID NO: 69010 - protein, 294 aa, Triticum aestivum
  peptide (1)..(294): Ceres Seq. ID no. 15225087
  misc_feature (122)..(284): Homolog of NCBI NO: 15604456 NR Description: PROBABLE 50S RIBOSOMAL PROTEIN L25 (rplY)
  misc_feature (87)..(261): Homolog of NCBI NO: 23015980 NR Description: COG1825: Ribosomal protein L25 (general stress
  misc_feature (168)..(293): Homolog of NCBI NO: 13472406 NR Description: 50S ribosomal protein L25 [Mesorhizobium loti]
  misc_feature (98)..(292): Homolog of NCBI NO: 23106991 NR Description: COG1825: Ribosomal protein L25 (general stress
  misc_feature (171)..(289): Homolog of NCBI NO: 27382552 NR Description: 50S ribosomal protein L25 [Bradyrhizobium
  misc_feature (92)..(280): Homolog of NCBI NO: 22965584 NR Description: COG1825: Ribosomal protein L25 (general stress
  misc_feature (171)..(281): Homolog of NCBI NO: 22961530 NR Description: COG1825: Ribosomal protein L25 (general stress
  misc_feature (85)..(291): Homolog of NCBI NO: 15240108 NR Description: expressed protein [Arabidopsis thaliana]
  misc_feature (30)..(293): Homolog of NCBI NO: 15236554 NR Description: expressed protein [Arabidopsis thaliana]
  misc_feature (29)..(247): Homolog of NCBI NO: 34912284 NR Description: P0451D05.2 [Oryza sativa (japonica
PKDGHHHRRVAFFPPPKNPTPRDDQPAAAMLLRRPLQTLTLPLLRRHFSASAAAVSAPDHNIDELLSPPFDYLPGHPRPDAKHDEVIFAVPRDSSGRHFAAKERKAGRVPAIVFEQENGQEGGNKRLVSVPSKQIRKLVDHLGRSFFLSRLFRLQVWSEQAGQGDLIESVRVLPRKVHLHAGTDEPLNVTFMRAPSSALLKIDVPLMYIGEDASPGLRKGAYFNTIKRTVKFLCPADIVPPYIEVDLSELDVGQKLLMRDLIVHPALKLLQSPDQPICSIIGSRAPDQKKEKSK

SEQ ID NO: 69011 - protein, 265 aa, Triticum aestivum
  peptide (1)..(265): Ceres Seq. ID no. 15225088
  misc_feature (93)..(255): Homolog of NCBI NO: 15604456 NR Description: PROBABLE 50S RIBOSOMAL PROTEIN L25 (rplY)
  misc_feature (58)..(232): Homolog of NCBI NO: 23015980 NR Description: COG1825: Ribosomal protein L25 (general stress
  misc_feature (139)..(264): Homolog of NCBI NO: 13472406 NR Description: 50S ribosomal protein L25 [Mesorhizobium loti]
  misc_feature (69)..(263): Homolog of NCBI NO: 23106991 NR Description: COG1825: Ribosomal protein L25 (general stress
  misc_feature (142)..(260): Homolog of NCBI NO: 27382552 NR Description: 50S ribosomal protein L25 [Bradyrhizobium
  misc_feature (63)..(251): Homolog of NCBI NO: 22965584 NR Description: COG1825: Ribosomal protein L25 (general stress
  misc_feature (142)..(252): Homolog of NCBI NO: 22961530 NR Description: COG1825: Ribosomal protein L25 (general stress
  misc_feature (56)..(262): Homolog of NCBI NO: 15240108 NR Description: expressed protein [Arabidopsis thaliana]
  misc_feature (1)..(264): Homolog of NCBI NO: 15236554 NR Description: expressed protein [Arabidopsis thaliana]
  misc_feature (1)..(218): Homolog of NCBI NO: 34912284 NR Description: P0451D05.2 [Oryza sativa (japonica
MLLRRPLQTLTLPLLRRHFSASAAAVSAPDHNIDELLSPPFDYLPGHPRPDAKHDEVIFAVPRDSSGRHFAAKERKAGRVPAIVFEQENGQEGGNKRLVSVPSKQIRKLVDHLGRSFFLSRLFRLQVWSEQAGQGDLIESVRVLPRKVHLHAGTDEPLNVTFMRAPSSALLKIDVPLMYIGEDASPGLRKGAYFNTIKRTVKFLCPADIVPPYIEVDLSELDVGQKLLMRDLIVHPALKLLQSPDQPICSIIGSRAPDQKKEKSK

SEQ ID NO: 69012 - DNA, 1364 bp, Triticum aestivum
  misc_feature (1)..(1364): Ceres Seq. ID no. 13597061
agcatattcgtacgcgaccctgccgggaaagcggcttcccatctgcgggaagcggaaagaggaccggcttcgaagacggcggaggcgactcttgggtcgcgtcgtctccaatcttccactctgaccgactcccgaccgatctccgccggagcccgcacgacgccgtcgccgatggggttcgccgcccggccgctccccctgctcctgctgctcctggtcgccggcgcggccgccaccgaccagatcttcaccacctcaggtgtgccgttcgggaagaactcgcgcgagccgaggtaccgcgtggagttccaccccgtcgattcgccataccacccggagaatggccaggagtctgaaccaatgactgaccacgaggggagacagtacacctgctacctaccagtggaagaaaccaagaccatgaagtcgattgtcccacagaatgcaaccaatgttataatagaaagcgaacggaaagttaagccaaaggagccagatgaactgctggaggttctcaaagaccagtgcttctacaggcatgaaggttggtggtcttatgagttctgctattatgggaaaatccgacaggttcatgtagagaatgagaaggttatccaagagtatgttctaggtgaatatgaccctgatgcaaccgatgcttaccatgacaatcacacctccgaatctgctgatgaggaccacgtgaaagatacttctaagaggtatcatgtccacgtgtacacaaacgggactgtgtgtgatctcacagatataccacggtacacagaggttaggtttgtttgttccgagcccactgtactgatcagttcgataaaggagatatcttcctgcaagtatgttttaactgtccaaagcccaatgctctgcaagaacccgttgtttcagcaggaaaagcgcaccttcttcatccactgcaacgagtcgcttgcggaagcagaagctgaggccgccgaggacgacgactctctcccaaaagaagctcagatgtccatcgttccaaaccccgacgaattgcataactacgcagcttacgctacctgattgcccgccaatcacggtgccctcagctgatgaaagatgccgttattttggaagtacaacagcaagttggcaacatagtataactatcccctggcttgttctgtctgacgccaactagtggttacagggtactctttgagcagatatccattactgaaacagcttgagattaccttagaggaagattaagggcaaagagtgtcctgctgtactgtagtggtatataatttagtaaagggggtatttgagattcagtgacaggctttagacacatcaccaacaattttcctcttgaaatgttc

SEQ ID NO: 69013 - protein, 353 aa, Triticum aestivum
  peptide (1)..(353): Ceres Seq. ID no. 13597062
  misc_feature (167)..(302): Homolog of NCBI NO: 34865743 NR Description: similar to Protein OS-9 precursor [Rattus
  misc_feature (167)..(302): Homolog of NCBI NO: 29243990 NR Description: hypothetical protein 1300007E20 [Mus musculus]
  misc_feature (167)..(302): Homolog of NCBI NO: 13905114 NR Description: 1300007E20 protein [Mus musculus]
  misc_feature (96)..(320): Homolog of NCBI NO: 5803109 NR Description: amplified in osteosarcoma [Homo sapiens]
  misc_feature (96)..(320): Homolog of NCBI NO: 12653521 NR Description: Similar to amplified in osteosarcoma [Homo
  misc_feature (105)..(314): Homolog of NCBI NO: 28850402 NR Description: similar to Arabidopsis thaliana (Mouse-ear
  misc_feature (234)..(299): Homolog of NCBI NO: 7487985 NR Description: hypothetical protein F7N22.4 - Arabidopsis
  misc_feature (121)..(208): Homolog of NCBI NO: 7487985 NR Description: hypothetical protein F7N22.4 - Arabidopsis
  misc_feature (67)..(336): Homolog of NCBI NO: 21592392 NR Description: unknown [Arabidopsis thaliana]
  misc_feature (67)..(336): Homolog of NCBI NO: 18421420 NR Description: expressed protein [Arabidopsis thaliana]
SIFVRDPAGKAASHLREAERGPASKTAEATLGSRRLQSSTLTDSRPISAGARTTPSPMGFAARPLPLLLLLLVAGAAATDQIFTTSGVPFGKNSREPRYRVEFHPVDSPYHPENGQESEPMTDHEGRQYTCYLPVEETKTMKSIVPQNATNVIIESERKVKPKEPDELLEVLKDQCFYRHEGWWSYEFCYYGKIRQVHVENEKVIQEYVLGEYDPDATDAYHDNHTSESADEDHVKDTSKRYHVHVYTNGTVCDLTDIPRYTEVRFVCSEPTVLISSIKEISSCKYVLTVQSPMLCKNPLFQQEKRTFFIHCNESLAEAEAEAAEDDDSLPKEAQMSIVPNPDELHNYAAYAT

SEQ ID NO: 69014 - protein, 296 aa, Triticum aestivum
  peptide (1)..(296): Ceres Seq. ID no. 13597063
  misc_feature (110)..(245): Homolog of NCBI NO: 34865743 NR Description: similar to Protein OS-9 precursor [Rattus
  misc_feature (110)..(245): Homolog of NCBI NO: 29243990 NR Description: hypothetical protein 1300007E20 [Mus musculus]
  misc_feature (110)..(245): Homolog of NCBI NO: 13905114 NR Description: 1300007E20 protein [Mus musculus]
  misc_feature (39)..(263): Homolog of NCBI NO: 5803109 NR Description: amplified in osteosarcoma [Homo sapiens]
  misc_feature (39)..(263): Homolog of NCBI NO: 12653521 NR Description: Similar to amplified in osteosarcoma [Homo
  misc_feature (48)..(257): Homolog of NCBI NO: 28850402 NR Description: similar to Arabidopsis thaliana (Mouse-ear
  misc_feature (177)..(242): Homolog of NCBI NO: 7487985 NR Description: hypothetical protein F7N22.4 - Arabidopsis
  misc_feature (64)..(151): Homolog of NCBI NO: 7487985 NR Description: hypothetical protein F7N22.4 - Arabidopsis
  misc_feature (10)..(279): Homolog of NCBI NO: 21592392 NR Description: unknown [Arabidopsis thaliana]
  misc_feature (10)..(279): Homolog of NCBI NO: 18421420 NR Description: expressed protein [Arabidopsis thaliana]
MGFAARPLPLLLLLLVAGAAATDQIFTTSGVPFGKNSREPRYRVEFHPVDSPYHPENGQESEPMTDHEGRQYTCYLPVEETKTMKSIVPQNATNVIIESERKVKPKEPDELLEVLKDQCFYRHEGWWSYEFCYYGKIRQVHVENEKVIQEYVLGEYDPDATDAYHDNHTSESADEDHVKDTSKRYHVHVYTNGTVCDLTDIPRYTEVRFVCSEPTVLISSIKEISSCKYVLTVQSPMLCKNPLFQQEKRTFFIHCNESLAEAEAEAAEDDDSLPKEAQMSIVPNPDELHNYAAYAT

SEQ ID NO: 69015 - protein, 233 aa, Triticum aestivum
  peptide (1)..(233): Ceres Seq. ID no. 13597064
  misc_feature (47)..(182): Homolog of NCBI NO: 34865743 NR Description: similar to Protein OS-9 precursor [Rattus
  misc_feature (47)..(182): Homolog of NCBI NO: 29243990 NR Description: hypothetical protein 1300007E20 [Mus musculus]
  misc_feature (47)..(182): Homolog of NCBI NO: 13905114 NR Description: 1300007E20 protein [Mus musculus]
  misc_feature (1)..(200): Homolog of NCBI NO: 5803109 NR Description: amplified in osteosarcoma [Homo sapiens]
  misc_feature (1)..(200): Homolog of NCBI NO: 12653521 NR Description: Similar to amplified in osteosarcoma [Homo
  misc_feature (1)..(194): Homolog of NCBI NO: 28850402 NR Description: similar to Arabidopsis thaliana (Mouse-ear
  misc_feature (114)..(179): Homolog of NCBI NO: 7487985 NR Description: hypothetical protein F7N22.4 - Arabidopsis
  misc_feature (1)..(88): Homolog of NCBI NO: 7487985 NR Description: hypothetical protein F7N22.4 - Arabidopsis
  misc_feature (1)..(216): Homolog of NCBI NO: 21592392 NR Description: unknown [Arabidopsis thaliana]
  misc_feature (1)..(216): Homolog of NCBI NO: 18421420 NR Description: expressed protein [Arabidopsis thaliana]
MTDHEGRQYTCYLPVEETKTMKSIVPQNATNVIIESERKVKPKEPDELLEVLKDQCFYRHEGWWSYEFCYYGKIRQVHVENEKVIQEYVLGEYDPDATDAYHDNHTSESADEDHVKDTSKRYHVHVYTNGTVCDLTDIPRYTEVRFVCSEPTVLISSIKEISSCKYVLTVQSPMLCKNPLFQQEKRTFFIHCNESLAEAEAEAAEDDDSLPKEAQMSIVPNPDELHNYAAYAT

SEQ ID NO: 69016 - DNA, 1262 bp, Triticum aestivum
  misc_feature (1)..(1262): Ceres Seq. ID no. 13598439
attttctcagaaaaccactacattctgcctctccgttctgttcttgccttgttctatttttcggctctgctgtacatggcgtcggctgcaggtgaggggaggagccgggtgctggtgataggcggcaccggctacatcggccgcttcatcgtcgccgccagcgcacgcgagggccaccccaccgccgtcctcgtccgcgacgccgcgcccgccgacccagccaaggccgccgtcctccagggattccgggatgccggcgtcgccatcgtcgagggtgatatgtatgatcatgagagcctggtgacagccattaaatcagcagatgttgtgatctcggccgtgggttatcaacagctaccggatcaaactctcattatctcggcaattaaggaagttgggcatgtaaagagattcttcccatcagagtatggtaatgatgtggatcgtaaccatgcagttgaacctgcaaagacagtattcggtgggaaagctcgtataaggcgtgccattgaggctgagggaattccctacacatatgtctcttccaacttctttgctggtcgtttcttgcgaagccttgcgcagattggggtcacggagcctccaactgagaaggttctcattatgggtgatggaaatgtaaaaggagtctttacggcggaagaagacgtgggaacctacactattaaagctgtagatgatccaaggaccctgaacaaaatcctgtatctgaggccaccaagcaacactttgtcccataacgagcttgtctcactctgggagaagaaacttggtaagacacttgagagggtgtacctcccagaagacgaactcctgaagaagattcaagggccgctgagtgtaccactggcaatcagccactctgtctggttgaagggggaccacactaactttgagatcgacccatcatttggagttgaagccactcagctttaccctgatgtgccttacattaccgtggatgaatacctaaataggttcctttaaactcctaaatcctatcgtccccaatattcatatactttgaataaatgttggaggttgtgtatttttattagaatggcacgtgaattacgtaatagtgtgagacctcaatcatgtgaggaatgcatcttgcattcccttgagcttagaatatataaaccgaggttgtataaatttggaaattttagcttgatggaacatgataccgtatgtaacagcccgggggtttacgccaaattagaaattgtttgttattt

SEQ ID NO: 69017 - protein, 335 aa, Triticum aestivum
  peptide (1)..(335): Ceres Seq. ID no. 13598440
  misc_feature (34)..(335): Pfam Name: Isoflavone reductase Pfam Description: Isoflavone reductase
  misc_feature (34)..(335): Homolog of NCBI NO: 3243234 NR Description: isoflavone reductase related protein [Pyrus
IFSENHYILPLRSVLALFYFSALLYMASAAGEGRSRVLVIGGTGYIGRFIVAASAREGHPTAVLVRDAAPADPAKAAVLQGFRDAGVAIVEGDMYDHESLVTAIKSADVVISAVGYQQLPDQTLIISAIKEVGHVKRFFPSEYGNDVDRNHAVEPAKTVFGGKARIRRAIEAEGIPYTYVSSNFFAGRFLRSLAQIGVTEPPTEKVLIMGDGNVKGVFTAEEDVGTYTIKAVDDPRTLNKILYLRPPSNTLSHNELVSLWEKKLGKTLERVYLPEDELLKKIQGPLSVPLAISHSVWLKGDHTNFEIDPSFGVEATQLYPDVPYITVDEYLNRFL

SEQ ID NO: 69018 - protein, 310 aa, Triticum aestivum
  peptide (1)..(310): Ceres Seq. ID no. 13598441
  misc_feature (9)..(310): Pfam Name: Isoflavone reductase Pfam Description: Isoflavone reductase
  misc_feature (9)..(310): Homolog of NCBI NO: 3243234 NR Description: isoflavone reductase related protein [Pyrus
MASAAGEGRSRVLVIGGTGYIGRFIVAASAREGHPTAVLVRDAAPADPAKAAVLQGFRDAGVAIVEGDMYDHESLVTAIKSADVVISAVGYQQLPDQTLIISAIKEVGHVKRFFPSEYGNDVDRNHAVEPAKTVFGGKARIRRAIEAEGIPYTYVSSNFFAGRFLRSLAQIGVTEPPTEKVLIMGDGNVKGVFTAEEDVGTYTIKAVDDPRTLNKILYLRPPSNTLSHNELVSLWEKKLGKTLERVYLPEDELLKKIQGPLSVPLAISHSVWLKGDHTNFEIDPSFGVEATQLYPDVPYITVDEYLNRFL

SEQ ID NO: 69019 - protein, 242 aa, Triticum aestivum
  peptide (1)..(242): Ceres Seq. ID no. 13598442
  misc_feature (1)..(242): Pfam Name: Isoflavone reductase Pfam Description: Isoflavone reductase
  misc_feature (1)..(242): Homolog of NCBI NO: 3243234 NR Description: isoflavone reductase related protein [Pyrus
MYDHESLVTAIKSADVVISAVGYQQLPDQTLIISAIKEVGHVKRFFPSEYGNDVDRNHAVEPAKTVFGGKARIRRAIEAEGIPYTYVSSNFFAGRFLRSLAQIGVTEPPTEKVLIMGDGNVKGVFTAEEDVGTYTIKAVDDPRTLNKILYLRPPSNTLSHNELVSLWEKKLGKTLERVYLPEDELLKKIQGPLSVPLAISHSVWLKGDHTNFEIDPSFGVEATQLYPDVPYITVDEYLNRFL

SEQ ID NO: 69020 - DNA, 1467 bp, Triticum aestivum
  misc_feature (1)..(1467): Ceres Seq. ID no. 13584019
acaatatataccaggttaaaatctactgcgacggacgagtaacgaaaacggaacgacagatcctgcacgggccacataaaatccaacaatatctgaagccccgatctggatctgggggtgaggccgtgggagcgcgatggggatcagtccatcgtcgttgcgacccccatggagctcgcggcgggccgccacgaaggccgcgccccctgctgcgaccgagggcggcggcggcactcccgtccggctgccgctgccgcacgatgtggtcttcgacatcctgtcgtgggtgccggtgaagtcggcgtgccggttcaaatccgtgtgccgggagtggcgcgccctcatcaacgaccctgccttcgtcgccgcgcacaaggctcgcgcggagccgctcctcgccatcgccgccgactcgtgcgacgagccgtcgaccctgcggctcatcgacatggacggccacatcatcaaggtgatcaaaaactctcttccgattttaaggcttgtctgcagcagccctggcaacctgatgtgcgtcatcgggtatgcgctggggatagccagagtgctcaaccttgcaaccggagaggctgctgtgattgaactcacatctaactttatgggcttcggccgcgccgccccgtcgggcgcctacaagattgtctgcgttagtcccggcagcaccgagatcctcacggtaggagacggcgtgtgctggaggcaagctcagcccctgcctagcagcagcatctcgtataacagccgccctgtcgtggtcaggggtgtcatgtacttgattttagtttcacagctcaatggtgacagcgtgatctgcttcgatcttgagagcgaggagtggaagggggggatcagaggcccgccgagtagcgaacgtcagcggtgtgacgctagcttgcaggaactcaacggggccctgtgtatgctcctgccggaggtcggaaacatttaccatggaaccatgagcatatggctcctgatagattcacgcaagggggtctggatcaaggtgtactcgatccccatggacccgtctgcgtatagtctgatcacgcctttgaggatactaggtgataatggtaaactgctcttccatgtcacgcttagcttcgacgaattcgcagtgctgcaaatctacgaccctcgtcatcggacattcacggacgcgcccaaggtgcttgcgggtgacaacggcggcagtatcagcctttgcagcttgcatctggatagttttctgccggccaacgtctagtgctataaattgtacctatgtgctcgtcctggattgttttattgattgaaaaggttaatttctcaaaagaacaaggtcatactactcctttagagttgacggaaactggctatgtgtctccttggaaaacttctcaggtgggtaatattttgatgtggtgtggtgtgcttgacttgaaattggagtatcgtaatcctcag

SEQ ID NO: 69021 - protein, 376 aa, Triticum aestivum
  peptide (1)..(376): Ceres Seq. ID no. 13584020
  misc_feature (36)..(81): Pfam Name: F-box domain Pfam Description: F-box domain
  misc_feature (17)..(154): Homolog of NCBI NO: 33146635 NR Description: unknown protein [Oryza sativa (japonica
  misc_feature (17)..(154): Homolog of NCBI NO: 34900696 NR Description: hypothetical protein~predicted by FGENESH etc.
  misc_feature (6)..(302): Homolog of NCBI NO: 38346527 NR Description: OSJNBa0040D17.2 [Oryza sativa (japonica
  misc_feature (39)..(184): Homolog of NCBI NO: 34900700 NR Description: hypothetical protein~predicted by GeneMark.hmm
  misc_feature (14)..(187): Homolog of NCBI NO: 34393278 NR Description: hypothetical protein [Oryza sativa (japonica
  misc_feature (3)..(152): Homolog of NCBI NO: 34394081 NR Description: hypothetical protein [Oryza sativa (japonica
  misc_feature (21)..(175): Homolog of NCBI NO: 28411801 NR Description: OJ1559_F09.9 [Oryza sativa (japonica
  misc_feature (164)..(348): Homolog of NCBI NO: 28411801 NR Description: OJ1559_F09.9 [Oryza sativa (japonica
MGISPSSLRPPWSSRRAATKAAPPAATEGGGGTPVRLPLPHDVVFDILSWVPVKSACRFKSVCREWRALINDPAFVAAHKARAEPLLAIAADSCDEPSTLRLIDMDGHIIKVIKNSLPILRLVCSSPGNLMCVIGYALGIARVLNLATGEAAVIELTSNFMGFGRAAPSGAYKIVCVSPGSTEILTVGDGVCWRQAQPLPSSSISYNSRPVVVRGVMYLILVSQLNGDSVICFDLESEEWKGGIRGPPSSERQRCDASLQELNGALCMLLPEVGNIYHGTMSIWLLIDSRKGVWIKVYSIPMDPSAYSLITPLRILGDNGKLLFHVTLSFDEFAVLQIYDPRHRTFTDAPKVLAGDNGGSISLCSLHLDSFLPANV

SEQ ID NO: 69022 - protein, 272 aa, Triticum aestivum
  peptide (1)..(272): Ceres Seq. ID no. 13584021
  misc_feature (1)..(50): Homolog of NCBI NO: 33146635 NR Description: unknown protein [Oryza sativa (japonica
  misc_feature (1)..(50): Homolog of NCBI NO: 34900696 NR Description: hypothetical protein~predicted by FGENESH etc.
  misc_feature (1)..(198): Homolog of NCBI NO: 38346527 NR Description: OSJNBa0040D17.2 [Oryza sativa (japonica
  misc_feature (1)..(80): Homolog of NCBI NO: 34900700 NR Description: hypothetical protein~predicted by GeneMark.hmm
  misc_feature (1)..(83): Homolog of NCBI NO: 34393278 NR Description: hypothetical protein [Oryza sativa (japonica
  misc_feature (1)..(48): Homolog of NCBI NO: 34394081 NR Description: hypothetical protein [Oryza sativa (japonica
  misc_feature (1)..(71): Homolog of NCBI NO: 28411801 NR Description: OJ1559_F09.9 [Oryza sativa (japonica
  misc_feature (60)..(244): Homolog of NCBI NO: 28411801 NR Description: OJ1559_F09.9 [Oryza sativa (japonica
MDGHIIKVIKNSLPILRLVCSSPGNLMCVIGYALGIARVLNLATGEAAVIELTSNFMGFGRAAPSGAYKIVCVSPGSTEILTVGDGVCWRQAQPLPSSSISYNSRPVVVRGVMYLILVSQLNGDSVICFDLESEEWKGGIRGPPSSERQRCDASLQELNGALCMLLPEVGNIYHGTMSIWLLIDSRKGVWIKVYSIPMDPSAYSLITPLRILGDNGKLLFHVTLSFDEFAVLQIYDPRHRTFTDAPKVLAGDNGGSISLCSLHLDSFLPANV

SEQ ID NO: 69023 - protein, 246 aa, Triticum aestivum
  peptide (1)..(246): Ceres Seq. ID no. 13584022
  misc_feature (1)..(24): Homolog of NCBI NO: 33146635 NR Description: unknown protein [Oryza sativa (japonica
  misc_feature (1)..(24): Homolog of NCBI NO: 34900696 NR Description: hypothetical protein~predicted by FGENESH etc.
  misc_feature (1)..(172): Homolog of NCBI NO: 38346527 NR Description: OSJNBa0040D17.2 [Oryza sativa (japonica
  misc_feature (1)..(54): Homolog of NCBI NO: 34900700 NR Description: hypothetical protein~predicted by GeneMark.hmm
  misc_feature (1)..(57): Homolog of NCBI NO: 34393278 NR Description: hypothetical protein [Oryza sativa (japonica
  misc_feature (1)..(22): Homolog of NCBI NO: 34394081 NR Description: hypothetical protein [Oryza sativa (japonica
  misc_feature (1)..(45): Homolog of NCBI NO: 28411801 NR Description: OJ1559_F09.9 [Oryza sativa (japonica
  misc_feature (34)..(218): Homolog of NCBI NO: 28411801 NR Description: OJ1559_F09.9 [Oryza sativa (japonica
MCVIGYALGIARVLNLATGEAAVIELTSNFMGFGRAAPSGAYKIVCVSPGSTEILTVGDGVCWRQAQPLPSSSISYNSRPVVVRGVMYLILVSQLNGDSVICFDLESEEWKGGIRGPPSSERQRCDASLQELNGALCMLLPEVGNIYHGTMSIWLLIDSRKGVWIKVYSIPMDPSAYSLITPLRILGDNGKLLFHVTLSFDEFAVLQIYDPRHRTFTDAPKVLAGDNGGSISLCSLHLDSFLPANV

SEQ ID NO: 69024 - DNA, 1381 bp, Triticum aestivum
  misc_feature (1)..(1381): Ceres Seq. ID no. 13598443
agagcaaaatcgcactctcgctttccaacacaactccctcggcagtatcgcctagtgtagcagcgcctccgttccggccagctctgctcgccgagccggccatgatgctgctgctcgcgcgcagcctccgctcccgcgtccggccccccctcgcctccgccgttagcgccgctcccttctcatcggtatcggcggccgcggcggaggcagagcgggcggtgcgggacgggcccaggaacgactggacccgtcccgagatccaggccatctacgactccccgctcctcgacctcctcttccacggggctcaggtccataggaatgtccataaatttagagaagtgcagcaatgcacacttctttcaataaagactggtgggtgcagcgaagattgttcatactgcccacagtcttcaagatacagtactggattgaaggccgagaaattaatgaagaaagatgctgtcctagaagcagcaaaaaaggcaaagcaggctgggagcacccggttttgcatgggagccgcatggagagagacaattggcaggaaaacaaatttcaaccagattcttgaatatgtcaaggacataagaggtatgggcatggaggtctgttgcaccctgggtatgctagagaaacaacaagctgaagaactcaagaaggctggacttacagcttataatcataacctagatacatcaagggaatattaccccaacattatttctacaagatcgtacgatgatagattacagactcttcagcacgtccgtgaagctggaataagcgtctgctcaggtggaattattggtcttggagaggcggaggaagaccgtgtagggctgttgcatacactggccactttgccaacacacccagagagcgttcctatcaatgcattgattgctgtcaaaggcacgcctcttcaggatcagaagcctgtagagatatgggaaatgatccgcatgattgccagcgctcggattgtgatgccaaaggcaatggtgagactttcggcagggcgagtacggttctccatgccagaacaagctctctgctttctcgctggggccaactcgatcttcgccggtgaaaagctcctgacaactgcgaacaatgactttgatgcggaccaggcaatgttcaagatccttggcctgattcccaaggctccaaactttggcgatgaagaggccacggtagcagcacccacggagagatgtgagcaagccgcttcgatgtaaaatgccgctatagattctcaagaccatatccggtgcaaaactggcaccattatctccagctagagctttgtactgtagagatcatgatattttgtagtaacttcagattcatcgaaataaaatagggggttctctgc

SEQ ID NO: 69025 - protein, 413 aa, Triticum aestivum
  peptide (1)..(413): Ceres Seq. ID no. 15222344
  misc_feature (121)..(285): Pfam Name: Radical SAM superfamily Pfam Description: Radical SAM superfamily
  misc_feature (77)..(388): Homolog of NCBI NO: 11596108 NR Description: biotin synthase short form [Pichia jadinii]
  misc_feature (77)..(388): Homolog of NCBI NO: 11596107 NR Description: biotin synthase long form [Pichia jadinii]
  misc_feature (76)..(403): Homolog of NCBI NO: 23127772 NR Description: hypothetical protein [Nostoc punctiforme]
  misc_feature (78)..(386): Homolog of NCBI NO: 2961328 NR Description: Biotin synthase [Schizosaccharomyces pombe]
  misc_feature (78)..(386): Homolog of NCBI NO: 19075228 NR Description: biotin synthase (EC 2.8.1.6) [Schizosaccharomyces
  misc_feature (34)..(411): Homolog of NCBI NO: 40738982 NR Description: hypothetical protein AN6643.2 [Aspergillus
  misc_feature (78)..(389): Homolog of NCBI NO: 23135112 NR Description: hypothetical protein [Cytophaga hutchinsonii]
  misc_feature (36)..(412): Homolog of NCBI NO: 28392925 NR Description: putative biotin synthase (Bio B) [Arabidopsis
  misc_feature (36)..(412): Homolog of NCBI NO: 15224273 NR Description: biotin synthase (BioB) (BIO2) [Arabidopsis
  misc_feature (35)..(413): Homolog of NCBI NO: 38175566 NR Description: putative biotin synthase [Oryza sativa (japonica
SKIALSLSNTTPSAVSPSVAAPPFRPALLAEPAMMLLLARSLRSRVRPPLASAVSAAPFSSVSAAAAEAERAVRDGPRNDWTRPEIQAIYDSPLLDLLFHGAQVHRNVHKFREVQQCTLLSIKTGGCSEDCSYCPQSSRYSTGLKAEKLMKKDAVLEAAKKAKQAGSTRFCMGAAWRETIGRKTNFNQILEYVKDIRGMGMEVCCTLGMLEKQQAEELKKAGLTAYNHNLDTSREYYPNIISTRSYDDRLQTLQHVREAGISVCSGGIIGLGEAEEDRVGLLHTLATLPTHPESVPINALIAVKGTPLQDQKPVEIWEMIRMIASARIVMPKAMVRLSAGRVRFSMPEQALCFLAGANSIFAGEKLLTTANNDFDADQAMFKILGLIPKAPNFGDEEATVAAPTERCEQAASM

SEQ ID NO: 69026 - protein, 380 aa, Triticum aestivum
  peptide (1)..(380): Ceres Seq. ID no. 15222345
  misc_feature (88)..(252): Pfam Name: Radical SAM superfamily Pfam Description: Radical SAM superfamily
  misc_feature (44)..(355): Homolog of NCBI NO: 11596108 NR Description: biotin synthase short form [Pichia jadinii]
  misc_feature (44)..(355): Homolog of NCBI NO: 11596107 NR Description: biotin synthase long form [Pichia jadinii]
  misc_feature (43)..(370): Homolog of NCBI NO: 23127772 NR Description: hypothetical protein [Nostoc punctiforme]
  misc_feature (45)..(353): Homolog of NCBI NO: 2961328 NR Description: Biotin synthase [Schizosaccharomyces pombe]
  misc_feature (45)..(353): Homolog of NCBI NO: 19075228 NR Description: biotin synthase (EC 2.8.1.6) [Schizosaccharomyces
  misc_feature (1)..(378): Homolog of NCBI NO: 40738982 NR Description: hypothetical protein AN6643.2 [Aspergillus
  misc_feature (45)..(356): Homolog of NCBI NO: 23135112 NR Description: hypothetical protein [Cytophaga hutchinsonii]
  misc_feature (3)..(379): Homolog of NCBI NO: 28392925 NR Description: putative biotin synthase (Bio B) [Arabidopsis
  misc_feature (3)..(379): Homolog of NCBI NO: 15224273 NR Description: biotin synthase (BioB) (BIO2) [Arabidopsis
  misc_feature (2)..(380): Homolog of NCBI NO: 38175566 NR Description: putative biotin synthase [Oryza sativa (japonica
MMLLLARSLRSRVRPPLASAVSAAPFSSVSAAAAEAERAVRDGPRNDWTRPEIQAIYDSPLLDLLFHGAQVHRNVHKFREVQQCTLLSIKTGGCSEDCSYCPQSSRYSTGLKAEKLMKKDAVLEAAKKAKQAGSTRFCMGAAWRETIGRKTNFNQILEYVKDIRGMGMEVCCTLGMLEKQQAEELKKAGLTAYNHNLDTSREYYPNIISTRSYDDRLQTLQHVREAGISVCSGGIIGLGEAEEDRVGLLHTLATLPTHPESVPINALIAVKGTPLQDQKPVEIWEMIRMIASARIVMPKAMVRLSAGRVRFSMPEQALCFLAGANSIFAGEKLLTTANNDFDADQAMFKILGLIPKAPNFGDEEATVAAPTERCEQAASM

SEQ ID NO: 69027 - protein, 379 aa, Triticum aestivum
  peptide (1)..(379): Ceres Seq. ID no. 15222346
  misc_feature (87)..(251): Pfam Name: Radical SAM superfamily Pfam Description: Radical SAM superfamily
  misc_feature (43)..(354): Homolog of NCBI NO: 11596108 NR Description: biotin synthase short form [Pichia jadinii]
  misc_feature (43)..(354): Homolog of NCBI NO: 11596107 NR Description: biotin synthase long form [Pichia jadinii]
  misc_feature (42)..(369): Homolog of NCBI NO: 23127772 NR Description: hypothetical protein [Nostoc punctiforme]
  misc_feature (44)..(352): Homolog of NCBI NO: 2961328 NR Description: Biotin synthase [Schizosaccharomyces pombe]
  misc_feature (44)..(352): Homolog of NCBI NO: 19075228 NR Description: biotin synthase (EC 2.8.1.6) [Schizosaccharomyces
  misc_feature (1)..(377): Homolog of NCBI NO: 40738982 NR Description: hypothetical protein AN6643.2 [Aspergillus
  misc_feature (44)..(355): Homolog of NCBI NO: 23135112 NR Description: hypothetical protein [Cytophaga hutchinsonii]
  misc_feature (2)..(378): Homolog of NCBI NO: 28392925 NR Description: putative biotin synthase (Bio B) [Arabidopsis
  misc_feature (2)..(378): Homolog of NCBI NO: 15224273 NR Description: biotin synthase (BioB) (BIO2) [Arabidopsis
  misc_feature (1)..(379): Homolog of NCBI NO: 38175566 NR Description: putative biotin synthase [Oryza sativa (japonica
MLLLARSLRSRVRPPLASAVSAAPFSSVSAAAAEAERAVRDGPRNDWTRPEIQAIYDSPLLDLLFHGAQVHRNVHKFREVQQCTLLSIKTGGCSEDCSYCPQSSRYSTGLKAEKLMKKDAVLEAAKKAKQAGSTRFCMGAAWRETIGRKTNFNQILEYVKDIRGMGMEVCCTLGMLEKQQAEELKKAGLTAYNHNLDTSREYYPNIISTRSYDDRLQTLQHVREAGISVCSGGIIGLGEAEEDRVGLLHTLATLPTHPESVPINALIAVKGTPLQDQKPVEIWEMIRMIASARIVMPKAMVRLSAGRVRFSMPEQALCFLAGANSIFAGEKLLTTANNDFDADQAMFKILGLIPKAPNFGDEEATVAAPTERCEQAASM

SEQ ID NO: 69028 - DNA, 1305 bp, Triticum aestivum
  misc_feature (1)..(1305): Ceres Seq. ID no. 15179764
aaagccggtcagacgacgtctgaagcagaggaggaggagacaggattgaggaacccgcgagacgaagcaggaagccagaggcgctctccaatccaagcatgtaagcgagctaatcgatcctcttccgttcttccgcgcatcctgcgattaaccctcacgctgtcttacccatgtgccatccagtccgccggtgtttctatttctcaagaatttgcgttctttttgttcttgttggcaggaggtcgtcgattaaccggccgccgacgccgaacgatgacgacgaggaggaggaggaggtagggaaggaggcttctctcggagacatcatcaacctcaagttggtggagagcggcgagaaggagcggctgatggagcttctccgggagcggctcgtagagtgcggctggagggatgacatgaaggctctctgcagggcttatgcaaggaaaaagggaagaaataatgtaacattagatgatcttattcatgttattactccaaaaggaagaggtcagtgattttcatttgtccagttaatttatttctggttgcaagaggtatgttacttagttccagcgcacattagatacgagttggaagaattgttataaaataatataaccatggcttgcatatgtccatctttgcgtaagtgtcaagcaagggaaaaagtagtgcctaaactcccaagtcaattgcttccttactgtaacaggatctgggacaaaattttggagaacgttctttttttgcacctgcttctcgcctcctatgtttgccatagatttgtgcattttttgtcaataacaatgatgctaagccctaagcaaatgtttctttcatttgtgttggttcttgttgcacgattatcattttctcctgcttctgaaacagcctcggtgcccgatgcggtgaaggcagagctgctgcagcgcatccgatcctttctcatgtcttcctcgctttggtagcccatgaatcacgccgatcggaaggcacgtgtaggaagcttgaagcatcgatcttgaacgcgtgacacttcagagaagcagcaaatatcgacataaaacggatctggtgctgtggatgtgtttcctggtcaggcatgtggttggccctgttctctgactgcaccatcaccacactgtatttgtagcgctacagtgcgcggtctcttcgatgccacttggtaatcttaattagagaactcagaatcaatgcgtctggtagtactcgcgtatctcatgtcaaacctgattgagtgatcctcatgagggaccaacaagaacagacgccacttttgtc

SEQ ID NO: 69029 - protein, 115 aa, Triticum aestivum
  peptide (1)..(115): Ceres Seq. ID no. 15179765
  misc_feature (91)..(114): Homolog of NCBI NO: 30688637 NR Description: expressed protein [Arabidopsis thaliana]
MACICPSLRKCQAREKVVPKLPSQLLPYCNRIWDKILENVLFLHLLLASYVCHRFVHFLSITMMLSPKQMFLSFVLVLVARLSFSPASETASVPDAVKAELLQRIRSFLMSSSLW

SEQ ID NO: 69030 - protein, 115 aa, Triticum aestivum
  peptide (1)..(115): Ceres Seq. ID no. 15179766
  misc_feature (58)..(113): Homolog of NCBI NO: 17864496 NR Description: enhancer of yellow 2 CG15191-PA [Drosophila
  misc_feature (42)..(113): Homolog of NCBI NO: 38086720 NR Description: similar to DC6 protein
  misc_feature (24)..(90): Homolog of NCBI NO: 9279634 NR Description: gene_id:MOJ10.18~unknown protein [Arabidopsis
  misc_feature (42)..(113): Homolog of NCBI NO: 9910186 NR Description: DC6 protein [Homo sapiens]
  misc_feature (37)..(113): Homolog of NCBI NO: 34866121 NR Description: similar to DC6 protein [Rattus norvegicus]
  misc_feature (25)..(91): Homolog of NCBI NO: 19386734 NR Description: P0678F11.23 [Oryza sativa (japonica
  misc_feature (24)..(113): Homolog of NCBI NO: 30688637 NR Description: expressed protein [Arabidopsis thaliana]
MCHPVRRCFYFSRICVLFVLVGRRSSINRPPTPNDDDEEEEEVGKEASLGDIINLKLVESGEKERLMELLRERLVECGWRDDMKALCRAYARKKGRNNVTLDDLIHVITPKGRGQ

SEQ ID NO: 69031 - protein, 99 aa, Triticum aestivum
  peptide (1)..(99): Ceres Seq. ID no. 15179767
KAGQTTSEAEEEETGLRNPRDEAGSQRRSPIQACKRANRSSSVLPRILRLTLTLSYPCAIQSAGVSISQEFAFFLFLLAGGRRLTGRRRRTMTTRRRRR

SEQ ID NO: 69032 - DNA, 644 bp, Triticum aestivum
  misc_feature (1)..(644): Ceres Seq. ID no. 13598755
ccccatcgccgcctcatcgccgccaggagttcgagttccccccgaaccgtcgccatggctgccgcaccagtcatgtgagcaggccaagtcccggcgcagaatctactgcgcttcattctcgattaaattattcgaatcgtttctccgttgtgttgtttttaacttggtgtttgtttctctactccaacgtgcgcagctccccgaaagaaaatctgcccccttcgctgacctccacctccgagccccctccactcttcgacggcaccaccaggttgtatgttgcatatcactgcccatatgcgcagcgcgcttggattgccaggaactacaagggtttgcaagacaagatcaagatagtcgggatcgatctcgcagacaggccggcttggtacaaggagaaggtttacccacagaacaaggtgccttcactggagcataacaacgaggtgaaaggagaaagcttggatttggtcaagtacattgacagcaatttcgatggcccagcattgctccccgatgattctgcaaagaagcagtttgccgaggagctgcttgtgtacatcgatgagttcaataaagcactatactcatccataacctccaagggagatgtggcagaggaaactgttgctgcgctggataaa

SEQ ID NO: 69033 - protein, 214 aa, Triticum aestivum
  peptide (1)..(214): Ceres Seq. ID no. 13598756
  misc_feature (63)..(213): Homolog of NCBI NO: 7489703 NR Description: safener-induced In2.1-like protein - wheat
  misc_feature (65)..(213): Homolog of NCBI NO: 1352460 NR Description: IN2-1 PROTEIN
  misc_feature (64)..(213): Homolog of NCBI NO: 24796810 NR Description: putative glutathione S-transferase
  misc_feature (64)..(213): Homolog of NCBI NO: 7939638 NR Description: XIG [Oryza sativa]
  misc_feature (65)..(213): Homolog of NCBI NO: 24796806 NR Description: putative glutathione S-transferase
PSPPHRRQEFEFPPNRRHGCRTSHVSRPSPGAESTALHSRLNYSNRFSVVLFLTWCLFLYSNVRSSPKENLPPSLTSTSEPPPLFDGTTRLYVAYHCPYAQRAWIARNYKGLQDKIKIVGIDLADRPAWYKEKVYPQNKVPSLEHNNEVKGESLDLVKYIDSNFDGPALLPDDSAKKQFAEELLVYIDEFNKALYSSITSKGDVAEETVAALDK

SEQ ID NO: 69034 - protein, 145 aa, Triticum aestivum
  peptide (1)..(145): Ceres Seq. ID no. 13598757
PIAASSPPGVRVPPEPSPWLPHQSCEQAKSRRRIYCASFSIKLFESFLRCVVFNLVFVSLLQRAQLPERKSAPFADLHLRAPSTLRRHHQVVCCISLPICAARLDCQELQGFARQDQDSRDRSRRQAGLVQGEGLPTEQGAFTGA

SEQ ID NO: 69035 - DNA, 2084 bp, Triticum aestivum
  misc_feature (1)..(2084): Ceres Seq. ID no. 13655463
acgcgaaagcgaagccctgttgagattaaagggggaaaataaacccaaaccactcgccgaacagtacaccaacccccaccccccatccccgccgcccctgaccggcgccatggccgccgccggagagcggcgcctcctcgtcggcctcctcctcctggcccttatggtctcggcgcactgcctggacggcgcgggccaccacggcccgcgcgtgaagcggcgccgcaagaagcgcgagatccactcccccgtcaagacggtggtggtggtggtcatggagaaccgcagcttcgaccacgtcctcggctggctccgcgcctcccgccccgacatcgacgggctcaccggcacggagtccaaccgcctcaacgcgtccgacccctcctccccggagatcttcgtcaccgacaaggccggctacgtcgactcggaccccggccacggcttcgaggacatccgcgagcagatcttcggctccgccgacacctccgccgtgccgccccccatgtcgggcttcgcgcagaacgcgcgcgggatgggcctcggcatggcgcagaacgtcatgagcggattcgcgcccgactccgtccccgtctacgccgccctcgccgacgagttcgccgtcttcgaccgctggttcgcgtcggtgcccacctccacccagcccaaccggctcttcgtccactcggccacctcccacggcctcaccttcaacgcgcgcaaggacctcatcaacggcttcccgcagaagaccatcttcgacagcctcgaggaggacggcctctccttcggcatctactaccagaacatccccgccacgctcttctaccagagcctgcgccgcctcaagcacctcctcaagttccaccagtacagcctcaggttcaagctcgacgccgccaggggcaagctgcccaattacgtcgtcatcgagcagcgctacttcgattgcaaggagttccccgccaacgacgaccacccgtcgcacgacgttgccaggggacagaggtttgtcaaggaggtctacgagacgctgcgggcgagcccgcagtggaacgagacggctctcatcatcacctatgatgagcatggtggcttctatgaccatgtccccacgcccgtcgtcaaagtgcctcagcctgatgggattattggccctgacccttactacttcaagtttgatcggctcggggtgcgcgtgcccagcttcctcatctcaccctgggttgagaagggcaccgtgatccatgaaccaaatggtcctgagggaacctcacaatatgagcattcatccatccctgcgacagtaaagaagctatttaatttacgtgctaactacctgacaaagagggattcatgggctgggacctttgagagctacctcaaagtccgaaagacaccaagaactgattgtccagagaaactcccagaggttacaaagtccctgcgaccatttggtgctaatgaagataaatctctatcggagtttcaagtggagttgattcaacttgcctctcagctcaatggtgaccacgtgctcaacagctatccggatattggcaagacgatgagtgtaggcgaagcaaaccgctacgcagaggatgctgtctccagattcctggaggctggaaggatcgctcttagggctggtgcaaacgaatctgctctggtgacaatgaggcccgcgctcaccagcagagccgcaatgtccaccggcttgtcatctgaactctgatggactgttactggatactgccaacagattctgcatcacgattaccggcgctacatgggctgcaagagtacggtagcatttatgtaatgggtattagatcttgcacatggattttttgtacatatacgccatgatacttcgtatctgaagcttacttcagcgggccctcgtggtttacgctcaggagtatcacccaacgacgcaccagatgcatgccaaattccccttccggataagctgtagctggtgttgtacctattcagctctctactgtacctgcttgtatagcagttgaactgcatcgtaaggagtattgtactatgaatgattgttggatttggccacctgt

SEQ ID NO: 69036 - protein, 577 aa, Triticum aestivum
  peptide (1)..(577): Ceres Seq. ID no. 15219740
  misc_feature (84)..(460): Pfam Name: Phosphoesterase family Pfam Description: Phosphoesterase family
  misc_feature (84)..(575): Homolog of NCBI NO: 27573343 NR Description: putative phosphoesterase [Oryza sativa (japonica
  misc_feature (83)..(557): Homolog of NCBI NO: 18396577 NR Description: phosphoesterase family [Arabidopsis thaliana]
  misc_feature (82)..(564): Homolog of NCBI NO: 17529016 NR Description: unknown protein [Arabidopsis thaliana]
  misc_feature (82)..(564): Homolog of NCBI NO: 15228577 NR Description: phosphoesterase family [Arabidopsis thaliana]
  misc_feature (82)..(566): Homolog of NCBI NO: 30693062 NR Description: phosphoesterase family [Arabidopsis thaliana]
  misc_feature (82)..(568): Homolog of NCBI NO: 20161866 NR Description: B1139B11.7 [Oryza sativa (japonica
  misc_feature (82)..(566): Homolog of NCBI NO: 15225806 NR Description: phosphoesterase family [Arabidopsis thaliana]
  misc_feature (43)..(572): Homolog of NCBI NO: 15222342 NR Description: phosphoesterase family [Arabidopsis thaliana]
  misc_feature (43)..(572): Homolog of NCBI NO: 21703147 NR Description: At1g07230/F10K1_4 [Arabidopsis thaliana]
  misc_feature (35)..(577): Homolog of NCBI NO: 34897344 NR Description: putative phospholipase [Oryza sativa]
RESEALLRLKGENKPKPLAEQYTNPHPPSPPPLTGAMAAAGERRLLVGLLLLALMVSAHCLDGAGHHGPRVKRRRKKREIHSPVKTVVVVVMENRSFDHVLGWLRASRPDIDGLTGTESNRLNASDPSSPEIFVTDKAGYVDSDPGHGFEDIREQIFGSADTSAVPPPMSGFAQNARGMGLGMAQNVMSGFAPDSVPVYAALADEFAVFDRWFASVPTSTQPNRLFVHSATSHGLTFNARKDLINGFPQKTIFDSLEEDGLSFGIYYQNIPATLFYQSLRRLKHLLKFHQYSLRFKLDAARGKLPNYVVIEQRYFDCKEFPANDDHPSHDVARGQRFVKEVYETLRASPQWNETALIITYDEHGGFYDHVPTPVVKVPQPDGIIGPDPYYFKFDRLGVRVPSFLISPWVEKGTVIHEPNGPEGTSQYEHSSIPATVKKLFNLRANYLTKRDSWAGTFESYLKVRKTPRTDCPEKLPEVTKSLRPFGANEDKSLSEFQVELIQLASQLNGDHVLNSYPDIGKTMSVGEANRYAEDAVSRFLEAGRIALRAGANESALVTMRPALTSRAAMSTGLSSEL

SEQ ID NO: 69037 - protein, 541 aa, Triticum aestivum
  peptide (1)..(541): Ceres Seq. ID no. 15219741
  misc_feature (48)..(424): Pfam Name: Phosphoesterase family Pfam Description: Phosphoesterase family
  misc_feature (48)..(539): Homolog of NCBI NO: 27573343 NR Description: putative phosphoesterase [Oryza sativa (japonica
  misc_feature (47)..(521): Homolog of NCBI NO: 18396577 NR Description: phosphoesterase family [Arabidopsis thaliana]
  misc_feature (46)..(528): Homolog of NCBI NO: 17529016 NR Description: unknown protein [Arabidopsis thaliana]
  misc_feature (46)..(528): Homolog of NCBI NO: 15228577 NR Description: phosphoesterase family [Arabidopsis thaliana]
  misc_feature (46)..(530): Homolog of NCBI NO: 30693062 NR Description: phosphoesterase family [Arabidopsis thaliana]
  misc_feature (46)..(532): Homolog of NCBI NO: 20161866 NR Description: B1139B11.7 [Oryza sativa (japonica
  misc_feature (46)..(530): Homolog of NCBI NO: 15225806 NR Description: phosphoesterase family [Arabidopsis thaliana]
  misc_feature (7)..(536): Homolog of NCBI NO: 15222342 NR Description: phosphoesterase family [Arabidopsis thaliana]
  misc_feature (7)..(536): Homolog of NCBI NO: 21703147 NR Description: At1g07230/F10K1_4 [Arabidopsis thaliana]
  misc_feature (1)..(541): Homolog of NCBI NO: 34897344 NR Description: putative phospholipase [Oryza sativa]
MAAAGERRLLVGLLLLALMVSAHCLDGAGHHGPRVKRRRKKREIHSPVKTVVVVVMENRSFDHVLGWLRASRPDIDGLTGTESNRLNASDPSSPEIFVTDKAGYVDSDPGHGFEDIREQIFGSADTSAVPPPMSGFAQNARGMGLGMAQNVMSGFAPDSVPVYAALADEFAVFDRWFASVPTSTQPNRLFVHSATSHGLTFNARKDLINGFPQKTIFDSLEEDGLSFGIYYQNIPATLFYQSLRRLKHLLKFHQYSLRFKLDAARGKLPNYVVIEQRYFDCKEFPANDDHPSHDVARGQRFVKEVYETLRASPQWNETALIITYDEHGGFYDHVPTPVVKVPQPDGIIGPDPYYFKFDRLGVRVPSFLISPWVEKGTVIHEPNGPEGTSQYEHSSIPATVKKLFNLRANYLTKRDSWAGTFESYLKVRKTPRTDCPEKLPEVTKSLRPFGANEDKSLSEFQVELIQLASQLNGDHVLNSYPDIGKTMSVGEANRYAEDAVSRFLEAGRIALRAGANESALVTMRPALTSRAAMSTGLSSEL

SEQ ID NO: 69038 - protein, 523 aa, Triticum aestivum
  peptide (1)..(523): Ceres Seq. ID no. 15219742
  misc_feature (30)..(406): Pfam Name: Phosphoesterase family Pfam Description: Phosphoesterase family
  misc_feature (30)..(521): Homolog of NCBI NO: 27573343 NR Description: putative phosphoesterase [Oryza sativa (japonica
  misc_feature (29)..(503): Homolog of NCBI NO: 18396577 NR Description: phosphoesterase family [Arabidopsis thaliana]
  misc_feature (28)..(510): Homolog of NCBI NO: 17529016 NR Description: unknown protein [Arabidopsis thaliana]
  misc_feature (28)..(510): Homolog of NCBI NO: 15228577 NR Description: phosphoesterase family [Arabidopsis thaliana]
  misc_feature (28)..(512): Homolog of NCBI NO: 30693062 NR Description: phosphoesterase family [Arabidopsis thaliana]
  misc_feature (28)..(514): Homolog of NCBI NO: 20161866 NR Description: B1139B11.7 [Oryza sativa (japonica
  misc_feature (28)..(512): Homolog of NCBI NO: 15225806 NR Description: phosphoesterase family [Arabidopsis thaliana]
  misc_feature (1)..(518): Homolog of NCBI NO: 15222342 NR Description: phosphoesterase family [Arabidopsis thaliana]
  misc_feature (1)..(518): Homolog of NCBI NO: 21703147 NR Description: At1g07230/F10K1_4 [Arabidopsis thaliana]
  misc_feature (1)..(523): Homolog of NCBI NO: 34897344 NR Description: putative phospholipase [Oryza sativa]
MVSAHCLDGAGHHGPRVKRRRKKREIHSPVKTVVVVVMENRSFDHVLGWLRASRPDIDGLTGTESNRLNASDPSSPEIFVTDKAGYVDSDPGHGFEDIREQIFGSADTSAVPPPMSGFAQNARGMGLGMAQNVMSGFAPDSVPVYAALADEFAVFDRWFASVPTSTQPNRLFVHSATSHGLTFNARKDLINGFPQKTIFDSLEEDGLSFGIYYQNIPATLFYQSLRRLKHLLKFHQYSLRFKLDAARGKLPNYVVIEQRYFDCKEFPANDDHPSHDVARGQRFVKEVYETLRASPQWNETALIITYDEHGGFYDHVPTPVVKVPQPDGIIGPDPYYFKFDRLGVRVPSFLISPWVEKGTVIHEPNGPEGTSQYEHSSIPATVKKLFNLRANYLTKRDSWAGTFESYLKVRKTPRTDCPEKLPEVTKSLRPFGANEDKSLSEFQVELIQLASQLNGDHVLNSYPDIGKTMSVGEANRYAEDAVSRFLEAGRIALRAGANESALVTMRPALTSRAAMSTGLSSEL

SEQ ID NO: 69039 - DNA, 1736 bp, Triticum aestivum
  misc_feature (1)..(1736): Ceres Seq. ID no. 12593464
actgctattgttggccatggccgcctatgctgggctgttgcgcgtcgccctcgtcctcatcgccgccgccgcgacctgggcggcggcgctagacgacccggcggggcttctgcgacgggccaaggaggcggagttcatggactggatggtgggggtgcgccggcggatccacgagaaccctgagctcggctacgaggagtttgacaccagtgagctcgtgcggcgcgagctcgatgccatggggatcccctacaggcatcccttcgcggtcaccggcgtcgtcgccaccgtcggcacaggcggcccgcccttcgtcgcgcttcgggccgacatggacgcgctccctatgcaggaaagcgtggaatgggaacataagagcaaagtgcctgggaagatgcatggatgtggccatgatgcacatgttgctatgctattgggttctgctaagattcttcaggagcaccgtgacgagttgaagggtactgtagcccttcttttccaaccagctgaggaaggtggtggtggagccaagaaaatggtagaagccggagctgtggaaaacatagaggtcatgtttggacttcatgtagctgacagtgtgccgattggtgtgctggcatccagacctgggcctataatggcagggagtggattctttgaggcagtaataagtggaaagggagggcatgctgcacttcctcatcacactattgatccaatactggctgcatccaatgttattgtaagccttcagcaacttgtttcccgagaagctgaccccttggactcacaggtagtaacggttggaaagtttcaaggtggtggagccttcaatgttatccctgattcagtgacaataggtggtaccttccgagcctttatgaaggagagttttaatcaattgaagcagcgaattgaagaggtcatagtcacacaggcatctgtccagcgctgcagcgcagttgtggacttccttgacaaagataagcctttcttccctccaacaatcaacaatcctgagcttcacgatttctttgcgaaggtgtgcagtgagatggttggccccaacaacgtgagagagaagcagccactgatgggtgccgaggacttctccttctacaccgaggccgttcccaagacatactactactttgtggggatgctcaacgagactcgtggaccgcaggcgcctcatcactccccctacttcaccatcaacgaggatgcactgccctacggtgcagccatgcaagcatcgttggctgctcgctatctgcttgagcaccagcccgctaccgctgctaaggtggaacctcgcgacgagctgtagatggtgtccatgttgaatgaaacggtggaaggacaaggacgtgcacagcaattgttggttaaaaagggacgaggacctctgtatcgccaggtgattatgcaactgtttgtacataatttcctgatttcagcgcattccaagcgagcagatgaccttgtgacggcattgaagcactgcgaacatgtgtttctgtggtaggtctcgttcgttttcgcatctgcacttatccgggtctatgtgtaatctttaagtgcagtggtgagacaaaataaaacaccccgtggatgatgaatgtattgggttgttaagagttgggacagacaggaattttatagcatgattccatcctttagtagcaagaaatggtcgaaaatatattccagcaaaaagaaaaaagaaacggttg

SEQ ID NO: 69040 - protein, 442 aa, Triticum aestivum
  peptide (1)..(442): Ceres Seq. ID no. 12593465
  misc_feature (47)..(426): Pfam Name: Peptidase family M20/M25/M40 Pfam Description: Peptidase family M20/M25/M40
  misc_feature (13)..(425): Homolog of NCBI NO: 15241892 NR Description: IAA-amino acid hydrolase homolog 1 precursor
  misc_feature (13)..(427): Homolog of NCBI NO: 18175667 NR Description: IAA-amino acid hydrolase [Arabidopsis thaliana]
  misc_feature (13)..(427): Homolog of NCBI NO: 15241894 NR Description: IAA-amino acid hydrolase (gb|AAC04866.1)
  misc_feature (13)..(427): Homolog of NCBI NO: 902791 NR Description: ILL2
  misc_feature (15)..(442): Homolog of NCBI NO: 34910396 NR Description: putative IAA-Ala hydrolase
  misc_feature (33)..(427): Homolog of NCBI NO: 15218029 NR Description: auxin conjugate hydrolase (ILL5); protein id:
  misc_feature (33)..(442): Homolog of NCBI NO: 2181184 NR Description: JR3 protein [Arabidopsis thaliana]
  misc_feature (33)..(442): Homolog of NCBI NO: 15218027 NR Description: IAA-Ala hydrolase (IAR3)
  misc_feature (4)..(442): Homolog of NCBI NO: 27948556 NR Description: IAA-amino acid hydrolase [Oryza sativa (indica
  misc_feature (4)..(442): Homolog of NCBI NO: 34914096 NR Description: putative IAA-Ala hydrolase
LLLLAMAAYAGLLRVALVLIAAAATWAAALDDPAGLLRRAKEAEFMDWMVGVRRRIHENPELGYEEFDTSELVRRELDAMGIPYRHPFAVTGVVATVGTGGPPFVALRADMDALPMQESVEWEHKSKVPGKMHGCGHDAHVAMLLGSAKILQEHRDELKGTVALLFQPAEEGGGGAKKMVEAGAVENIEVMFGLHVADSVPIGVLASRPGPIMAGSGFFEAVISGKGGHAALPHHTIDPILAASNVIVSLQQLVSREADPLDSQVVTVGKFQGGGAFNVIPDSVTIGGTFRAFMKESFNQLKQRIEEVIVTQASVQRCSAVVDFLDKDKPFFPPTINNPELHDFFAKVCSEMVGPNNVREKQPLMGAEDFSFYTEAVPKTYYYFVGMLNETRGPQAPHHSPYFTINEDALPYGAAMQASLAARYLLEHQPATAAKVEPRDEL

SEQ ID NO: 69041 - protein, 437 aa, Triticum aestivum
  peptide (1)..(437): Ceres Seq. ID no. 12593466
  misc_feature (42)..(421): Pfam Name: Peptidase family M20/M25/M40 Pfam Description: Peptidase family M20/M25/M40
  misc_feature (8)..(420): Homolog of NCBI NO: 15241892 NR Description: IAA-amino acid hydrolase homolog 1 precursor
  misc_feature (8)..(422): Homolog of NCBI NO: 18175667 NR Description: IAA-amino acid hydrolase [Arabidopsis thaliana]
  misc_feature (8)..(422): Homolog of NCBI NO: 15241894 NR Description: IAA-amino acid hydrolase (gb|AAC04866.1)
  misc_feature (8)..(422): Homolog of NCBI NO: 902791 NR Description: ILL2
  misc_feature (10)..(437): Homolog of NCBI NO: 34910396 NR Description: putative IAA-Ala hydrolase
  misc_feature (28)..(422): Homolog of NCBI NO: 15218029 NR Description: auxin conjugate hydrolase (ILL5); protein id:
  misc_feature (28)..(437): Homolog of NCBI NO: 2181184 NR Description: JR3 protein [Arabidopsis thaliana]
  misc_feature (28)..(437): Homolog of NCBI NO: 15218027 NR Description: IAA-Ala hydrolase (IAR3)
  misc_feature (1)..(437): Homolog of NCBI NO: 27948556 NR Description: IAA-amino acid hydrolase [Oryza sativa (indica
  misc_feature (1)..(437): Homolog of NCBI NO: 34914096 NR Description: putative IAA-Ala hydrolase
MAAYAGLLRVALVLIAAAATWAAALDDPAGLLRRAKEAEFMDWMVGVRRRIHENPELGYEEFDTSELVRRELDAMGIPYRHPFAVTGVVATVGTGGPPFVALRADMDALPMQESVEWEHKSKVPGKMHGCGHDAHVAMLLGSAKILQEHRDELKGTVALLFQPAEEGGGGAKKMVEAGAVENIEVMFGLHVADSVPIGVLASRPGPIMAGSGFFEAVISGKGGHAALPHHTIDPILAASNVIVSLQQLVSREADPLDSQVVTVGKFQGGGAFNVIPDSVTIGGTFRAFMKESFNQLKQRIEEVIVTQASVQRCSAVVDFLDKDKPFFPPTINNPELHDFFAKVCSEMVGPNNVREKQPLMGAEDFSFYTEAVPKTYYYFVGMLNETRGPQAPHHSPYFTINEDALPYGAAMQASLAARYLLEHQPATAAKVEPRDEL

SEQ ID NO: 69042 - protein, 397 aa, Triticum aestivum
  peptide (1)..(397): Ceres Seq. ID no. 12593467
  misc_feature (2)..(381): Pfam Name: Peptidase family M20/M25/M40 Pfam Description: Peptidase family M20/M25/M40
  misc_feature (1)..(380): Homolog of NCBI NO: 15241892 NR Description: IAA-amino acid hydrolase homolog 1 precursor
  misc_feature (1)..(382): Homolog of NCBI NO: 18175667 NR Description: IAA-amino acid hydrolase [Arabidopsis thaliana]
  misc_feature (1)..(382): Homolog of NCBI NO: 15241894 NR Description: IAA-amino acid hydrolase (gb|AAC04866.1)
  misc_feature (1)..(382): Homolog of NCBI NO: 902791 NR Description: ILL2
  misc_feature (1)..(397): Homolog of NCBI NO: 34910396 NR Description: putative IAA-Ala hydrolase
  misc_feature (1)..(382): Homolog of NCBI NO: 15218029 NR Description: auxin conjugate hydrolase (ILL5); protein id:
  misc_feature (1)..(397): Homolog of NCBI NO: 2181184 NR Description: JR3 protein [Arabidopsis thaliana]
  misc_feature (1)..(397): Homolog of NCBI NO: 15218027 NR Description: IAA-Ala hydrolase (IAR3)
  misc_feature (1)..(397): Homolog of NCBI NO: 27948556 NR Description: IAA-amino acid hydrolase [Oryza sativa (indica
  misc_feature (1)..(397): Homolog of NCBI NO: 34914096 NR Description: putative IAA-Ala hydrolase
MDWMVGVRRRIHENPELGYEEFDTSELVRRELDAMGIPYRHPFAVTGVVATVGTGGPPFVALRADMDALPMQESVEWEHKSKVPGKMHGCGHDAHVAMLLGSAKILQEHRDELKGTVALLFQPAEEGGGGAKKMVEAGAVENIEVMFGLHVADSVPIGVLASRPGPIMAGSGFFEAVISGKGGHAALPHHTIDPILAASNVIVSLQQLVSREADPLDSQVVTVGKFQGGGAFNVIPDSVTIGGTFRAFMKESFNQLKQRIEEVIVTQASVQRCSAVVDFLDKDKPFFPPTINNPELHDFFAKVCSEMVGPNNVREKQPLMGAEDFSFYTEAVPKTYYYFVGMLNETRGPQAPHHSPYFTINEDALPYGAAMQASLAARYLLEHQPATAAKVEPRDEL

SEQ ID NO: 69043 - DNA, 1422 bp, Triticum aestivum
  misc_feature (1)..(1422): Ceres Seq. ID no. 13591068
ctagaacatcctaatcgaaaaatatatctacccgtagcgtgcccacgaaccacaccacagcacaccaaccgcgcgccactgatccatcaactccactccactagctacgtaccttccgaccgagcagccagagagatggagaggatggtgatgaggctggtgaggaacaagcagtccctccgccagctgcaaggggccgccgccggcggcctagcgtcgtcgtcctccgcctcctcgaccgccggcgccgccgcgtcctccttctccaccctgcagcagcagcaggaggaccaccccggagtgctcaacatcagggacaccgccgcccacctcatcggccggacgccgctggtgtacctgaacaaggtgacggaggggtgcggcgcccgcgtcgccgccaagctcgagttcctccagccttccttcagcgtcaaggacaggccagcaatctccatgatcgaagacgcggagaagaaggggctgataaccccaggcaagacgacgctgatcgagcccacatccgggaacatgggcatcggcctggcgttcatggcagcactcaaagggtacgagctcgtgctgacgatgccatcatacaccagcctcgagaggagggtggtcatgaaggccttcggtgcgcagctcgtgctcactgacccggccaaggggatgggaggcaccgtcaggaaagcaacccagctctatgagaaccatcccagcgccttcatgctccagcagttcgagaatcccgccaacgtccaggtgcactacgagactaccggtccggagatatgggaggacacgctcgggcaggtcgacatcttcgtcatgggaatcggcagcggcggcaccgtcaccggcgtcggcaagtacctcaaggagaagaaccccaacgcaaagatctatggagttgaacctgccgaagcaaatgtcctgaacggtggcaagccagggcctcacctcatcactggaaatggagttggatttaagccagatattttggatatggatataatggagaaggttctagaggtgaaaagcgaggacgccgttacgatggcgcaacagttggcactgcaggagggcctgctggtggggatatcatcaggagccaacacagtggctgcgatcgaactcgcaaagaggccagaaaacaaagggaagctcatcgtgactgttcatccgagcgcgggagagcgatacttatcgtcggcgctattcgagggtctgaggaaggaggctgaggcaatgcagccagtgccagtggactaagttggagctatacaatgcatgtagaataaattcactgcaaccatgttgcaagtgctagtcatacctcatttgtgattcttcagtttgttcatcatgtggaagtcgtgtaaacaacagttcaaatggttgaaaaaaggactttacctctcc

SEQ ID NO: 69044 - protein, 423 aa, Triticum aestivum
  peptide (1)..(423): Ceres Seq. ID no. 13591069
  misc_feature (108)..(396): Pfam Name: Pyridoxal-phosphate dependent enzyme Pfam Description: Pyridoxal-phosphate dependent enzyme
  misc_feature (56)..(419): Homolog of NCBI NO: 12644209 NR Description: CYSTEINE SYNTHASE, CHLOROPLAST PRECURSOR SULFHYDRYLASE) (O-ACETYLSERINE (THIOL)-LYASE) (CSASE B) (CS-B)
  misc_feature (56)..(419): Homolog of NCBI NO: 303902 NR Description: cysteine synthase [Spinacia oleracea]
  misc_feature (102)..(419): Homolog of NCBI NO: 12081919 NR Description: plastidic cysteine synthase 1 [Solanum tuberosum]
  misc_feature (103)..(423): Homolog of NCBI NO: 11995005 NR Description: beta-cyanoalanine synthase like protein [Solanum
  misc_feature (79)..(423): Homolog of NCBI NO: 15233111 NR Description: cysteine synthase (O-acetylserine
  misc_feature (86)..(423): Homolog of NCBI NO: 11559260 NR Description: beta-cyanoalanine synthase [Solanum tuberosum]
  misc_feature (87)..(423): Homolog of NCBI NO: 30840956 NR Description: beta-cyanoalanine synthase [Betula pendula]
  misc_feature (103)..(423): Homolog of NCBI NO: 1071913 NR Description: cysteine synthase (EC 4.2.99.8) C precursor,
  misc_feature (46)..(423): Homolog of NCBI NO: 38346461 NR Description: OSJNBa0019G23.9 [Oryza sativa (japonica
  misc_feature (46)..(423): Homolog of NCBI NO: 10241630 NR Description: cysteine synthase [Oryza sativa (indica
LEHPNRKIYLPVACPRTTPQHTNRAPLIHQLHSTSYVPSDRAAREMERMVMRLVRNKQSLRQLQGAAAGGLASSSSASSTAGAAASSFSTLQQQQEDHPGVLNIRDTAAHLIGRTPLVYLNKVTEGCGARVAAKLEFLQPSFSVKDRPAISMIEDAEKKGLITPGKTTLIEPTSGNMGIGLAFMAALKGYELVLTMPSYTSLERRVVMKAFGAQLVLTDPAKGMGGTVRKATQLYENHPSAFMLQQFENPANVQVHYETTGPEIWEDTLGQVDIFVMGIGSGGTVTGVGKYLKEKNPNAKIYGVEPAEANVLNGGKPGPHLITGNGVGFKPDILDMDIMEKVLEVKSEDAVTMAQQLALQEGLLVGISSGANTVAAIELAKRPENKGKLIVTVHPSAGERYLSSALFEGLRKEAEAMQPVPVD

SEQ ID NO: 69045 - protein, 378 aa, Triticum aestivum
  peptide (1)..(378): Ceres Seq. ID no. 13591070
  misc_feature (63)..(351): Pfam Name: Pyridoxal-phosphate dependent enzyme Pfam Description: Pyridoxal-phosphate dependent enzyme
  misc_feature (11)..(374): Homolog of NCBI NO: 12644209 NR Description: CYSTEINE SYNTHASE, CHLOROPLAST PRECURSOR SULFHYDRYLASE) (O-ACETYLSERINE (THIOL)-LYASE) (CSASE B) (CS-B)
  misc_feature (11)..(374): Homolog of NCBI NO: 303902 NR Description: cysteine synthase [Spinacia oleracea]
  misc_feature (57)..(374): Homolog of NCBI NO: 12081919 NR Description: plastidic cysteine synthase 1 [Solanum tuberosum]
  misc_feature (58)..(378): Homolog of NCBI NO: 11995005 NR Description: beta-cyanoalanine synthase like protein [Solanum
  misc_feature (34)..(378): Homolog of NCBI NO: 15233111 NR Description: cysteine synthase (O-acetylserine
  misc_feature (41)..(378): Homolog of NCBI NO: 11559260 NR Description: beta-cyanoalanine synthase [Solanum tuberosum]
  misc_feature (42)..(378): Homolog of NCBI NO: 30840956 NR Description: beta-cyanoalanine synthase [Betula pendula]
  misc_feature (58)..(378): Homolog of NCBI NO: 1071913 NR Description: cysteine synthase (EC 4.2.99.8) C precursor,
  misc_feature (1)..(378): Homolog of NCBI NO: 38346461 NR Description: OSJNBa0019G23.9 [Oryza sativa (japonica
  misc_feature (1)..(378): Homolog of NCBI NO: 10241630 NR Description: cysteine synthase [Oryza sativa (indica
MERMVMRLVRNKQSLRQLQGAAAGGLASSSSASSTAGAAASSFSTLQQQQEDHPGVLNIRDTAAHLIGRTPLVYLNKVTEGCGARVAAKLEFLQPSFSVKDRPAISMIEDAEKKGLITPGKTTLIEPTSGNMGIGLAFMAALKGYELVLTMPSYTSLERRVVMKAFGAQLVLTDPAKGMGGTVRKATQLYENHPSAFMLQQFENPANVQVHYETTGPEIWEDTLGQVDIFVMGIGSGGTVTGVGKYLKEKNPNAKIYGVEPAEANVLNGGKPGPHLITGNGVGFKPDILDMDIMEKVLEVKSEDAVTMAQQLALQEGLLVGISSGANTVAAIELAKRPENKGKLIVTVHPSAGERYLSSALFEGLRKEAEAMQPVPVD

SEQ ID NO: 69046 - protein, 375 aa, Triticum aestivum
  peptide (1)..(375): Ceres Seq. ID no. 13591071
  misc_feature (60)..(348): Pfam Name: Pyridoxal-phosphate dependent enzyme Pfam Description: Pyridoxal-phosphate dependent enzyme
  misc_feature (8)..(371): Homolog of NCBI NO: 12644209 NR Description: CYSTEINE SYNTHASE, CHLOROPLAST PRECURSOR SULFHYDRYLASE) (O-ACETYLSERINE (THIOL)-LYASE) (CSASE B) (CS-B)
  misc_feature (8)..(371): Homolog of NCBI NO: 303902 NR Description: cysteine synthase [Spinacia oleracea]
  misc_feature (54)..(371): Homolog of NCBI NO: 12081919 NR Description: plastidic cysteine synthase 1 [Solanum tuberosum]
  misc_feature (55)..(375): Homolog of NCBI NO: 11995005 NR Description: beta-cyanoalanine synthase like protein [Solanum
  misc_feature (31)..(375): Homolog of NCBI NO: 15233111 NR Description: cysteine synthase (O-acetylserine
  misc_feature (38)..(375): Homolog of NCBI NO: 11559260 NR Description: beta-cyanoalanine synthase [Solanum tuberosum]
  misc_feature (39)..(375): Homolog of NCBI NO: 30840956 NR Description: beta-cyanoalanine synthase [Betula pendula]
  misc_feature (55)..(375): Homolog of NCBI NO: 1071913 NR Description: cysteine synthase (EC 4.2.99.8) C precursor,
  misc_feature (1)..(375): Homolog of NCBI NO: 38346461 NR Description: OSJNBa0019G23.9 [Oryza sativa (japonica
  misc_feature (1)..(375): Homolog of NCBI NO: 10241630 NR Description: cysteine synthase [Oryza sativa (indica
MVMRLVRNKQSLRQLQGAAAGGLASSSSASSTAGAAASSFSTLQQQQEDHPGVLNIRDTAAHLIGRTPLVYLNKVTEGCGARVAAKLEFLQPSFSVKDRPAISMIEDAEKKGLITPGKTTLIEPTSGNMGIGLAFMAALKGYELVLTMPSYTSLERRVVMKAFGAQLVLTDPAKGMGGTVRKATQLYENHPSAFMLQQFENPANVQVHYETTGPEIWEDTLGQVDIFVMGIGSGGTVTGVGKYLKEKNPNAKIYGVEPAEANVLNGGKPGPHLITGNGVGFKPDILDMDIMEKVLEVKSEDAVTMAQQLALQEGLLVGISSGANTVAAIELAKRPENKGKLIVTVHPSAGERYLSSALFEGLRKEAEAMQPVPVD

SEQ ID NO: 69047 - DNA, 1096 bp, Triticum aestivum
  misc_feature (1)..(1096): Ceres Seq. ID no. 13656068
gagcccaatccgggcactggaaatttctagcatcgcgacggtttaaggaagcatcgcgacgtctaatcgtggcccccctctaacaccttttgccgagacgagattctcttccgcagccgcccccgtcgacgtcgccgtcgccgtcttttgccaccgcgatgcctcggtattattgcgattactgcgacacttatctgacccatgactcgccatctgtccgtaagcaacacaatgctggatataaacacaaggcaaatgttcgtaactactatcagcaattcgaggagcagcaaactcaaagtttgattgatcaaaggataaaggaacacctgggacaagctgcagcgttccaagttggcgctcctttcaaccaacatcttcttcaatatccaggaaatatgccccgtccccgtcttccgattctgcccacacccatgatgcaacatggttatcctcaacatcaacaacctggtgggccatttgcaaggcctcctattttaccagttcctggggctccaggttatcctggtgctccaaccatgccgcagcacgggggccctcctggttcaatgcctatgcaggtggcacctcccccaaggcctccgacactaccacctccaacatttggggccccaggtgcacccatgtccaacaacgcatcacctccaggtcctccaccgatgtatcaaccaaatcaaccaccaactgcaggctcaacttctggcgctccacccctggccccagcggcccctccacaggctgcattctcctatgcacaatcgaatgaaggcaaccactgatctgttccttggtggttatcaaatgagattcgaagaacagccgtaacttggaagttgatgcttcctgcctgtctgtctcctgaatttcggaggcagtctgtctcttgaaatttggagaattgttaagaaaggcttcctgcagtagtattttttgtattttaggtggtgtaacctttacttcttaatacaccgacttcgtattagtttcttgcccttgaaacttgataatggatataacccatggatggcgtacttgatgtagtacatatttgtcattaaaacaaatttatttgttg

SEQ ID NO: 69048 - protein, 213 aa, Triticum aestivum
  peptide (1)..(213): Ceres Seq. ID no. 13656069
  misc_feature (82)..(199): Pfam Name: Extensin-like region Pfam Description: Extensin-like region
  misc_feature (1)..(145): Homolog of NCBI NO: 39580999 NR Description: Hypothetical protein CBG19656 [Caenorhabditis
  misc_feature (1)..(160): Homolog of NCBI NO: 6755596 NR Description: U1 small nuclear ribonucleoprotein 1C [Mus
  misc_feature (1)..(160): Homolog of NCBI NO: 4507127 NR Description: small nuclear ribonucleoprotein polypeptide C
  misc_feature (1)..(160): Homolog of NCBI NO: 548881 NR Description: U1 small nuclear ribonucleoprotein C (U1-C)
  misc_feature (1)..(160): Homolog of NCBI NO: 27545257 NR Description: small nuclear ribonucleoprotein polypeptide C
  misc_feature (1)..(149): Homolog of NCBI NO: 17539712 NR Description: Small nuclear ribonucleoprotein polypeptide C
  misc_feature (1)..(198): Homolog of NCBI NO: 38111701 NR Description: hypothetical protein MG08209.4 [Magnaporthe
  misc_feature (1)..(94): Homolog of NCBI NO: 25295939 NR Description: probable C-type U1 snRNP [imported] - Arabidopsis
  misc_feature (1)..(212): Homolog of NCBI NO: 28466929 NR Description: At4g03120 [Arabidopsis thaliana]
  misc_feature (1)..(212): Homolog of NCBI NO: 18412147 NR Description: proline-rich protein family [Arabidopsis thaliana]
MPRYYCDYCDTYLTHDSPSVRKQHNAGYKHKANVRNYYQQFEEQQTQSLIDQRIKEHLGQAAAFQVGAPFNQHLLQYPGNMPRPRLPILPTPMMQHGYPQHQQPGGPFARPPILPVPGAPGYPGAPTMPQHGGPPGSMPMQVAPPPRPPTLPPPTFGAPGAPMSNNASPPGPPPMYQPNQPPTAGSTSGAPPLAPAAPPQAAFSYAQSNEGNH

SEQ ID NO: 69049 - protein, 133 aa, Triticum aestivum
  peptide (1)..(133): Ceres Seq. ID no. 13656070
  misc_feature (2)..(119): Pfam Name: Extensin-like region Pfam Description: Extensin-like region
  misc_feature (1)..(65): Homolog of NCBI NO: 39580999 NR Description: Hypothetical protein CBG19656 [Caenorhabditis
  misc_feature (1)..(80): Homolog of NCBI NO: 6755596 NR Description: U1 small nuclear ribonucleoprotein 1C [Mus
  misc_feature (1)..(80): Homolog of NCBI NO: 4507127 NR Description: small nuclear ribonucleoprotein polypeptide C
  misc_feature (1)..(80): Homolog of NCBI NO: 548881 NR Description: U1 small nuclear ribonucleoprotein C (U1-C)
  misc_feature (1)..(80): Homolog of NCBI NO: 27545257 NR Description: small nuclear ribonucleoprotein polypeptide C
  misc_feature (1)..(69): Homolog of NCBI NO: 17539712 NR Description: Small nuclear ribonucleoprotein polypeptide C
  misc_feature (1)..(118): Homolog of NCBI NO: 38111701 NR Description: hypothetical protein MG08209.4 [Magnaporthe
  misc_feature (1)..(14): Homolog of NCBI NO: 25295939 NR Description: probable C-type U1 snRNP [imported] - Arabidopsis
  misc_feature (1)..(132): Homolog of NCBI NO: 28466929 NR Description: At4g03120 [Arabidopsis thaliana]
  misc_feature (1)..(132): Homolog of NCBI NO: 18412147 NR Description: proline-rich protein family [Arabidopsis thaliana]
MPRPRLPILPTPMMQHGYPQHQQPGGPFARPPILPVPGAPGYPGAPTMPQHGGPPGSMPMQVAPPPRPPTLPPPTFGAPGAPMSNNASPPGPPPMYQPNQPPTAGSTSGAPPLAPAAPPQAAFSYAQSNEGNH

SEQ ID NO: 69050 - protein, 133 aa, Triticum aestivum
  peptide (1)..(133): Ceres Seq. ID no. 13656071
MVILNINNLVGHLQGLLFYQFLGLQVILVLQPCRSTGALLVQCLCRWHLPQGLRHYHLQHLGPQVHPCPTTHHLQVLHRCINQINHQLQAQLLALHPWPQRPLHRLHSPMHNRMKATTDLFLGGYQMRFEEQP

SEQ ID NO: 69051 - DNA, 1148 bp, Triticum aestivum
  misc_feature (1)..(1148): Ceres Seq. ID no. 12617960
ggagatctttgcgtgaccgcgcagccaagggggaaaagaaagaaaaggaaaaccaaccagaagaaaagctcgggaggagagcgtggggggactagggagcatggcggagcacaaggaggagccggtggcggagtccatgatggacaagatctccgacaagttccacggtggggactcgtcgtcgtcgtcctcggactcggacgacgagaagaaggggtcggcggcgggcgtcaaggccaagatctaccgcctcttcggccgcgagaagcccgtccacgccgtcctcggcggcggcaagcctgctgatcttgttctatggaggaacaagaaggtctccggaggggtgcttgctggcgctactgccatctggctgctgttcgaggtcatggagtaccatctgctcaccttggtgggccactgcctcatcctctccctggcaaccctcttcctctattccaatgtctgcattttcatccacaagtctcccccgaacatccctgaggtgaaaatcccggaggacatgactgtaaacattgcactatcactgcggcatgagatcaaccggggcttctttaccttgagagagactggtcatggtcgtgatctgaagaaattcctcattgtgattggagggctctggcttctttctgttcttgggagctactgcaactttttgacactgtcatatatagtctttgtggtgctgtacactgtgccagttctgtatgagaagtacgatgacaaggtggatgcttttggtgagaaggccatgatcgaattgaagaagtattatgccatctttgaagagaaggtcctgtcgaagatcccgaagaacaagaagcactagatcacaagagttaccctgccgcgtattgccatctgtgttaatctcaacttgttgcctcattttgaaggatggttctgtgtcattgcgtctgtctttagttaatactacttgatactagtacatatagatgtggtgtgctaatccttttgtgaagtggagtcatgccagctgaagattgttgatcttcttttttttgtttatttttcaactttcagcatggttactctatntgggagccggaaatgttatggcattacctgttntagtgcctagtgatatactactgcgtagtgatttatcc

SEQ ID NO: 69052 - protein, 248 aa, Triticum aestivum
  peptide (1)..(248): Ceres Seq. ID no. 12617961
  misc_feature (1)..(247): Homolog of NCBI NO: 34897094 NR Description: unknown protein [Oryza sativa (japonica
  misc_feature (1)..(243): Homolog of NCBI NO: 15233147 NR Description: putative protein; protein id: At3g61560.1
  misc_feature (1)..(243): Homolog of NCBI NO: 15234108 NR Description: hypothetical protein; protein id: At4g01230.1
  misc_feature (1)..(243): Homolog of NCBI NO: 18406991 NR Description: expressed protein
  misc_feature (35)..(248): Homolog of NCBI NO: 34904202 NR Description: P0492F05.25 [Oryza sativa (japonica
  misc_feature (3)..(247): Homolog of NCBI NO: 15238125 NR Description: putative protein
  misc_feature (1)..(244): Homolog of NCBI NO: 15237093 NR Description: putative protein
  misc_feature (3)..(242): Homolog of NCBI NO: 15222616 NR Description: hypothetical protein
  misc_feature (11)..(247): Homolog of NCBI NO: 15236556 NR Description: putative protein
  misc_feature (1)..(248): Homolog of NCBI NO: 34909318 NR Description: OSJNBb0021A09.5 [Oryza sativa (japonica
MAEHKEEPVAESMMDKISDKFHGGDSSSSSSDSDDEKKGSAAGVKAKIYRLFGREKPVHAVLGGGKPADLVLWRNKKVSGGVLAGATAIWLLFEVMEYHLLTLVGHCLILSLATLFLYSNVCIFIHKSPPNIPEVKIPEDMTVNIALSLRHEINRGFFTLRETGHGRDLKKFLIVIGGLWLLSVLGSYCNFLTLSYIVFVVLYTVPVLYEKYDDKVDAFGEKAMIELKKYYAIFEEKVLSKIPKNKKH

SEQ ID NO: 69053 - protein, 236 aa, Triticum aestivum
  peptide (1)..(236): Ceres Seq. ID no. 12617962
  misc_feature (1)..(235): Homolog of NCBI NO: 34897094 NR Description: unknown protein [Oryza sativa (japonica
  misc_feature (1)..(231): Homolog of NCBI NO: 15233147 NR Description: putative protein; protein id: At3g61560.1
  misc_feature (1)..(231): Homolog of NCBI NO: 15234108 NR Description: hypothetical protein; protein id: At4g01230.1
  misc_feature (1)..(231): Homolog of NCBI NO: 18406991 NR Description: expressed protein
  misc_feature (23)..(236): Homolog of NCBI NO: 34904202 NR Description: P0492F05.25 [Oryza sativa (japonica
  misc_feature (1)..(235): Homolog of NCBI NO: 15238125 NR Description: putative protein
  misc_feature (1)..(232): Homolog of NCBI NO: 15237093 NR Description: putative protein
  misc_feature (1)..(230): Homolog of NCBI NO: 15222616 NR Description: hypothetical protein
  misc_feature (1)..(235): Homolog of NCBI NO: 15236556 NR Description: putative protein
  misc_feature (1)..(236): Homolog of NCBI NO: 34909318 NR Description: OSJNBb0021A09.5 [Oryza sativa (japonica
MMDKISDKFHGGDSSSSSSDSDDEKKGSAAGVKAKIYRLFGREKPVHAVLGGGKPADLVLWRNKKVSGGVLAGATAIWLLFEVMEYHLLTLVGHCLILSLATLFLYSNVCIFIHKSPPNIPEVKIPEDMTVNIALSLRHEINRGFFTLRETGHGRDLKKFLIVIGGLWLLSVLGSYCNFLTLSYIVFVVLYTVPVLYEKYDDKVDAFGEKAMIELKKYYAIFEEKVLSKIPKNKKH

SEQ ID NO: 69054 - protein, 235 aa, Triticum aestivum
  peptide (1)..(235): Ceres Seq. ID no. 12617963
  misc_feature (1)..(234): Homolog of NCBI NO: 34897094 NR Description: unknown protein [Oryza sativa (japonica
  misc_feature (1)..(230): Homolog of NCBI NO: 15233147 NR Description: putative protein; protein id: At3g61560.1
  misc_feature (1)..(230): Homolog of NCBI NO: 15234108 NR Description: hypothetical protein; protein id: At4g01230.1
  misc_feature (1)..(230): Homolog of NCBI NO: 18406991 NR Description: expressed protein
  misc_feature (22)..(235): Homolog of NCBI NO: 34904202 NR Description: P0492F05.25 [Oryza sativa (japonica
  misc_feature (1)..(234): Homolog of NCBI NO: 15238125 NR Description: putative protein
  misc_feature (1)..(231): Homolog of NCBI NO: 15237093 NR Description: putative protein
  misc_feature (1)..(229): Homolog of NCBI NO: 15222616 NR Description: hypothetical protein
  misc_feature (1)..(234): Homolog of NCBI NO: 15236556 NR Description: putative protein
  misc_feature (1)..(235): Homolog of NCBI NO: 34909318 NR Description: OSJNBb0021A09.5 [Oryza sativa (japonica
MDKISDKFHGGDSSSSSSDSDDEKKGSAAGVKAKIYRLFGREKPVHAVLGGGKPADLVLWRNKKVSGGVLAGATAIWLLFEVMEYHLLTLVGHCLILSLATLFLYSNVCIFIHKSPPNIPEVKIPEDMTVNIALSLRHEINRGFFTLRETGHGRDLKKFLIVIGGLWLLSVLGSYCNFLTLSYIVFVVLYTVPVLYEKYDDKVDAFGEKAMIELKKYYAIFEEKVLSKIPKNKKH

SEQ ID NO: 69055 - DNA, 1480 bp, Triticum aestivum
  misc_feature (1)..(1480): Ceres Seq. ID no. 14302772
acctacctactgcctccattcccaccacagctagcttcagcttttagctaagctctacttccctcccgagctaagcatcttcttgatttctcggtgatcggattcggatggacagcgcaagaagctgcctcgtggacgacgtgagcagcggcgcgtccacgggcaagaaggcctctccgtccccggccgcgccggcgaccaagccgctgcagcgcgtgggcagcggggccagcgcggtcatggacgcgccggagcccggcgccgaggcggactccggccgcgtcggcaggctgccgtcctccaagtacaagggcgtggtgccgcagcccaacgggcgctggggcgcgcagatctacgagcgccaccagcgcgtctggctcggcaccttcacgggggaggccgaggctgcgcgcgcctacgacgcggcggcgcagcgcttccgcggccgcgacgcagtcaccaacttccgctcgctcaccgagtccgacccggaggacgccgccgagctccgcttcctcgctgcccgctccaaggccgaggtcgtcgacatgctgcgcaagcacacctatcccgacgagctcgctcagtacaagcgcgcctacttcgccgccgctgcggcgtcctcccctacatcgtcctcggtgcctcccgcctcgtcgccctcttcggcggcttcgccctcgccggcggcgcggcgcgagcacctgttcgacaagacggtcacgcccagcgacgtggggaagctgaaccggcttgtgataccgaagcagcacgccgagaagcactttcctctccagcttccttccgccggcgccgccgtgtccggcgagtgcaagggcatgcttctcaacttcgacgactcggccggcaaggtgtggaggttccggtactcgtactggaacagcagccagagctacgtgctcaccaagggctggagccgctttgtcaaggagaagggcctgcacgccggcgacgccgtcgggttctaccgctctgcctcaggcagcaaccagctcttcatcgactgcaagctccggtccaagaccacgacgatgacgacgactttcgtcaacgcggcggccgccccgtcgccggcacccgtgatgaggaccgtgcgactcttcggcgtcgaccttctcacggcgccggcgccgagtcacgtgcccgagcacgaggactgcagcatggtgcccaagacaagcaagagatccatggacgccaacgcagcggccactccggcgcacgcggtctggaagaagcggtgcatagacttcgcgctgacctagccagctagcgtttttcctccatggttgctttgcttgcctccaaatttccatgttagtagcttagagctcttgatcggtccaagtgtttgccttttttttcctcttcttctcatacacaagttagctctaaatccagtcttctttaattaatctactgtaaattaagcccgttctcgaaatggcaagtgttcacc

SEQ ID NO: 69056 - protein, 392 aa, Triticum aestivum
  peptide (1)..(392): Ceres Seq. ID no. 14302773
  misc_feature (200)..(313): Pfam Name: B3 DNA binding domain Pfam Description: B3 DNA binding domain
  misc_feature (9)..(240): Homolog of NCBI NO: 15230871 NR Description: AP2 domain transcription factor, putative
  misc_feature (13)..(343): Homolog of NCBI NO: 34895690 NR Description: putative DNA binding protein RAV2
  misc_feature (63)..(160): Homolog of NCBI NO: 34895676 NR Description: putative DNA binding protein RAV2
  misc_feature (187)..(343): Homolog of NCBI NO: 34895676 NR Description: putative DNA binding protein RAV2
  misc_feature (6)..(311): Homolog of NCBI NO: 15222217 NR Description: AP2 domain transcription factor, putative  (RAV1)
  misc_feature (17)..(322): Homolog of NCBI NO: 15222622 NR Description: AP2 domain transcription factor, putative
  misc_feature (16)..(311): Homolog of NCBI NO: 2281641 NR Description: AP2 domain containing protein RAP2.8 [Arabidopsis
  misc_feature (1)..(311): Homolog of NCBI NO: 21554039 NR Description: putative RAV2-like DNA-binding protein
  misc_feature (1)..(311): Homolog of NCBI NO: 18409138 NR Description: AP2 domain protein RAP2.8 (RAV2) [Arabidopsis
  misc_feature (1)..(391): Homolog of NCBI NO: 34911404 NR Description: DNA-binding protein RAV2-like
MDSARSCLVDDVSSGASTGKKASPSPAAPATKPLQRVGSGASAVMDAPEPGAEADSGRVGRLPSSKYKGVVPQPNGRWGAQIYERHQRVWLGTFTGEAEAARAYDAAAQRFRGRDAVTNFRSLTESDPEDAAELRFLAARSKAEVVDMLRKHTYPDELAQYKRAYFAAAAASSPTSSSVPPASSPSSAASPSPAARREHLFDKTVTPSDVGKLNRLVIPKQHAEKHFPLQLPSAGAAVSGECKGMLLNFDDSAGKVWRFRYSYWNSSQSYVLTKGWSRFVKEKGLHAGDAVGFYRSASGSNQLFIDCKLRSKTTTMTTTFVNAAAAPSPAPVMRTVRLFGVDLLTAPAPSHVPEHEDCSMVPKTSKRSMDANAAATPAHAVWKKRCIDFALT

SEQ ID NO: 69057 - protein, 348 aa, Triticum aestivum
  peptide (1)..(348): Ceres Seq. ID no. 14302774
  misc_feature (156)..(269): Pfam Name: B3 DNA binding domain Pfam Description: B3 DNA binding domain
  misc_feature (1)..(196): Homolog of NCBI NO: 15230871 NR Description: AP2 domain transcription factor, putative
  misc_feature (1)..(299): Homolog of NCBI NO: 34895690 NR Description: putative DNA binding protein RAV2
  misc_feature (19)..(116): Homolog of NCBI NO: 34895676 NR Description: putative DNA binding protein RAV2
  misc_feature (143)..(299): Homolog of NCBI NO: 34895676 NR Description: putative DNA binding protein RAV2
  misc_feature (1)..(267): Homolog of NCBI NO: 15222217 NR Description: AP2 domain transcription factor, putative  (RAV1)
  misc_feature (1)..(278): Homolog of NCBI NO: 15222622 NR Description: AP2 domain transcription factor, putative
  misc_feature (1)..(267): Homolog of NCBI NO: 2281641 NR Description: AP2 domain containing protein RAP2.8 [Arabidopsis
  misc_feature (1)..(267): Homolog of NCBI NO: 21554039 NR Description: putative RAV2-like DNA-binding protein
  misc_feature (1)..(267): Homolog of NCBI NO: 18409138 NR Description: AP2 domain protein RAP2.8 (RAV2) [Arabidopsis
  misc_feature (1)..(347): Homolog of NCBI NO: 34911404 NR Description: DNA-binding protein RAV2-like
MDAPEPGAEADSGRVGRLPSSKYKGVVPQPNGRWGAQIYERHQRVWLGTFTGEAEAARAYDAAAQRFRGRDAVTNFRSLTESDPEDAAELRFLAARSKAEVVDMLRKHTYPDELAQYKRAYFAAAAASSPTSSSVPPASSPSSAASPSPAARREHLFDKTVTPSDVGKLNRLVIPKQHAEKHFPLQLPSAGAAVSGECKGMLLNFDDSAGKVWRFRYSYWNSSQSYVLTKGWSRFVKEKGLHAGDAVGFYRSASGSNQLFIDCKLRSKTTTMTTTFVNAAAAPSPAPVMRTVRLFGVDLLTAPAPSHVPEHEDCSMVPKTSKRSMDANAAATPAHAVWKKRCIDFALT

SEQ ID NO: 69058 - protein, 245 aa, Triticum aestivum
  peptide (1)..(245): Ceres Seq. ID no. 14302775
  misc_feature (53)..(166): Pfam Name: B3 DNA binding domain Pfam Description: B3 DNA binding domain
  misc_feature (1)..(93): Homolog of NCBI NO: 15230871 NR Description: AP2 domain transcription factor, putative
  misc_feature (1)..(196): Homolog of NCBI NO: 34895690 NR Description: putative DNA binding protein RAV2
  misc_feature (1)..(13): Homolog of NCBI NO: 34895676 NR Description: putative DNA binding protein RAV2
  misc_feature (40)..(196): Homolog of NCBI NO: 34895676 NR Description: putative DNA binding protein RAV2
  misc_feature (1)..(164): Homolog of NCBI NO: 15222217 NR Description: AP2 domain transcription factor, putative  (RAV1)
  misc_feature (1)..(175): Homolog of NCBI NO: 15222622 NR Description: AP2 domain transcription factor, putative
  misc_feature (1)..(164): Homolog of NCBI NO: 2281641 NR Description: AP2 domain containing protein RAP2.8 [Arabidopsis
  misc_feature (1)..(164): Homolog of NCBI NO: 21554039 NR Description: putative RAV2-like DNA-binding protein
  misc_feature (1)..(164): Homolog of NCBI NO: 18409138 NR Description: AP2 domain protein RAP2.8 (RAV2) [Arabidopsis
  misc_feature (1)..(244): Homolog of NCBI NO: 34911404 NR Description: DNA-binding protein RAV2-like
MLRKHTYPDELAQYKRAYFAAAAASSPTSSSVPPASSPSSAASPSPAARREHLFDKTVTPSDVGKLNRLVIPKQHAEKHFPLQLPSAGAAVSGECKGMLLNFDDSAGKVWRFRYSYWNSSQSYVLTKGWSRFVKEKGLHAGDAVGFYRSASGSNQLFIDCKLRSKTTTMTTTFVNAAAAPSPAPVMRTVRLFGVDLLTAPAPSHVPEHEDCSMVPKTSKRSMDANAAATPAHAVWKKRCIDFALT

SEQ ID NO: 69059 - DNA, 1434 bp, Triticum aestivum
  misc_feature (1)..(1434): Ceres Seq. ID no. 13662855
aacgctccccgcaaccctccaaaccaaagccccccaccgctctctcgcccccacccataaacccccgccgcccagatcctcctcctcctccctcctccccgtcgccgcgccgccgccgccatgcatcccgacgccacctccccctcccaccgcatcgcccgcgtcgccgcgcacctcaacccgacacgcccgcagatggaggagggcgcggcgctgaggcccgcggcgtgccgcgccaagggcggcgcgccggggttcaaggtggcggtggtgggcgcggccgggggcatcggccagtcgctgtcgctgctcatgaagatgaacccgctcgtctccgtgctccacctctacgacgtcgtcaacacgcccggggtcaccgccgacgtcagccacatggacaccagcgccgtggtgcgcggcttcattggccaacaacagcttgaggcagcacttacaggaatggatcttgtcatcatccctgccggcctcccaagaaaaccaggaatgacaagggatgatctgttcaacaaaaatgctgggatcgttcgctcgatctgtgaaggcgttgccaagagctgtcctaatgctattgtgaatttgatcagcaaccctgtgaactcaaccgtccccattgctgcggaggttttcaagagagctggaacttactgtcccaagcgtctccttggagtgacaacacttgatgtagcgagggctaatacctttgtggcggaagtgcttggagttgatccaagagaagtcaatgttccagttgttggcgggcatgcaggggtcactatattacccctcctgtcacaggtcagccccccatgctcattcactccagatgaaatcagctatttgactaaccgcatacagaacggtggtacagaagttgtggaggcaaaggctggagcaggctctgcaactttgtcaatggcttttgctgctgcaaaattcgccgacgcgtgcctgcgaggaatgcgcggagatgctggcatcgtggagtgttcatacgtcgcatctgaggtgacagagctgccgttcttcgcatcgaaggtgaggttaggtcgtggtggagccgaagagattctccctcttgggccattgaatgactttgagagggccggcctggagaaggcgaagaaggagctgagcgagagcattgagaagggcgtgtcgttcatgaacaagtgagatcgtacgaatggaccgtccccgacctatacagatatgcaaagactaaagaaagagtgatatagtgctccaatacctgtaaagccacccctgcatgtgcaagacagtactagtactcctttagctgcactgagccttttcccccgtcgtggaatataaatcatgtactcgtactagacaagaacgtatacttttgtgaatagctggaccgaacatgtttacagccaaaaaaaaaaaaaa

SEQ ID NO: 69060 - protein, 357 aa, Triticum aestivum
  peptide (1)..(357): Ceres Seq. ID no. 15220192
  misc_feature (191)..(355): Pfam Name: lactate/malate dehydrogenase, alpha/beta Pfam Description: lactate/malate dehydrogenase, alpha/beta
  misc_feature (1)..(357): Homolog of NCBI NO: 7431179 NR Description: malate dehydrogenase (EC 1.1.1.37) precursor,
  misc_feature (9)..(357): Homolog of NCBI NO: 16323157 NR Description: AT5g09660/F17I14_150 [Arabidopsis thaliana]
  misc_feature (9)..(357): Homolog of NCBI NO: 15242466 NR Description: malate dehydrogenase, glyoxysomal [Arabidopsis
  misc_feature (11)..(357): Homolog of NCBI NO: 12644436 NR Description: Malate dehydrogenase 1, glyoxysomal precursor
  misc_feature (9)..(357): Homolog of NCBI NO: 1346501 NR Description: MALATE DEHYDROGENASE, GLYOXYSOMAL PRECURSOR
  misc_feature (9)..(357): Homolog of NCBI NO: 169977 NR Description: malate dehydrogenase
  misc_feature (9)..(355): Homolog of NCBI NO: 1170897 NR Description: MALATE DEHYDROGENASE, GLYOXYSOMAL PRECURSOR
  misc_feature (9)..(355): Homolog of NCBI NO: 126894 NR Description: MALATE DEHYDROGENASE, GLYOXYSOMAL PRECURSOR
  misc_feature (4)..(357): Homolog of NCBI NO: 3183079 NR Description: MALATE DEHYDROGENASE, GLYOXYSOMAL PRECURSOR
  misc_feature (1)..(357): Homolog of NCBI NO: 34915204 NR Description: putative  glyoxysomal malate dehydrogenase
MHPDATSPSHRIARVAAHLNPTRPQMEEGAALRPAACRAKGGAPGFKVAVVGAAGGIGQSLSLLMKMNPLVSVLHLYDVVNTPGVTADVSHMDTSAVVRGFIGQQQLEAALTGMDLVIIPAGLPRKPGMTRDDLFNKNAGIVRSICEGVAKSCPNAIVNLISNPVNSTVPIAAEVFKRAGTYCPKRLLGVTTLDVARANTFVAEVLGVDPREVNVPVVGGHAGVTILPLLSQVSPPCSFTPDEISYLTNRIQNGGTEVVEAKAGAGSATLSMAFAAAKFADACLRGMRGDAGIVECSYVASEVTELPFFASKVRLGRGGAEEILPLGPLNDFERAGLEKAKKELSESIEKGVSFMNK

SEQ ID NO: 69061 - protein, 332 aa, Triticum aestivum
  peptide (1)..(332): Ceres Seq. ID no. 15220193
  misc_feature (166)..(330): Pfam Name: lactate/malate dehydrogenase, alpha/beta Pfam Description: lactate/malate dehydrogenase, alpha/beta
  misc_feature (1)..(332): Homolog of NCBI NO: 7431179 NR Description: malate dehydrogenase (EC 1.1.1.37) precursor,
  misc_feature (1)..(332): Homolog of NCBI NO: 16323157 NR Description: AT5g09660/F17I14_150 [Arabidopsis thaliana]
  misc_feature (1)..(332): Homolog of NCBI NO: 15242466 NR Description: malate dehydrogenase, glyoxysomal [Arabidopsis
  misc_feature (1)..(332): Homolog of NCBI NO: 12644436 NR Description: Malate dehydrogenase 1, glyoxysomal precursor
  misc_feature (1)..(332): Homolog of NCBI NO: 1346501 NR Description: MALATE DEHYDROGENASE, GLYOXYSOMAL PRECURSOR
  misc_feature (1)..(332): Homolog of NCBI NO: 169977 NR Description: malate dehydrogenase
  misc_feature (1)..(330): Homolog of NCBI NO: 1170897 NR Description: MALATE DEHYDROGENASE, GLYOXYSOMAL PRECURSOR
  misc_feature (1)..(330): Homolog of NCBI NO: 126894 NR Description: MALATE DEHYDROGENASE, GLYOXYSOMAL PRECURSOR
  misc_feature (1)..(332): Homolog of NCBI NO: 3183079 NR Description: MALATE DEHYDROGENASE, GLYOXYSOMAL PRECURSOR
  misc_feature (1)..(332): Homolog of NCBI NO: 34915204 NR Description: putative  glyoxysomal malate dehydrogenase
MEEGAALRPAACRAKGGAPGFKVAVVGAAGGIGQSLSLLMKMNPLVSVLHLYDVVNTPGVTADVSHMDTSAVVRGFIGQQQLEAALTGMDLVIIPAGLPRKPGMTRDDLFNKNAGIVRSICEGVAKSCPNAIVNLISNPVNSTVPIAAEVFKRAGTYCPKRLLGVTTLDVARANTFVAEVLGVDPREVNVPVVGGHAGVTILPLLSQVSPPCSFTPDEISYLTNRIQNGGTEVVEAKAGAGSATLSMAFAAAKFADACLRGMRGDAGIVECSYVASEVTELPFFASKVRLGRGGAEEILPLGPLNDFERAGLEKAKKELSESIEKGVSFMNK

SEQ ID NO: 69062 - protein, 293 aa, Triticum aestivum
  peptide (1)..(293): Ceres Seq. ID no. 15220194
  misc_feature (127)..(291): Pfam Name: lactate/malate dehydrogenase, alpha/beta Pfam Description: lactate/malate dehydrogenase, alpha/beta
  misc_feature (1)..(293): Homolog of NCBI NO: 7431179 NR Description: malate dehydrogenase (EC 1.1.1.37) precursor,
  misc_feature (1)..(293): Homolog of NCBI NO: 16323157 NR Description: AT5g09660/F17I14_150 [Arabidopsis thaliana]
  misc_feature (1)..(293): Homolog of NCBI NO: 15242466 NR Description: malate dehydrogenase, glyoxysomal [Arabidopsis
  misc_feature (1)..(293): Homolog of NCBI NO: 12644436 NR Description: Malate dehydrogenase 1, glyoxysomal precursor
  misc_feature (1)..(293): Homolog of NCBI NO: 1346501 NR Description: MALATE DEHYDROGENASE, GLYOXYSOMAL PRECURSOR
  misc_feature (1)..(293): Homolog of NCBI NO: 169977 NR Description: malate dehydrogenase
  misc_feature (1)..(291): Homolog of NCBI NO: 1170897 NR Description: MALATE DEHYDROGENASE, GLYOXYSOMAL PRECURSOR
  misc_feature (1)..(291): Homolog of NCBI NO: 126894 NR Description: MALATE DEHYDROGENASE, GLYOXYSOMAL PRECURSOR
  misc_feature (1)..(293): Homolog of NCBI NO: 3183079 NR Description: MALATE DEHYDROGENASE, GLYOXYSOMAL PRECURSOR
  misc_feature (1)..(293): Homolog of NCBI NO: 34915204 NR Description: putative  glyoxysomal malate dehydrogenase
MKMNPLVSVLHLYDVVNTPGVTADVSHMDTSAVVRGFIGQQQLEAALTGMDLVIIPAGLPRKPGMTRDDLFNKNAGIVRSICEGVAKSCPNAIVNLISNPVNSTVPIAAEVFKRAGTYCPKRLLGVTTLDVARANTFVAEVLGVDPREVNVPVVGGHAGVTILPLLSQVSPPCSFTPDEISYLTNRIQNGGTEVVEAKAGAGSATLSMAFAAAKFADACLRGMRGDAGIVECSYVASEVTELPFFASKVRLGRGGAEEILPLGPLNDFERAGLEKAKKELSESIEKGVSFMNK

SEQ ID NO: 69063 - DNA, 1034 bp, Triticum aestivum
  misc_feature (1)..(1034): Ceres Seq. ID no. 12626028
cttccatttcaggcctccagcctccgatctataccccgatcgagcctcgccggacggaggcgccccccatgccacagccctagcggcgtcaatctcaccagcccaaaccccgccgcccgcccgccatgttcggcgtcgtgttcccggaccacaccttcccgctggacgccaccgccttcgcgcaggtcgcgccggcctcctggctcctcgacctctccacgctgtccctcccctccgcgccccgctccgccgtcgtcttcctgctcccgcccgccgcggccgcgctgcccccgggcaaggccgtcgccgtctactaccaggcggccgccaaccgccccttcgccttcctcggcgcgctcggccccgcgcgcccctccgccgccctccagctcccggaggccggggacgagccggagccccctgccgggcccgccaagctgggcgtcgccgtggaggacgccgccgcgctgccctcgccccccgacgagcagcgcgccgagcgcgtcgcgctccgcgtcggcgagaacctcttcaatttcatgcagtccttctgcgccgccgacggcggcaagctggtggtgcccacggatatcctggaccgctggttccgcaagttccaggagagggccaagaaggatcccacctatctgaaaagctttgacttctgaaaccaaagctttaggtattccttactccattcttaggttccttgggtgcgaattggtacaggaatgcttagtctcattgcagtactcctgtaccaattggtgcggagtaggagttacaagggcgacaccacctccctggtagtttaagatcgtgatctacaagaggggctgagagggagatgtcctaaaaagtgtagtgttcttgggcctcttagttcgtcagctatgagatctggtgttaattttcattgtttgtgcgagttcatgacgttgattgcagcataatatgaatatgccccggtgagatgtgtgctgatagaagcttgatgttaaatatattatccctttatggaaaaatgttgtttt

SEQ ID NO: 69064 - protein, 219 aa, Triticum aestivum
  peptide (1)..(219): Ceres Seq. ID no. 12626029
  misc_feature (14)..(192): Pfam Name: HlyD family secretion protein Pfam Description: HlyD family secretion protein
FHFRPPASDLYPDRASPDGGAPHATALAASISPAQTPPPARHVRRRVPGPHLPAGRHRLRAGRAGLLAPRPLHAVPPLRAPLRRRLPAPARRGRAAPGQGRRRLLPGGRQPPLRLPRRARPRAPLRRPPAPGGRGRAGAPCRARQAGRRRGGRRRAALAPRRAARRARRAPRRREPLQFHAVLLRRRRRQAGGAHGYPGPLVPQVPGEGQEGSHLSEKL

SEQ ID NO: 69065 - protein, 216 aa, Triticum aestivum
  peptide (1)..(216): Ceres Seq. ID no. 12626030
  misc_feature (22)..(161): Pfam Name: Extensin-like region Pfam Description: Extensin-like region
  misc_feature (24)..(167): Homolog of NCBI NO: 2129478 NR Description: chitinase (EC 3.2.1.14) precursor - beet
  misc_feature (2)..(191): Homolog of NCBI NO: 11360318 NR Description: probable mucin DKFZp434C196.1 - human (fragment)
  misc_feature (22)..(215): Homolog of NCBI NO: 20138131 NR Description: Vegetative cell wall protein gp1 precursor
  misc_feature (22)..(187): Homolog of NCBI NO: 6523547 NR Description: hydroxyproline-rich glycoprotein DZ-HRGP
  misc_feature (22)..(190): Homolog of NCBI NO: 20138131 NR Description: Vegetative cell wall protein gp1 precursor
  misc_feature (22)..(190): Homolog of NCBI NO: 20138131 NR Description: Vegetative cell wall protein gp1 precursor
  misc_feature (12)..(191): Homolog of NCBI NO: 81286 NR Description: extensin - Volvox carteri (fragment)
  misc_feature (43)..(188): Homolog of NCBI NO: 2129478 NR Description: chitinase (EC 3.2.1.14) precursor - beet
  misc_feature (2)..(187): Homolog of NCBI NO: 20138131 NR Description: Vegetative cell wall protein gp1 precursor
  misc_feature (22)..(186): Homolog of NCBI NO: 2429362 NR Description: proline rich protein [Santalum album]
LPFQASSLRSIPRSSLAGRRRPPCHSPSGVNLTSPNPAARPPCSASCSRTTPSRWTPPPSRRSRRPPGSSTSPRCPSPPRPAPPSSSCSRPPRPRCPRARPSPSTTRRPPTAPSPSSARSAPRAPPPPSSSRRPGTSRSPLPGPPSWASPWRTPPRCPRPPTSSAPSASRSASARTSSISCSPSAPPTAASWWCPRISWTAGSASSRRGPRRIPPI

SEQ ID NO: 69066 - protein, 180 aa, Triticum aestivum
  peptide (1)..(180): Ceres Seq. ID no. 12626031
  misc_feature (1)..(177): Pfam Name: Protein of unknown function (DUF775) Pfam Description: Protein of unknown function (DUF775)
  misc_feature (1)..(178): Homolog of NCBI NO: 15218916 NR Description: hypothetical protein; protein id: At1g66080.1
  misc_feature (1)..(180): Homolog of NCBI NO: 27357983 NR Description: Hypothetical protein [Oryza sativa (japonica
MFGVVFPDHTFPLDATAFAQVAPASWLLDLSTLSLPSAPRSAVVFLLPPAAAALPPGKAVAVYYQAAANRPFAFLGALGPARPSAALQLPEAGDEPEPPAGPAKLGVAVEDAAALPSPPDEQRAERVALRVGENLFNFMQSFCAADGGKLVVPTDILDRWFRKFQERAKKDPTYLKSFDF

SEQ ID NO: 69067 - DNA, 804 bp, Triticum aestivum
  misc_feature (1)..(804): Ceres Seq. ID no. 13656012
gctcggcgcagccgcacccttccgcaagaaagaaaggggaggggaggggagaacagaataaacatcagacccgcaaagaggaggagcgaaacagcatccctgccttcctccacgcccgtagggtttccggatcggaggagcccaagccgccgcagccatggttcgcggatcgctcgggaggttggcgtcgcgcaccctctccgtcgccggcaaatggcagcaccagcagctccgccgcctcaacatccacgagtaccagggcgcggagttgatggggaagttcgggatcaacgtgcccaagggcgccgtggtggggtcagtgcaggaggtcaaggaagttttgaagaacgtcttccccagtgagaaagagatagttgtgaaaagccaaatccttgccggtggccgtggattgggaactttcaaaagtggactaaagggtggtgttcatattgttaaggctgaggaggctgaaagccttgcagctaaaatgcttaaccaggtcctggtaacaaaacaaactggtccacaggggaaggttgtgggcaagctcattatagcttgtgctgagggaggaacgagtattgaagatcttgcagagaagttccctgataagatcgttaaggttcctgttgatgtattcaagggaatcactgatgaggatgagattaggttccggctgaagagtgagaggtggaagactggtaccatttgtatagcttgtgtgataaaaagactagacattttgggtgtacactcctccgtgttggtgttgccacccgtgaacataaacactgcctgtatgtt

SEQ ID NO: 69068 - protein, 215 aa, Triticum aestivum
  peptide (1)..(215): Ceres Seq. ID no. 13656013
  misc_feature (72)..(134): Pfam Name: ATP-grasp domain Pfam Description: ATP-grasp domain
  misc_feature (24)..(134): Homolog of NCBI NO: 31228546 NR Description: ENSANGP00000017707 [Anopheles gambiae]
  misc_feature (126)..(166): Homolog of NCBI NO: 40742456 NR Description: hypothetical protein AN7000.2 [Aspergillus
  misc_feature (23)..(133): Homolog of NCBI NO: 40742456 NR Description: hypothetical protein AN7000.2 [Aspergillus
  misc_feature (129)..(167): Homolog of NCBI NO: 32418076 NR Description: probable beta-succinyl CoA synthetase precursor
  misc_feature (1)..(133): Homolog of NCBI NO: 32418076 NR Description: probable beta-succinyl CoA synthetase precursor
  misc_feature (129)..(175): Homolog of NCBI NO: 31228552 NR Description: ENSANGP00000025191 [Anopheles gambiae]
  misc_feature (24)..(134): Homolog of NCBI NO: 31228552 NR Description: ENSANGP00000025191 [Anopheles gambiae]
  misc_feature (6)..(133): Homolog of NCBI NO: 27803873 NR Description: succinyl CoA ligase beta subunit [Lycopersicon
  misc_feature (2)..(133): Homolog of NCBI NO: 21593189 NR Description: succinyl-CoA ligase beta subunit [Arabidopsis
  misc_feature (2)..(133): Homolog of NCBI NO: 15225353 NR Description: succinyl-CoA ligase beta subunit [Arabidopsis
MVRGSLGRLASRTLSVAGKWQHQQLRRLNIHEYQGAELMGKFGINVPKGAVVGSVQEVKEVLKNVFPSEKEIVVKSQILAGGRGLGTFKSGLKGGVHIVKAEEAESLAAKMLNQVLVTKQTGPQGKVVGKLIIACAEGGTSIEDLAEKFPDKIVKVPVDVFKGITDEDEIRFRLKSERWKTGTICIACVIKRLDILGVHSSVLVLPPVNINTACM

SEQ ID NO: 69069 - protein, 177 aa, Triticum aestivum
  peptide (1)..(177): Ceres Seq. ID no. 13656014
  misc_feature (34)..(96): Pfam Name: ATP-grasp domain Pfam Description: ATP-grasp domain
  misc_feature (1)..(96): Homolog of NCBI NO: 31228546 NR Description: ENSANGP00000017707 [Anopheles gambiae]
  misc_feature (88)..(128): Homolog of NCBI NO: 40742456 NR Description: hypothetical protein AN7000.2 [Aspergillus
  misc_feature (1)..(95): Homolog of NCBI NO: 40742456 NR Description: hypothetical protein AN7000.2 [Aspergillus
  misc_feature (91)..(129): Homolog of NCBI NO: 32418076 NR Description: probable beta-succinyl CoA synthetase precursor
  misc_feature (1)..(95): Homolog of NCBI NO: 32418076 NR Description: probable beta-succinyl CoA synthetase precursor
  misc_feature (91)..(137): Homolog of NCBI NO: 31228552 NR Description: ENSANGP00000025191 [Anopheles gambiae]
  misc_feature (1)..(96): Homolog of NCBI NO: 31228552 NR Description: ENSANGP00000025191 [Anopheles gambiae]
  misc_feature (1)..(95): Homolog of NCBI NO: 27803873 NR Description: succinyl CoA ligase beta subunit [Lycopersicon
  misc_feature (1)..(95): Homolog of NCBI NO: 21593189 NR Description: succinyl-CoA ligase beta subunit [Arabidopsis
  misc_feature (1)..(95): Homolog of NCBI NO: 15225353 NR Description: succinyl-CoA ligase beta subunit [Arabidopsis
MGKFGINVPKGAVVGSVQEVKEVLKNVFPSEKEIVVKSQILAGGRGLGTFKSGLKGGVHIVKAEEAESLAAKMLNQVLVTKQTGPQGKVVGKLIIACAEGGTSIEDLAEKFPDKIVKVPVDVFKGITDEDEIRFRLKSERWKTGTICIACVIKRLDILGVHSSVLVLPPVNINTACM

SEQ ID NO: 69070 - protein, 120 aa, Triticum aestivum
  peptide (1)..(120): Ceres Seq. ID no. 13656015
ARRSRTLPQERKGRGGENRINIRPAKRRSETASLPSSTPVGFPDRRSPSRRSHGSRIAREVGVAHPLRRRQMAAPAAPPPQHPRVPGRGVDGEVRDQRAQGRRGGVSAGGQGSFEERLPQ

SEQ ID NO: 69071 - DNA, 1393 bp, Triticum aestivum
  misc_feature (1)..(1393): Ceres Seq. ID no. 13597747
atattcttcttcttctcccctttgcttcttccagaagctccctgaaagtccaggcccgatcccccatggcctccggcgaaggcaccggagattcgaacgctgcgggggcagggatggaggtgccggaggtggagttgtgcctcgacctcacgagctgccagctgcacgatctgagtgaggtggagatcccgcccaccctggaggagctggaccttacggcgaaccgtctcaccgcagtcgacccccggatcggccacctccctcgcctccgcaaactctcgttccgccagaatctcctcgacgacgacgccgtcgcgcccctcttcacctgggatgccatcgctggcttacaggagatagtccttagagataacaagcttataaagatccccgatgccagcatcttcaagggtcttctggtgtttgatgtttctttcaatgagttgtcgtccttaaatgggttatccaaggtttccagcacagtgaaagaactctacttttcgaagaatgaggttccaaagatggaagaacttgaacatttccatgcattagaattgcttgaacttggtagcaacagattaagggtgatggaaaatctggaaactttgacaaatctacaggagttatggctcggaagaaaccggatccggactatcaacttatgtgggttgaaatcaatcaaaaaaataagtctgcaaagcaacaggctaacttcaatgaatggcttacaagaatgtgttgcgttagaggaactgtatctcagccataatggaatccaaaagatggaaggcctttctatgttacagaaccttcgtgttttagatgtttcatctaacaaactaaccgctatcgaagatattgagccattaaccaggttagaggacttgtggttgaatgacaaccaaataccatcactgtctgggatagaatctgctttgtctggttcacgagagaaactgaccaccatatatcttgagagaaatccttgtgcaaaaactcccaactattcatccacattgaaggaaatgtttccaaatcttgagcaaattgattcagatatgctagcgtgaaacaggttgactcactttctcagattgttgaagttagtcgaaatatgtgttgtgtttctacaggaagaaagcagtcatccagttcagaacagacaacataagctcccggtcaagtagcgctgcagtttgtactggtgatctgaatggattattgccaactttatttgaaaggcccgtcctgaagttgggtcatttcctgccgagatctataaaaactgaacttatgtgataaagccatcctatggtccatgactccatgctcgtgccacgttgcaagggatgatgtatttgttttcccttttcccttgagtgatttttcagtt

SEQ ID NO: 69072 - protein, 355 aa, Triticum aestivum
  peptide (1)..(355): Ceres Seq. ID no. 13597748
  misc_feature (56)..(353): Homolog of NCBI NO: 39597602 NR Description: Hypothetical protein CBG03304 [Caenorhabditis
  misc_feature (56)..(351): Homolog of NCBI NO: 40747368 NR Description: hypothetical protein AN0425.2 [Aspergillus
  misc_feature (31)..(354): Homolog of NCBI NO: 19114736 NR Description: protein phosphatases pp1 regulatory subunit
  misc_feature (29)..(353): Homolog of NCBI NO: 6684160 NR Description: putative mitotic protein phosphatase 1 regulator
  misc_feature (56)..(351): Homolog of NCBI NO: 34877683 NR Description: similar to protein phosphatase 1, regulatory
  misc_feature (56)..(351): Homolog of NCBI NO: 12963569 NR Description: protein phosphatase-1 regulatory subunit 7 [Mus
  misc_feature (56)..(351): Homolog of NCBI NO: 4633066 NR Description: protein phosphatase-1 regulatory subunit 7 alpha2
  misc_feature (56)..(351): Homolog of NCBI NO: 4506013 NR Description: protein phosphatase 1, regulatory subunit 7;
  misc_feature (39)..(355): Homolog of NCBI NO: 21536755 NR Description: unknown [Arabidopsis thaliana]
  misc_feature (39)..(355): Homolog of NCBI NO: 15241153 NR Description: leucine rich repeat protein family [Arabidopsis
ILLLLPFASSRSSLKVQARSPMASGEGTGDSNAAGAGMEVPEVELCLDLTSCQLHDLSEVEIPPTLEELDLTANRLTAVDPRIGHLPRLRKLSFRQNLLDDDAVAPLFTWDAIAGLQEIVLRDNKLIKIPDASIFKGLLVFDVSFNELSSLNGLSKVSSTVKELYFSKNEVPKMEELEHFHALELLELGSNRLRVMENLETLTNLQELWLGRNRIRTINLCGLKSIKKISLQSNRLTSMNGLQECVALEELYLSHNGIQKMEGLSMLQNLRVLDVSSNKLTAIEDIEPLTRLEDLWLNDNQIPSLSGIESALSGSREKLTTIYLERNPCAKTPNYSSTLKEMFPNLEQIDSDMLA

SEQ ID NO: 69073 - protein, 334 aa, Triticum aestivum
  peptide (1)..(334): Ceres Seq. ID no. 13597749
  misc_feature (35)..(332): Homolog of NCBI NO: 39597602 NR Description: Hypothetical protein CBG03304 [Caenorhabditis
  misc_feature (35)..(330): Homolog of NCBI NO: 40747368 NR Description: hypothetical protein AN0425.2 [Aspergillus
  misc_feature (10)..(333): Homolog of NCBI NO: 19114736 NR Description: protein phosphatases pp1 regulatory subunit
  misc_feature (8)..(332): Homolog of NCBI NO: 6684160 NR Description: putative mitotic protein phosphatase 1 regulator
  misc_feature (35)..(330): Homolog of NCBI NO: 34877683 NR Description: similar to protein phosphatase 1, regulatory
  misc_feature (35)..(330): Homolog of NCBI NO: 12963569 NR Description: protein phosphatase-1 regulatory subunit 7 [Mus
  misc_feature (35)..(330): Homolog of NCBI NO: 4633066 NR Description: protein phosphatase-1 regulatory subunit 7 alpha2
  misc_feature (35)..(330): Homolog of NCBI NO: 4506013 NR Description: protein phosphatase 1, regulatory subunit 7;
  misc_feature (18)..(334): Homolog of NCBI NO: 21536755 NR Description: unknown [Arabidopsis thaliana]
  misc_feature (18)..(334): Homolog of NCBI NO: 15241153 NR Description: leucine rich repeat protein family [Arabidopsis
MASGEGTGDSNAAGAGMEVPEVELCLDLTSCQLHDLSEVEIPPTLEELDLTANRLTAVDPRIGHLPRLRKLSFRQNLLDDDAVAPLFTWDAIAGLQEIVLRDNKLIKIPDASIFKGLLVFDVSFNELSSLNGLSKVSSTVKELYFSKNEVPKMEELEHFHALELLELGSNRLRVMENLETLTNLQELWLGRNRIRTINLCGLKSIKKISLQSNRLTSMNGLQECVALEELYLSHNGIQKMEGLSMLQNLRVLDVSSNKLTAIEDIEPLTRLEDLWLNDNQIPSLSGIESALSGSREKLTTIYLERNPCAKTPNYSSTLKEMFPNLEQIDSDMLA

SEQ ID NO: 69074 - protein, 318 aa, Triticum aestivum
  peptide (1)..(318): Ceres Seq. ID no. 13597750
  misc_feature (19)..(316): Homolog of NCBI NO: 39597602 NR Description: Hypothetical protein CBG03304 [Caenorhabditis
  misc_feature (19)..(314): Homolog of NCBI NO: 40747368 NR Description: hypothetical protein AN0425.2 [Aspergillus
  misc_feature (1)..(317): Homolog of NCBI NO: 19114736 NR Description: protein phosphatases pp1 regulatory subunit
  misc_feature (1)..(316): Homolog of NCBI NO: 6684160 NR Description: putative mitotic protein phosphatase 1 regulator
  misc_feature (19)..(314): Homolog of NCBI NO: 34877683 NR Description: similar to protein phosphatase 1, regulatory
  misc_feature (19)..(314): Homolog of NCBI NO: 12963569 NR Description: protein phosphatase-1 regulatory subunit 7 [Mus
  misc_feature (19)..(314): Homolog of NCBI NO: 4633066 NR Description: protein phosphatase-1 regulatory subunit 7 alpha2
  misc_feature (19)..(314): Homolog of NCBI NO: 4506013 NR Description: protein phosphatase 1, regulatory subunit 7;
  misc_feature (2)..(318): Homolog of NCBI NO: 21536755 NR Description: unknown [Arabidopsis thaliana]
  misc_feature (2)..(318): Homolog of NCBI NO: 15241153 NR Description: leucine rich repeat protein family [Arabidopsis
MEVPEVELCLDLTSCQLHDLSEVEIPPTLEELDLTANRLTAVDPRIGHLPRLRKLSFRQNLLDDDAVAPLFTWDAIAGLQEIVLRDNKLIKIPDASIFKGLLVFDVSFNELSSLNGLSKVSSTVKELYFSKNEVPKMEELEHFHALELLELGSNRLRVMENLETLTNLQELWLGRNRIRTINLCGLKSIKKISLQSNRLTSMNGLQECVALEELYLSHNGIQKMEGLSMLQNLRVLDVSSNKLTAIEDIEPLTRLEDLWLNDNQIPSLSGIESALSGSREKLTTIYLERNPCAKTPNYSSTLKEMFPNLEQIDSDMLA

SEQ ID NO: 69075 - DNA, 1250 bp, Triticum aestivum
  misc_feature (1)..(1250): Ceres Seq. ID no. 13503557
aaacccgctcgagatctatcccaattctcgacctcacatcccctgctcgactcgacttcgtttaaacccaaaccctaatctcgacagagcctaaaccctagctcgggcggcggcggcggcggtcatggacggcggcggaggcatggggcccgtcggcggcggggtgggaggcatggtgggacccgtcggcgtcggcggcgggggcggcgggagcgacgtggagctcgtcagcaaaacgctgcagttcgagcacaagctcttctacttcgatctgaaggagaacccgcgggggaggtacctcaagatctccgagaagacgtccaccacgcgctccaccatcatcgtgcccatcgccggcgtcgcctggttcctcgacctcttcgactattacatccgcaccgacgagcgcgacgtcttcagcaaggagctacgcctcgacactaaggtgttctacttcgatattggggagaacaagagaggccgctaccttaaggtttcggaggcatctgtcaatagaaaccgtagcacgataattgttccggctggtagctctggcgaagaaggttgggaagcatttaggaatgtactgttagaaatcaatgacgaagcttcccgactctatgttcttccaaatcatccaagtcagcaacacctggaacctccagagcgccttcctggcctttctgacgatgttggtgctggatttatagctgggcatggcagccaatctgcatctgtacccgaggtagacgttgatgggcctcctattgaagaatttagtggcatggggctgtctaaggtgataagggcagatcagaaaaggtttttctttgacctgggcagcaacaacaggggccattatttgaggatttccgaggtcgctggagctgatcgttcgtcgataatcttgccactttctggtttgaagcagttccatgagatggtgggacactttgtagatataatgaaggacagacttgaaggaatgacgggcgcgaacgtgcgcactgtcgagcccagccagagatgattagctcgaccttgtggcacttactgctgttatgcctcctctaggatttgtgtaagtgatgtggtgtgtggttgcgtagatcacgcagtattaattcgtctgatggggataataatgtttgatgtttagttttttctttcttctgaattccgtggcgaggattgatttgcttgggaccttttctgttgaggaataataagcagtataatgttcgtgggtg

SEQ ID NO: 69076 - protein, 301 aa, Triticum aestivum
  peptide (1)..(301): Ceres Seq. ID no. 13503558
  misc_feature (31)..(281): Pfam Name: PurA ssDNA and RNA-binding protein Pfam Description: PurA ssDNA and RNA-binding protein
  misc_feature (26)..(161): Homolog of NCBI NO: 24638636 NR Description: Purine-rich binding protein-alpha CG1507-PB
  misc_feature (227)..(289): Homolog of NCBI NO: 24638638 NR Description: Purine-rich binding protein-alpha CG1507-PA
  misc_feature (26)..(161): Homolog of NCBI NO: 24638638 NR Description: Purine-rich binding protein-alpha CG1507-PA
  misc_feature (227)..(289): Homolog of NCBI NO: 24638642 NR Description: Purine-rich binding protein-alpha CG1507-PD
  misc_feature (26)..(161): Homolog of NCBI NO: 24638642 NR Description: Purine-rich binding protein-alpha CG1507-PD
  misc_feature (248)..(286): Homolog of NCBI NO: 25408208 NR Description: hypothetical protein At2g32080 [imported] -
  misc_feature (1)..(211): Homolog of NCBI NO: 25408208 NR Description: hypothetical protein At2g32080 [imported] -
  misc_feature (1)..(301): Homolog of NCBI NO: 30685174 NR Description: purine-rich single-stranded DNA-binding protein
  misc_feature (1)..(301): Homolog of NCBI NO: 18402871 NR Description: purine-rich single-stranded DNA-binding protein
  misc_feature (1)..(301): Homolog of NCBI NO: 34902984 NR Description: unnamed protein product [Oryza sativa (japonica
MDGGGGMGPVGGGVGGMVGPVGVGGGGGGSDVELVSKTLQFEHKLFYFDLKENPRGRYLKISEKTSTTRSTIIVPIAGVAWFLDLFDYYIRTDERDVFSKELRLDTKVFYFDIGENKRGRYLKVSEASVNRNRSTIIVPAGSSGEEGWEAFRNVLLEINDEASRLYVLPNHPSQQHLEPPERLPGLSDDVGAGFIAGHGSQSASVPEVDVDGPPIEEFSGMGLSKVIRADQKRFFFDLGSNNRGHYLRISEVAGADRSSIILPLSGLKQFHEMVGHFVDIMKDRLEGMTGANVRTVEPSQR

SEQ ID NO: 69077 - protein, 295 aa, Triticum aestivum
  peptide (1)..(295): Ceres Seq. ID no. 13503559
  misc_feature (25)..(275): Pfam Name: PurA ssDNA and RNA-binding protein Pfam Description: PurA ssDNA and RNA-binding protein
  misc_feature (20)..(155): Homolog of NCBI NO: 24638636 NR Description: Purine-rich binding protein-alpha CG1507-PB
  misc_feature (221)..(283): Homolog of NCBI NO: 24638638 NR Description: Purine-rich binding protein-alpha CG1507-PA
  misc_feature (20)..(155): Homolog of NCBI NO: 24638638 NR Description: Purine-rich binding protein-alpha CG1507-PA
  misc_feature (221)..(283): Homolog of NCBI NO: 24638642 NR Description: Purine-rich binding protein-alpha CG1507-PD
  misc_feature (20)..(155): Homolog of NCBI NO: 24638642 NR Description: Purine-rich binding protein-alpha CG1507-PD
  misc_feature (242)..(280): Homolog of NCBI NO: 25408208 NR Description: hypothetical protein At2g32080 [imported] -
  misc_feature (1)..(205): Homolog of NCBI NO: 25408208 NR Description: hypothetical protein At2g32080 [imported] -
  misc_feature (1)..(295): Homolog of NCBI NO: 30685174 NR Description: purine-rich single-stranded DNA-binding protein
  misc_feature (1)..(295): Homolog of NCBI NO: 18402871 NR Description: purine-rich single-stranded DNA-binding protein
  misc_feature (1)..(295): Homolog of NCBI NO: 34902984 NR Description: unnamed protein product [Oryza sativa (japonica
MGPVGGGVGGMVGPVGVGGGGGGSDVELVSKTLQFEHKLFYFDLKENPRGRYLKISEKTSTTRSTIIVPIAGVAWFLDLFDYYIRTDERDVFSKELRLDTKVFYFDIGENKRGRYLKVSEASVNRNRSTIIVPAGSSGEEGWEAFRNVLLEINDEASRLYVLPNHPSQQHLEPPERLPGLSDDVGAGFIAGHGSQSASVPEVDVDGPPIEEFSGMGLSKVIRADQKRFFFDLGSNNRGHYLRISEVAGADRSSIILPLSGLKQFHEMVGHFVDIMKDRLEGMTGANVRTVEPSQR

SEQ ID NO: 69078 - protein, 285 aa, Triticum aestivum
  peptide (1)..(285): Ceres Seq. ID no. 13503560
  misc_feature (15)..(265): Pfam Name: PurA ssDNA and RNA-binding protein Pfam Description: PurA ssDNA and RNA-binding protein
  misc_feature (10)..(145): Homolog of NCBI NO: 24638636 NR Description: Purine-rich binding protein-alpha CG1507-PB
  misc_feature (211)..(273): Homolog of NCBI NO: 24638638 NR Description: Purine-rich binding protein-alpha CG1507-PA
  misc_feature (10)..(145): Homolog of NCBI NO: 24638638 NR Description: Purine-rich binding protein-alpha CG1507-PA
  misc_feature (211)..(273): Homolog of NCBI NO: 24638642 NR Description: Purine-rich binding protein-alpha CG1507-PD
  misc_feature (10)..(145): Homolog of NCBI NO: 24638642 NR Description: Purine-rich binding protein-alpha CG1507-PD
  misc_feature (232)..(270): Homolog of NCBI NO: 25408208 NR Description: hypothetical protein At2g32080 [imported] -
  misc_feature (1)..(195): Homolog of NCBI NO: 25408208 NR Description: hypothetical protein At2g32080 [imported] -
  misc_feature (1)..(285): Homolog of NCBI NO: 30685174 NR Description: purine-rich single-stranded DNA-binding protein
  misc_feature (1)..(285): Homolog of NCBI NO: 18402871 NR Description: purine-rich single-stranded DNA-binding protein
  misc_feature (1)..(285): Homolog of NCBI NO: 34902984 NR Description: unnamed protein product [Oryza sativa (japonica
MVGPVGVGGGGGGSDVELVSKTLQFEHKLFYFDLKENPRGRYLKISEKTSTTRSTIIVPIAGVAWFLDLFDYYIRTDERDVFSKELRLDTKVFYFDIGENKRGRYLKVSEASVNRNRSTIIVPAGSSGEEGWEAFRNVLLEINDEASRLYVLPNHPSQQHLEPPERLPGLSDDVGAGFIAGHGSQSASVPEVDVDGPPIEEFSGMGLSKVIRADQKRFFFDLGSNNRGHYLRISEVAGADRSSIILPLSGLKQFHEMVGHFVDIMKDRLEGMTGANVRTVEPSQR

SEQ ID NO: 69079 - DNA, 1343 bp, Triticum aestivum
  misc_feature (1)..(1343): Ceres Seq. ID no. 12625899
ctcttctctttgtggaagaagatgctgctcttgtgcaagagctccgtgctcgccgtcctgctcctccacgccctctctctgcccgcctcggcgctcgccgtcgggctcgggcggcgccaccgccgcgacgtcctgcccgggcccaagggctgcgacgtcttcagcggcagctgggtccgcgacgacggctccgccgaggctgcctacaccggctacaagtgcccggtcatcgacgcggagttcaactgccagctctacggccggccggactccgactacctccggtaccgctggaagccggccagctgcgagctacccaggtttgacggcgcagactttttgacgcggatgaaggggaagacggtgatgttcgtgggggattcgctgggccgtaaccagtgggagtcgctcgtctgcctgctgcacgccgccgcaccgcagtcgccgtcgcagctcgtctccgccgaccctctctatacctacaggttcatggagtacgagctggtggtgtctttctaccgcgcgccgtacctggtggacatcgacgtggtgcaggggaaacgggtcctcatgctcgacgacatcgccgagaacgcccaggcatggcgcggcgccgacgtgctctccttcaactccggccactggtggacgcacaccggcgcgcttcaggggtgggattacatgggggagggcgggcggtactcggaggacatggataggatggtggcgttccagcgcgggatgaccacatgggccaactgggtggacctcaacgtcgacccggccaagacccgtgtcttcttccagtccatgtcccccacccactacagctccaaggagtggcccaacccggtgtccaagaactgctacggagagacggtcccattggctgggctcaactccacggcgcagccgatgggccaggagcaggtgacgaaaacggtgctgcagggcatgaaaagcccggtccgtttgctcgacatcacggcgctgtcggcgctgcggaaggacgcgcacccgtcggtttacagcggcgacttctcgccggcgcagcgcggcaaccccgccggctccgccgactgcagccactggtgcctcccgggcctaccggacacctggaaccagctcttctacaccttgctcttctaccaatagcaaccgtactggacctgcatttggccagatgctgcagctgcagtgttggtattaattattttcctctgattccgctgtggatgtgtcatgtgagcggtataggtagacatgattgatgaggatgtacattgatctttgaatgacaaacagtagcccacacgtttgattagtaatagcaaacatgcccc

SEQ ID NO: 69080 - protein, 384 aa, Triticum aestivum
  peptide (1)..(384): Ceres Seq. ID no. 12625900
  misc_feature (15)..(383): Homolog of NCBI NO: 15224585 NR Description: hypothetical protein; protein id: At2g30900.1
  misc_feature (36)..(381): Homolog of NCBI NO: 28393769 NR Description: unknown protein [Arabidopsis thaliana]
  misc_feature (9)..(381): Homolog of NCBI NO: 21593142 NR Description: unknown [Arabidopsis thaliana]
  misc_feature (41)..(382): Homolog of NCBI NO: 18406003 NR Description: expressed protein
  misc_feature (23)..(381): Homolog of NCBI NO: 18403435 NR Description: expressed protein
  misc_feature (35)..(381): Homolog of NCBI NO: 34911864 NR Description: OSJNBb0032K15.9 [Oryza sativa (japonica
  misc_feature (37)..(381): Homolog of NCBI NO: 18396930 NR Description: expressed protein
  misc_feature (39)..(383): Homolog of NCBI NO: 18402220 NR Description: expressed protein
  misc_feature (51)..(383): Homolog of NCBI NO: 21553643 NR Description: unknown [Arabidopsis thaliana]
  misc_feature (51)..(383): Homolog of NCBI NO: 15237711 NR Description: putative protein
LFSLWKKMLLLCKSSVLAVLLLHALSLPASALAVGLGRRHRRDVLPGPKGCDVFSGSWVRDDGSAEAAYTGYKCPVIDAEFNCQLYGRPDSDYLRYRWKPASCELPRFDGADFLTRMKGKTVMFVGDSLGRNQWESLVCLLHAAAPQSPSQLVSADPLYTYRFMEYELVVSFYRAPYLVDIDVVQGKRVLMLDDIAENAQAWRGADVLSFNSGHWWTHTGALQGWDYMGEGGRYSEDMDRMVAFQRGMTTWANWVDLNVDPAKTRVFFQSMSPTHYSSKEWPNPVSKNCYGETVPLAGLNSTAQPMGQEQVTKTVLQGMKSPVRLLDITALSALRKDAHPSVYSGDFSPAQRGNPAGSADCSHWCLPGLPDTWNQLFYTLLFYQ

SEQ ID NO: 69081 - protein, 377 aa, Triticum aestivum
  peptide (1)..(377): Ceres Seq. ID no. 12625901
  misc_feature (8)..(376): Homolog of NCBI NO: 15224585 NR Description: hypothetical protein; protein id: At2g30900.1
  misc_feature (29)..(374): Homolog of NCBI NO: 28393769 NR Description: unknown protein [Arabidopsis thaliana]
  misc_feature (2)..(374): Homolog of NCBI NO: 21593142 NR Description: unknown [Arabidopsis thaliana]
  misc_feature (34)..(375): Homolog of NCBI NO: 18406003 NR Description: expressed protein
  misc_feature (16)..(374): Homolog of NCBI NO: 18403435 NR Description: expressed protein
  misc_feature (28)..(374): Homolog of NCBI NO: 34911864 NR Description: OSJNBb0032K15.9 [Oryza sativa (japonica
  misc_feature (30)..(374): Homolog of NCBI NO: 18396930 NR Description: expressed protein
  misc_feature (32)..(376): Homolog of NCBI NO: 18402220 NR Description: expressed protein
  misc_feature (44)..(376): Homolog of NCBI NO: 21553643 NR Description: unknown [Arabidopsis thaliana]
  misc_feature (44)..(376): Homolog of NCBI NO: 15237711 NR Description: putative protein
MLLLCKSSVLAVLLLHALSLPASALAVGLGRRHRRDVLPGPKGCDVFSGSWVRDDGSAEAAYTGYKCPVIDAEFNCQLYGRPDSDYLRYRWKPASCELPRFDGADFLTRMKGKTVMFVGDSLGRNQWESLVCLLHAAAPQSPSQLVSADPLYTYRFMEYELVVSFYRAPYLVDIDVVQGKRVLMLDDIAENAQAWRGADVLSFNSGHWWTHTGALQGWDYMGEGGRYSEDMDRMVAFQRGMTTWANWVDLNVDPAKTRVFFQSMSPTHYSSKEWPNPVSKNCYGETVPLAGLNSTAQPMGQEQVTKTVLQGMKSPVRLLDITALSALRKDAHPSVYSGDFSPAQRGNPAGSADCSHWCLPGLPDTWNQLFYTLLFYQ

SEQ ID NO: 69082 - protein, 268 aa, Triticum aestivum
  peptide (1)..(268): Ceres Seq. ID no. 12625902
  misc_feature (1)..(267): Homolog of NCBI NO: 15224585 NR Description: hypothetical protein; protein id: At2g30900.1
  misc_feature (1)..(265): Homolog of NCBI NO: 28393769 NR Description: unknown protein [Arabidopsis thaliana]
  misc_feature (1)..(265): Homolog of NCBI NO: 21593142 NR Description: unknown [Arabidopsis thaliana]
  misc_feature (1)..(266): Homolog of NCBI NO: 18406003 NR Description: expressed protein
  misc_feature (1)..(265): Homolog of NCBI NO: 18403435 NR Description: expressed protein
  misc_feature (1)..(265): Homolog of NCBI NO: 34911864 NR Description: OSJNBb0032K15.9 [Oryza sativa (japonica
  misc_feature (1)..(265): Homolog of NCBI NO: 18396930 NR Description: expressed protein
  misc_feature (1)..(267): Homolog of NCBI NO: 18402220 NR Description: expressed protein
  misc_feature (1)..(267): Homolog of NCBI NO: 21553643 NR Description: unknown [Arabidopsis thaliana]
  misc_feature (1)..(267): Homolog of NCBI NO: 15237711 NR Description: putative protein
MKGKTVMFVGDSLGRNQWESLVCLLHAAAPQSPSQLVSADPLYTYRFMEYELVVSFYRAPYLVDIDVVQGKRVLMLDDIAENAQAWRGADVLSFNSGHWWTHTGALQGWDYMGEGGRYSEDMDRMVAFQRGMTTWANWVDLNVDPAKTRVFFQSMSPTHYSSKEWPNPVSKNCYGETVPLAGLNSTAQPMGQEQVTKTVLQGMKSPVRLLDITALSALRKDAHPSVYSGDFSPAQRGNPAGSADCSHWCLPGLPDTWNQLFYTLLFYQ

SEQ ID NO: 69083 - DNA, 1355 bp, Triticum aestivum
  misc_feature (1)..(1355): Ceres Seq. ID no. 13598574
aacaagaaaggtctcctccccaccaccccaccaagaaaccgaagtcgtcacactcgcagtcactggctcactccactccgcgcaccctcactctcgctcgctccgtccgtctccgtccggcgagcccgcccgcgcctgcggcgatggccgtgagcaacaacatcacggcgtgcctcaacttcctggccctaatctgcaccatcccggtggtggccacgggcctctggttcgcctccaagcagggcgccgagtgcgcgcggctggcgcgctggcccgtggccatcctcggcgtgctcctcctcctcgtcgccctcgcgggcttcgtcggcgcctactggaaccgccagggcctgctggccgcctacctcttcgccatggcggccctcatcacgctcctcctggcgctcctcgtcttcgccttcgccgtcacccacggctccggggcgtacgacgtgcccggccgcgcctaccgcgagtaccgcctcgagggcttctctggctggctgcgcgggtatgttgctggggatccccggcggtgggaggggatcagggcgtgcctcgtcgcgtcggacacctgcaagaagctcaccatggagaccgccttcttcatcgcccccgagcagttctaccagtccgacctctccccgctccagtccggctgctgcaagccgccgacggcgtgcgggtacgcgtacgtgtccccgacggtgtgggccagcccggcaaacccggcggcggacgcggactgcggcgcctggagcaacgacccgcggcagctctgctactggtgcgaatcctgcaaggccggcatgctgggcaccctgcgcgaccagtggcgccgggccaacgtggcgctcgtcgccgccaccgtcgcgctcctcgtcgtntacgtcatcggctgcagcgccttcaagaacgcccagaccgaggacctcttccgccgctacaagtggagcaacaacacctgacgctgatagatgtaccaatcccgaacgaaggaaggagttctctggtggcagtaccagtgctagtatgctgacattgtgcactagtatgattatcggacgaaccagtgtagattatgtagtgggaagtactaaggttgaaagaagtttcactctcgtgagttgtatttggccactagacctggtgcattcgctagtgccatggtttatggctagagctatagtgtggtgagatttctcggttttcaggtcggttaatggagacattttcacccaaaattctcgatgaaatgcagtgtacgttcagatttgtgattgtttcaaggcaaaaataaataaatcatgattgtgataaaaaaaaaaaaaaaaaagcttatcgataccgtcgac

SEQ ID NO: 69084 - protein, 345 aa, Triticum aestivum
  peptide (1)..(345): Ceres Seq. ID no. 15222375
  misc_feature (296)..(296): Xaa is any aa, unknown or other
TRKVSSPPPHQETEVVTLAVTGSLHSAHPHSRSLRPSPSGEPARACGDGREQQHHGVPQLPGPNLHHPGGGHGPLVRLQAGRRVRAAGALARGHPRRAPPPRRPRGLRRRLLEPPGPAGRLPLRHGGPHHAPPGAPRLRLRRHPRLRGVRRARPRLPRVPPRGLLWLAARVCCWGSPAVGGDQGVPRRVGHLQEAHHGDRLLHRPRAVLPVRPLPAPVRLLQAADGVRVRVRVPDGVGQPGKPGGGRGLRRLEQRPAAALLLVRILQGRHAGHPARPVAPGQRGARRRHRRAPRRXRHRLQRLQERPDRGPLPPLQVEQQHLTLIDVPIPNEGRSSLVAVPVLVC

SEQ ID NO: 69085 - protein, 321 aa, Triticum aestivum
  peptide (1)..(321): Ceres Seq. ID no. 15222376
  misc_feature (50)..(292): Pfam Name: Tetraspanin family Pfam Description: Tetraspanin family
  misc_feature (48)..(307): Homolog of NCBI NO: 15238641 NR Description: senescence-associated protein family [Arabidopsis
  misc_feature (51)..(321): Homolog of NCBI NO: 21537169 NR Description: senescence-associated protein-like protein
  misc_feature (51)..(321): Homolog of NCBI NO: 15234743 NR Description: senescence-associated protein family [Arabidopsis
  misc_feature (51)..(305): Homolog of NCBI NO: 15234374 NR Description: senescence-associated protein, putative
  misc_feature (51)..(314): Homolog of NCBI NO: 20197174 NR Description: hypothetical protein [Arabidopsis thaliana]
  misc_feature (47)..(317): Homolog of NCBI NO: 29367553 NR Description: senescence-associated protein-like protein
  misc_feature (50)..(316): Homolog of NCBI NO: 3551954 NR Description: senescence-associated protein 5 [Hemerocallis
  misc_feature (48)..(316): Homolog of NCBI NO: 15237490 NR Description: senescence-associated protein, putative
  misc_feature (48)..(316): Homolog of NCBI NO: 17979386 NR Description: putative senescence-associated protein 5
  misc_feature (48)..(316): Homolog of NCBI NO: 15224802 NR Description: senescence-associated protein- related
  misc_feature (295)..(295): Xaa is any aa, unknown or other
QERSPPHHPTKKPKSSHSQSLAHSTPRTLTLARSVRLRPASPPAPAAMAVSNNITACLNFLALICTIPVVATGLWFASKQGAECARLARWPVAILGVLLLLVALAGFVGAYWNRQGLLAAYLFAMAALITLLLALLVFAFAVTHGSGAYDVPGRAYREYRLEGFSGWLRGYVAGDPRRWEGIRACLVASDTCKKLTMETAFFIAPEQFYQSDLSPLQSGCCKPPTACGYAYVSPTVWASPANPAADADCGAWSNDPRQLCYWCESCKAGMLGTLRDQWRRANVALVAATVALLVXYVIGCSAFKNAQTEDLFRRYKWSNNT

SEQ ID NO: 69086 - protein, 274 aa, Triticum aestivum
  peptide (1)..(274): Ceres Seq. ID no. 15222377
  misc_feature (3)..(245): Pfam Name: Tetraspanin family Pfam Description: Tetraspanin family
  misc_feature (1)..(260): Homolog of NCBI NO: 15238641 NR Description: senescence-associated protein family [Arabidopsis
  misc_feature (4)..(274): Homolog of NCBI NO: 21537169 NR Description: senescence-associated protein-like protein
  misc_feature (4)..(274): Homolog of NCBI NO: 15234743 NR Description: senescence-associated protein family [Arabidopsis
  misc_feature (4)..(258): Homolog of NCBI NO: 15234374 NR Description: senescence-associated protein, putative
  misc_feature (4)..(267): Homolog of NCBI NO: 20197174 NR Description: hypothetical protein [Arabidopsis thaliana]
  misc_feature (1)..(270): Homolog of NCBI NO: 29367553 NR Description: senescence-associated protein-like protein
  misc_feature (3)..(269): Homolog of NCBI NO: 3551954 NR Description: senescence-associated protein 5 [Hemerocallis
  misc_feature (1)..(269): Homolog of NCBI NO: 15237490 NR Description: senescence-associated protein, putative
  misc_feature (1)..(269): Homolog of NCBI NO: 17979386 NR Description: putative senescence-associated protein 5
  misc_feature (1)..(269): Homolog of NCBI NO: 15224802 NR Description: senescence-associated protein- related
  misc_feature (248)..(248): Xaa is any aa, unknown or other
MAVSNNITACLNFLALICTIPVVATGLWFASKQGAECARLARWPVAILGVLLLLVALAGFVGAYWNRQGLLAAYLFAMAALITLLLALLVFAFAVTHGSGAYDVPGRAYREYRLEGFSGWLRGYVAGDPRRWEGIRACLVASDTCKKLTMETAFFIAPEQFYQSDLSPLQSGCCKPPTACGYAYVSPTVWASPANPAADADCGAWSNDPRQLCYWCESCKAGMLGTLRDQWRRANVALVAATVALLVXYVIGCSAFKNAQTEDLFRRYKWSNNT

SEQ ID NO: 69087 - DNA, 1164 bp, Triticum aestivum
  misc_feature (1)..(1164): Ceres Seq. ID no. 13584797
aaaggcaactagacgctgagagctccctcctgcttacccgtgccggcggccgccgccgcaagcccagaggagggagcaacgccggcgcctggatcccccgagtgccgccgccgacccgtcccgtactccggccgtcgcccatcggctgcagcatcttggccctcgcgcgcctccgctgccgcttcctctccgccccgcctcagctgatggacatgtctggtccaagatggaagaagggcaaagacggcaaggatttcgcagctctggcagcagcccaacccatgtcaagcattgttgccaagctccagtcttcactggaaggatcaaagctcgtggcgactttatctagcaggggcggggatgcggttcttggcgtgaacccgcaggaagccgcgcttctgaaccgcgccgcctttggccgggcactggaaaatgtcggggccgagaaacagtggttccagctgggcgctgaggaggtcttctaccttcaccatgctttggagtgcatcgtggtcgagtcggcgaacaaggatctgatgagccaaggggagctgtgggatcacttgtgctccgcatcagagtcgtttcctgagatgtacagggcgtactcgcatctcaggtcgaagaactgggtggtgcggtcaggtttgcagtatggtacggatttcgtcgcttaccgtcatcaccccgcgctcgtccactcggagtttgctgtggttgtggttccggaaggatcggggttcggcggtaggtgtggccgcctgaaggtgtggtctgatctactgtgcgcgctccgagcttctggcagtgtggccaagacgctgctggttctgacaatctccagcaatgtctgtgaactgagatccccagattgtttggaacggttggttgttcatgaaagaactattacaaggtggatagcccagcagtgccgtgagcagcgatgtaaaccgtgcagagaagaagcatatacggaagaacaagatcacgcaggagaaactgtagtgttcaactattggggtctagtactaggtttcacagttctttctagcctgcttgtatacaagctgagattccgacaatcaagctaaatatttctctgtactcctattggtgatgtttaacttctcatcttattgcaatcctgtgccggtagtcttgtgc

SEQ ID NO: 69088 - protein, 362 aa, Triticum aestivum
  peptide (1)..(362): Ceres Seq. ID no. 13584798
  misc_feature (195)..(282): Pfam Name: tRNA intron endonuclease, catalytic C-terminal domain Pfam Description: tRNA intron endonuclease, catalytic C-terminal
  misc_feature (157)..(241): Homolog of NCBI NO: 15897369 NR Description: tRNA intron endonuclease, putative [Sulfolobus
  misc_feature (157)..(244): Homolog of NCBI NO: 24584677 NR Description: CG31812-PA [Drosophila melanogaster]
  misc_feature (157)..(314): Homolog of NCBI NO: 22760473 NR Description: unnamed protein product [Homo sapiens]
  misc_feature (150)..(314): Homolog of NCBI NO: 13376882 NR Description: hypothetical protein MGC2776 [Homo sapiens]
  misc_feature (150)..(314): Homolog of NCBI NO: 39841065 NR Description: similar to hypothetical protein MGC2776 [Mus
  misc_feature (150)..(314): Homolog of NCBI NO: 39644952 NR Description: MGC2776 protein [Homo sapiens]
  misc_feature (74)..(316): Homolog of NCBI NO: 6635256 NR Description: tRNA intron endonuclease [Arabidopsis thaliana]
  misc_feature (74)..(314): Homolog of NCBI NO: 15238643 NR Description: tRNA intron endonuclease - like protein
  misc_feature (74)..(316): Homolog of NCBI NO: 15231186 NR Description: expressed protein [Arabidopsis thaliana]
RQLDAESSLLLTRAGGRRRKPRGGSNAGAWIPRVPPPTRPVLRPSPIGCSILALARLRCRFLSAPPQLMDMSGPRWKKGKDGKDFAALAAAQPMSSIVAKLQSSLEGSKLVATLSSRGGDAVLGVNPQEAALLNRAAFGRALENVGAEKQWFQLGAEEVFYLHHALECIVVESANKDLMSQGELWDHLCSASESFPEMYRAYSHLRSKNWVVRSGLQYGTDFVAYRHHPALVHSEFAVVVVPEGSGFGGRCGRLKVWSDLLCALRASGSVAKTLLVLTISSNVCELRSPDCLERLVVHERTITRWIAQQCREQRCKPCREEAYTEEQDHAGETVVFNYWGLVLGFTVLSSLLVYKLRFRQSS

SEQ ID NO: 69089 - protein, 294 aa, Triticum aestivum
  peptide (1)..(294): Ceres Seq. ID no. 13584799
  misc_feature (127)..(214): Pfam Name: tRNA intron endonuclease, catalytic C-terminal domain Pfam Description: tRNA intron endonuclease, catalytic C-terminal
  misc_feature (89)..(173): Homolog of NCBI NO: 15897369 NR Description: tRNA intron endonuclease, putative [Sulfolobus
  misc_feature (89)..(176): Homolog of NCBI NO: 24584677 NR Description: CG31812-PA [Drosophila melanogaster]
  misc_feature (89)..(246): Homolog of NCBI NO: 22760473 NR Description: unnamed protein product [Homo sapiens]
  misc_feature (82)..(246): Homolog of NCBI NO: 13376882 NR Description: hypothetical protein MGC2776 [Homo sapiens]
  misc_feature (82)..(246): Homolog of NCBI NO: 39841065 NR Description: similar to hypothetical protein MGC2776 [Mus
  misc_feature (82)..(246): Homolog of NCBI NO: 39644952 NR Description: MGC2776 protein [Homo sapiens]
  misc_feature (6)..(248): Homolog of NCBI NO: 6635256 NR Description: tRNA intron endonuclease [Arabidopsis thaliana]
  misc_feature (6)..(246): Homolog of NCBI NO: 15238643 NR Description: tRNA intron endonuclease - like protein
  misc_feature (6)..(248): Homolog of NCBI NO: 15231186 NR Description: expressed protein [Arabidopsis thaliana]
MDMSGPRWKKGKDGKDFAALAAAQPMSSIVAKLQSSLEGSKLVATLSSRGGDAVLGVNPQEAALLNRAAFGRALENVGAEKQWFQLGAEEVFYLHHALECIVVESANKDLMSQGELWDHLCSASESFPEMYRAYSHLRSKNWVVRSGLQYGTDFVAYRHHPALVHSEFAVVVVPEGSGFGGRCGRLKVWSDLLCALRASGSVAKTLLVLTISSNVCELRSPDCLERLVVHERTITRWIAQQCREQRCKPCREEAYTEEQDHAGETVVFNYWGLVLGFTVLSSLLVYKLRFRQSS

SEQ ID NO: 69090 - protein, 292 aa, Triticum aestivum
  peptide (1)..(292): Ceres Seq. ID no. 13584800
  misc_feature (125)..(212): Pfam Name: tRNA intron endonuclease, catalytic C-terminal domain Pfam Description: tRNA intron endonuclease, catalytic C-terminal
  misc_feature (87)..(171): Homolog of NCBI NO: 15897369 NR Description: tRNA intron endonuclease, putative [Sulfolobus
  misc_feature (87)..(174): Homolog of NCBI NO: 24584677 NR Description: CG31812-PA [Drosophila melanogaster]
  misc_feature (87)..(244): Homolog of NCBI NO: 22760473 NR Description: unnamed protein product [Homo sapiens]
  misc_feature (80)..(244): Homolog of NCBI NO: 13376882 NR Description: hypothetical protein MGC2776 [Homo sapiens]
  misc_feature (80)..(244): Homolog of NCBI NO: 39841065 NR Description: similar to hypothetical protein MGC2776 [Mus
  misc_feature (80)..(244): Homolog of NCBI NO: 39644952 NR Description: MGC2776 protein [Homo sapiens]
  misc_feature (4)..(246): Homolog of NCBI NO: 6635256 NR Description: tRNA intron endonuclease [Arabidopsis thaliana]
  misc_feature (4)..(244): Homolog of NCBI NO: 15238643 NR Description: tRNA intron endonuclease - like protein
  misc_feature (4)..(246): Homolog of NCBI NO: 15231186 NR Description: expressed protein [Arabidopsis thaliana]
MSGPRWKKGKDGKDFAALAAAQPMSSIVAKLQSSLEGSKLVATLSSRGGDAVLGVNPQEAALLNRAAFGRALENVGAEKQWFQLGAEEVFYLHHALECIVVESANKDLMSQGELWDHLCSASESFPEMYRAYSHLRSKNWVVRSGLQYGTDFVAYRHHPALVHSEFAVVVVPEGSGFGGRCGRLKVWSDLLCALRASGSVAKTLLVLTISSNVCELRSPDCLERLVVHERTITRWIAQQCREQRCKPCREEAYTEEQDHAGETVVFNYWGLVLGFTVLSSLLVYKLRFRQSS

SEQ ID NO: 69091 - DNA, 1225 bp, Triticum aestivum
  misc_feature (1)..(1225): Ceres Seq. ID no. 12626036
tagaccaaagcctcgcacccaaatccgcaaagaaagaaagcaagcaagccaaacaaacgacgtttcagccaagaagaagacatgggggagcggcgcagtgacgaccgacgccaggagcccacggtggccagggcggacggccccccgattcccgccgacgagtccgacgacgagttcgagttctccttcgggagccgggagcctgccacgggcggcgccgcggccgacgagctcttcgccgacggccgcatcaggccgttctacccggtgttcggccgggtcttcgacgacgcgcacgtgccgtcggcgcccggccggaggccgctgggccggctgttcctcgaggaggcgcggaactcgtccgtcgggtccacgtcctcgtcctcctcctccgccgccacggacgccggggacctcgacggcgcgtccccggacagctactgcgtctggacgcccggcgcctcggccgcgtcctcgccggcgcggtcgccgcggaagagcggatccacggggtccttgtcgcggtggcgccgcgtcagcgacctcgtcgtcggccgcagccacagcgacggcagggacaagttccgattcctttccgcgccgccctcgcccgccagggagcagcccaaggggaagccacgaggccgggacagcaaagccgccaccgagctcgacacggtggccgccagccaccggcagttctacggcactaaggcctcccccggcgcggcgcggcggacgttcttgccgtaccggcaggatctcgtcggcctcttctccgcgcccaaggggctcagccggagccaatacttctgacttccaagctggcgcgtcccccgccccgccgtggagaaccagtttcaaaatgtgagatttcacatttgggttgaagtttcgaacttttgacccgggagcaactttgtgttcgtaaatggcgatggtaatactggattgttgcacgggattgagctagtccaaaaagacgaggcgtcaagtcagagcaagggaaatgtgaggcctaaattttggatccagtctgggataccgggctctccaagtcaatgtgaagttgtgatcgacatgtgaacatagtactaggaccaaaaaaaggactgtataggagattaaaatacacgtggaagctcagaaaagttttgtagtaatcatgtgttacctgtacatgcatgtatattgtactaccagaataatagattttttttcttgc

SEQ ID NO: 69092 - protein, 289 aa, Triticum aestivum
  peptide (1)..(289): Ceres Seq. ID no. 12626037
  misc_feature (13)..(262): Pfam Name: Glycoprotein GG/GX Pfam Description: Glycoprotein GG/GX
  misc_feature (39)..(281): Homolog of NCBI NO: 11360318 NR Description: probable mucin DKFZp434C196.1 - human (fragment)
  misc_feature (15)..(281): Homolog of NCBI NO: 13592175 NR Description: ppg3 [Leishmania major]
  misc_feature (2)..(287): Homolog of NCBI NO: 13592175 NR Description: ppg3 [Leishmania major]
  misc_feature (84)..(282): Homolog of NCBI NO: 39580893 NR Description: Hypothetical protein CBG21491 [Caenorhabditis
  misc_feature (32)..(282): Homolog of NCBI NO: 27375632 NR Description: blr0521 [Bradyrhizobium japonicum]
  misc_feature (15)..(281): Homolog of NCBI NO: 13592175 NR Description: ppg3 [Leishmania major]
  misc_feature (37)..(276): Homolog of NCBI NO: 15805485 NR Description: hypothetical protein [Deinococcus radiodurans]
  misc_feature (9)..(222): Homolog of NCBI NO: 39580893 NR Description: Hypothetical protein CBG21491 [Caenorhabditis
  misc_feature (37)..(279): Homolog of NCBI NO: 40747082 NR Description: hypothetical protein AN1120.2 [Aspergillus
  misc_feature (37)..(282): Homolog of NCBI NO: 23017082 NR Description: hypothetical protein [Thermobifida fusca]
RPKPRTQIRKERKQASQTNDVSAKKKTWGSGAVTTDARSPRWPGRTAPRFPPTSPTTSSSSPSGAGSLPRAAPRPTSSSPTAASGRSTRCSAGSSTTRTCRRRPAGGRWAGCSSRRRGTRPSGPRPRPPPPPPRTPGTSTARPRTATASGRPAPRPRPRRRGRRGRADPRGPCRGGAASATSSSAAATATAGTSSDSFPRRPRPPGSSPRGSHEAGTAKPPPSSTRWPPATGSSTALRPPPARRGGRSCRTGRISSASSPRPRGSAGANTSDFQAGASPAPPWRTSFKM

SEQ ID NO: 69093 - protein, 244 aa, Triticum aestivum
  peptide (1)..(244): Ceres Seq. ID no. 12626038
  misc_feature (1)..(241): Homolog of NCBI NO: 18409540 NR Description: expressed protein
  misc_feature (26)..(198): Homolog of NCBI NO: 18395275 NR Description: expressed protein
  misc_feature (26)..(198): Homolog of NCBI NO: 21593128 NR Description: unknown [Arabidopsis thaliana]
  misc_feature (1)..(240): Homolog of NCBI NO: 15241966 NR Description: putative protein; protein id: At5g62770.1
  misc_feature (79)..(242): Homolog of NCBI NO: 34912066 NR Description: P0445H04.35 [Oryza sativa (japonica
  misc_feature (7)..(243): Homolog of NCBI NO: 34911600 NR Description: P0004A09.25 [Oryza sativa (japonica
MGERRSDDRRQEPTVARADGPPIPADESDDEFEFSFGSREPATGGAAADELFADGRIRPFYPVFGRVFDDAHVPSAPGRRPLGRLFLEEARNSSVGSTSSSSSSAATDAGDLDGASPDSYCVWTPGASAASSPARSPRKSGSTGSLSRWRRVSDLVVGRSHSDGRDKFRFLSAPPSPAREQPKGKPRGRDSKAATELDTVAASHRQFYGTKASPGAARRTFLPYRQDLVGLFSAPKGLSRSQYF

SEQ ID NO: 69094 - DNA, 1569 bp, Triticum aestivum
  misc_feature (1)..(1569): Ceres Seq. ID no. 13656091
gaaagccggctcttgctcttgttcttcgtcttcctctacactgcatatttacacatgcaagaattgagaagcacaacaaagagcgcgcagagctaattaagctaagctaggtaaacaaggtagtccacttggttgcaggatggcgtgggtgagggacatgaagacgaagctcgaggacgccgagctgccggacaaggtgcagagatggccgaagcactgcattttcagcgtcccaccgcgcttcaagatggtcgacagcagcgtctacaagccgcagactgtgtctctcggcccattccatcatggcgctcaggacctgaaatccatggaggagcacaagttgagggctgtccgtcacctcctggcccgggacagctacataacctcccttgacgaccttgtcagggccgtggaagaggtggccgacgagctggaggactcctacatggacctaagtggagagtggcgtggcaaggagaacaggggcaagttcctcgagatgatgatcacggacggctgcttcctgctggaggtgatgaggacggacgcgacccaaaaggaggactccgttgtaaagggctatgcgcacgaccccgtcttcagctggtatggcatacaacacatcaagccgttcgtccaacgtgacatgctcttggtagagaaccagctgccactcaggttgctccagagaatcgttgccatggaggaaacgcactctccgaggcagaacacagattccataaattgcatggtgctcaagttcctggggcagaaagatgcacagcccagatatgagttgggactccacccgctcgacatctaccggacgagccagttcaggggcatccaagagcatattaacactgccagttgtctgatgatccatcatcaacatatgatgcgggaggagacccatcgtccacagagacccctggcccgatctgcgcgggagctgaccgaggcagggatccggttactgcccatagagacaagccgcctcaacgatttccggttcgataggagtgatgggacgctccaaatgcccaagatccacgtgcatgactccaccgcctacatgttccgcaacatgatggcgttcgaggtgctgcgcgtcggcaccaccaacgacgtgacggcgtacgtcatgtttctcaaggacatcgtcgactccgcctacgatgttcgcctgctggtgaggaacggggtcctggagcacgaccttgccaacgacaacgccgtggtgaggctcttcaacggcctcaccagggacgtgacaaggaactgggagaatcagctggcgtacatgaaggtgcgtgaagacgtggagaactactgcatgacccaccaccgcaccaactgcgtgcgcctctttctcaatcaatcctgggcctacctcatgaccaagtacttgagcaacccctggacattccttggcctcgtcaccgccaccttgctcctcgtcgcagatatcgtgcaggccgtgtatgcagtcaaatcgtacaaagagggcaaatgaatgtattaatcagaagcatttcatacatttgttgtttttattcaattgttttg

SEQ ID NO: 69095 - protein, 458 aa, Triticum aestivum
  peptide (1)..(458): Ceres Seq. ID no. 13656092
  misc_feature (23)..(440): Pfam Name: Plant protein of unknown function Pfam Description: Plant protein of unknown function
  misc_feature (1)..(189): Homolog of NCBI NO: 15229682 NR Description: expressed protein [Arabidopsis thaliana]
  misc_feature (1)..(179): Homolog of NCBI NO: 15229691 NR Description: hypothetical protein [Arabidopsis thaliana]
  misc_feature (181)..(378): Homolog of NCBI NO: 15229691 NR Description: hypothetical protein [Arabidopsis thaliana]
  misc_feature (1)..(208): Homolog of NCBI NO: 32490273 NR Description: OSJNBb0116K07.15 [Oryza sativa (japonica
  misc_feature (222)..(454): Homolog of NCBI NO: 32490273 NR Description: OSJNBb0116K07.15 [Oryza sativa (japonica
  misc_feature (2)..(454): Homolog of NCBI NO: 15229687 NR Description: hypothetical protein [Arabidopsis thaliana]
  misc_feature (1)..(454): Homolog of NCBI NO: 15229681 NR Description: hypothetical protein [Arabidopsis thaliana]
  misc_feature (1)..(454): Homolog of NCBI NO: 15229680 NR Description: hypothetical protein [Arabidopsis thaliana]
  misc_feature (1)..(454): Homolog of NCBI NO: 15229684 NR Description: hypothetical protein [Arabidopsis thaliana]
  misc_feature (1)..(454): Homolog of NCBI NO: 38636935 NR Description: hypothetical protein [Oryza sativa (japonica
MAWVRDMKTKLEDAELPDKVQRWPKHCIFSVPPRFKMVDSSVYKPQTVSLGPFHHGAQDLKSMEEHKLRAVRHLLARDSYITSLDDLVRAVEEVADELEDSYMDLSGEWRGKENRGKFLEMMITDGCFLLEVMRTDATQKEDSVVKGYAHDPVFSWYGIQHIKPFVQRDMLLVENQLPLRLLQRIVAMEETHSPRQNTDSINCMVLKFLGQKDAQPRYELGLHPLDIYRTSQFRGIQEHINTASCLMIHHQHMMREETHRPQRPLARSARELTEAGIRLLPIETSRLNDFRFDRSDGTLQMPKIHVHDSTAYMFRNMMAFEVLRVGTTNDVTAYVMFLKDIVDSAYDVRLLVRNGVLEHDLANDNAVVRLFNGLTRDVTRNWENQLAYMKVREDVENYCMTHHRTNCVRLFLNQSWAYLMTKYLSNPWTFLGLVTATLLLVADIVQAVYAVKSYKEGK

SEQ ID NO: 69096 - protein, 452 aa, Triticum aestivum
  peptide (1)..(452): Ceres Seq. ID no. 13656093
  misc_feature (17)..(434): Pfam Name: Plant protein of unknown function Pfam Description: Plant protein of unknown function
  misc_feature (1)..(183): Homolog of NCBI NO: 15229682 NR Description: expressed protein [Arabidopsis thaliana]
  misc_feature (1)..(173): Homolog of NCBI NO: 15229691 NR Description: hypothetical protein [Arabidopsis thaliana]
  misc_feature (175)..(372): Homolog of NCBI NO: 15229691 NR Description: hypothetical protein [Arabidopsis thaliana]
  misc_feature (1)..(202): Homolog of NCBI NO: 32490273 NR Description: OSJNBb0116K07.15 [Oryza sativa (japonica
  misc_feature (216)..(448): Homolog of NCBI NO: 32490273 NR Description: OSJNBb0116K07.15 [Oryza sativa (japonica
  misc_feature (1)..(448): Homolog of NCBI NO: 15229687 NR Description: hypothetical protein [Arabidopsis thaliana]
  misc_feature (1)..(448): Homolog of NCBI NO: 15229681 NR Description: hypothetical protein [Arabidopsis thaliana]
  misc_feature (1)..(448): Homolog of NCBI NO: 15229680 NR Description: hypothetical protein [Arabidopsis thaliana]
  misc_feature (1)..(448): Homolog of NCBI NO: 15229684 NR Description: hypothetical protein [Arabidopsis thaliana]
  misc_feature (1)..(448): Homolog of NCBI NO: 38636935 NR Description: hypothetical protein [Oryza sativa (japonica
MKTKLEDAELPDKVQRWPKHCIFSVPPRFKMVDSSVYKPQTVSLGPFHHGAQDLKSMEEHKLRAVRHLLARDSYITSLDDLVRAVEEVADELEDSYMDLSGEWRGKENRGKFLEMMITDGCFLLEVMRTDATQKEDSVVKGYAHDPVFSWYGIQHIKPFVQRDMLLVENQLPLRLLQRIVAMEETHSPRQNTDSINCMVLKFLGQKDAQPRYELGLHPLDIYRTSQFRGIQEHINTASCLMIHHQHMMREETHRPQRPLARSARELTEAGIRLLPIETSRLNDFRFDRSDGTLQMPKIHVHDSTAYMFRNMMAFEVLRVGTTNDVTAYVMFLKDIVDSAYDVRLLVRNGVLEHDLANDNAVVRLFNGLTRDVTRNWENQLAYMKVREDVENYCMTHHRTNCVRLFLNQSWAYLMTKYLSNPWTFLGLVTATLLLVADIVQAVYAVKSYKEGK

SEQ ID NO: 69097 - protein, 422 aa, Triticum aestivum
  peptide (1)..(422): Ceres Seq. ID no. 13656094
  misc_feature (1)..(404): Pfam Name: Plant protein of unknown function Pfam Description: Plant protein of unknown function
  misc_feature (1)..(153): Homolog of NCBI NO: 15229682 NR Description: expressed protein [Arabidopsis thaliana]
  misc_feature (1)..(143): Homolog of NCBI NO: 15229691 NR Description: hypothetical protein [Arabidopsis thaliana]
  misc_feature (145)..(342): Homolog of NCBI NO: 15229691 NR Description: hypothetical protein [Arabidopsis thaliana]
  misc_feature (1)..(172): Homolog of NCBI NO: 32490273 NR Description: OSJNBb0116K07.15 [Oryza sativa (japonica
  misc_feature (186)..(418): Homolog of NCBI NO: 32490273 NR Description: OSJNBb0116K07.15 [Oryza sativa (japonica
  misc_feature (1)..(418): Homolog of NCBI NO: 15229687 NR Description: hypothetical protein [Arabidopsis thaliana]
  misc_feature (1)..(418): Homolog of NCBI NO: 15229681 NR Description: hypothetical protein [Arabidopsis thaliana]
  misc_feature (1)..(418): Homolog of NCBI NO: 15229680 NR Description: hypothetical protein [Arabidopsis thaliana]
  misc_feature (1)..(418): Homolog of NCBI NO: 15229684 NR Description: hypothetical protein [Arabidopsis thaliana]
  misc_feature (1)..(418): Homolog of NCBI NO: 38636935 NR Description: hypothetical protein [Oryza sativa (japonica
MVDSSVYKPQTVSLGPFHHGAQDLKSMEEHKLRAVRHLLARDSYITSLDDLVRAVEEVADELEDSYMDLSGEWRGKENRGKFLEMMITDGCFLLEVMRTDATQKEDSVVKGYAHDPVFSWYGIQHIKPFVQRDMLLVENQLPLRLLQRIVAMEETHSPRQNTDSINCMVLKFLGQKDAQPRYELGLHPLDIYRTSQFRGIQEHINTASCLMIHHQHMMREETHRPQRPLARSARELTEAGIRLLPIETSRLNDFRFDRSDGTLQMPKIHVHDSTAYMFRNMMAFEVLRVGTTNDVTAYVMFLKDIVDSAYDVRLLVRNGVLEHDLANDNAVVRLFNGLTRDVTRNWENQLAYMKVREDVENYCMTHHRTNCVRLFLNQSWAYLMTKYLSNPWTFLGLVTATLLLVADIVQAVYAVKSYKEGK

SEQ ID NO: 69098 - DNA, 1378 bp, Triticum aestivum
  misc_feature (1)..(1378): Ceres Seq. ID no. 13597697
agcagatatttaatccgtttgcgtgccacggcagccatggcgagcgcgcccaatggggtcgcggcctttcacgtgctgccgctgcccgtcgggggccaggtggtgtngcgagaccaatcatatcccgctcccactcgcgacacctgtgctccctgacgcgtgtcccttgcgcgtccttgtataaaaccaacctgcttgccgccgtggtctactcgcaccgcgccgagaaagtagcactcagcgtaactgagactagtcgctgccgttctcttctgcttccgccgaggcgtctggtgtatgatggagaggaagggagggtgctgcttggcgccgaggtacgcagccggggcccaggcaggccaggggtggcacatgggaagggccatgctgaagtttaggcccatcgcgccaaagccggcggtgatggcgcctgcgccgatgccggccgtgcccgctgggaaggggaaggggagacggaaggcggttgcagggccagggggtaccgggaggaggggacggaagcccaagaagcaggccacggtggctgcaccgacgacgcaaaagttggactacgtgcaggacaagcctttgtcctcgccgtcctcctcctcgtcggggatgacgtccgtcgactcgtcgcctcctccacccctgccgctcatgcctgtgctgccggcagaggaggggttcggtggggcggcgccggtggcgaatctggcgcctgcccacgttgccggactggtcctgccgccgcaggcgctgcggcaagcggtgtcctgggtgacggttgaggacgtcacaggcatctggcgcgacggcgaggcgccgtacgctgcggcctgcggcggcgacgaggccccaacgttcgtgtccgaccagtgcggccgcgtcacgtggacaaacgtggctttcaaccgggcagtgtccggtagggaggacgtagacgcagccatggccccgtcggcggccgcttccgaggtgcgggtggtgctcgccgccaaggatggcgcccccgtgccggcgtggggctcctgtgccggtttcacctgtcgggtgcgcgtcccgtacgcatgccctcgccgaggttccctcgtggccccgtgcgacgtgtggcggctagacgctggtggctacctctggcggctcgaccttcaggccaccctcagcctctccctcggcggcttcatttgactgcgtacgcattccatgtacggagacgtatgaaccaatcaaaatcatgtgttagtctgcgctatgattatggtattgatttagcggtcatgactcattaccggatttggtatactcttattatgaactgaactgtagagtagtttaagaagaggggtagagatgcaagtgcaaaagatttctttcc

SEQ ID NO: 69099 - protein, 297 aa, Triticum aestivum
  peptide (1)..(297): Ceres Seq. ID no. 13597698
  misc_feature (154)..(293): Homolog of NCBI NO: 15237495 NR Description: hypothetical protein [Arabidopsis thaliana]
  misc_feature (185)..(293): Homolog of NCBI NO: 15237494 NR Description: hypothetical protein [Arabidopsis thaliana]
  misc_feature (160)..(293): Homolog of NCBI NO: 15232126 NR Description: expressed protein [Arabidopsis thaliana]
  misc_feature (2)..(291): Homolog of NCBI NO: 15240662 NR Description: expressed protein [Arabidopsis thaliana]
  misc_feature (2)..(291): Homolog of NCBI NO: 15242729 NR Description: expressed protein [Arabidopsis thaliana]
  misc_feature (2)..(291): Homolog of NCBI NO: 21537225 NR Description: unknown [Arabidopsis thaliana]
  misc_feature (2)..(291): Homolog of NCBI NO: 18408645 NR Description: expressed protein [Arabidopsis thaliana]
MMERKGGCCLAPRYAAGAQAGQGWHMGRAMLKFRPIAPKPAVMAPAPMPAVPAGKGKGRRKAVAGPGGTGRRGRKPKKQATVAAPTTQKLDYVQDKPLSSPSSSSSGMTSVDSSPPPPLPLMPVLPAEEGFGGAAPVANLAPAHVAGLVLPPQALRQAVSWVTVEDVTGIWRDGEAPYAAACGGDEAPTFVSDQCGRVTWTNVAFNRAVSGREDVDAAMAPSAAASEVRVVLAAKDGAPVPAWGSCAGFTCRVRVPYACPRRGSLVAPCDVWRLDAGGYLWRLDLQATLSLSLGGFI

SEQ ID NO: 69100 - protein, 296 aa, Triticum aestivum
  peptide (1)..(296): Ceres Seq. ID no. 13597699
  misc_feature (153)..(292): Homolog of NCBI NO: 15237495 NR Description: hypothetical protein [Arabidopsis thaliana]
  misc_feature (184)..(292): Homolog of NCBI NO: 15237494 NR Description: hypothetical protein [Arabidopsis thaliana]
  misc_feature (159)..(292): Homolog of NCBI NO: 15232126 NR Description: expressed protein [Arabidopsis thaliana]
  misc_feature (1)..(290): Homolog of NCBI NO: 15240662 NR Description: expressed protein [Arabidopsis thaliana]
  misc_feature (1)..(290): Homolog of NCBI NO: 15242729 NR Description: expressed protein [Arabidopsis thaliana]
  misc_feature (1)..(290): Homolog of NCBI NO: 21537225 NR Description: unknown [Arabidopsis thaliana]
  misc_feature (1)..(290): Homolog of NCBI NO: 18408645 NR Description: expressed protein [Arabidopsis thaliana]
MERKGGCCLAPRYAAGAQAGQGWHMGRAMLKFRPIAPKPAVMAPAPMPAVPAGKGKGRRKAVAGPGGTGRRGRKPKKQATVAAPTTQKLDYVQDKPLSSPSSSSSGMTSVDSSPPPPLPLMPVLPAEEGFGGAAPVANLAPAHVAGLVLPPQALRQAVSWVTVEDVTGIWRDGEAPYAAACGGDEAPTFVSDQCGRVTWTNVAFNRAVSGREDVDAAMAPSAAASEVRVVLAAKDGAPVPAWGSCAGFTCRVRVPYACPRRGSLVAPCDVWRLDAGGYLWRLDLQATLSLSLGGFI

SEQ ID NO: 69101 - protein, 272 aa, Triticum aestivum
  peptide (1)..(272): Ceres Seq. ID no. 13597700
  misc_feature (129)..(268): Homolog of NCBI NO: 15237495 NR Description: hypothetical protein [Arabidopsis thaliana]
  misc_feature (160)..(268): Homolog of NCBI NO: 15237494 NR Description: hypothetical protein [Arabidopsis thaliana]
  misc_feature (135)..(268): Homolog of NCBI NO: 15232126 NR Description: expressed protein [Arabidopsis thaliana]
  misc_feature (1)..(266): Homolog of NCBI NO: 15240662 NR Description: expressed protein [Arabidopsis thaliana]
  misc_feature (1)..(266): Homolog of NCBI NO: 15242729 NR Description: expressed protein [Arabidopsis thaliana]
  misc_feature (1)..(266): Homolog of NCBI NO: 21537225 NR Description: unknown [Arabidopsis thaliana]
  misc_feature (1)..(266): Homolog of NCBI NO: 18408645 NR Description: expressed protein [Arabidopsis thaliana]
MGRAMLKFRPIAPKPAVMAPAPMPAVPAGKGKGRRKAVAGPGGTGRRGRKPKKQATVAAPTTQKLDYVQDKPLSSPSSSSSGMTSVDSSPPPPLPLMPVLPAEEGFGGAAPVANLAPAHVAGLVLPPQALRQAVSWVTVEDVTGIWRDGEAPYAAACGGDEAPTFVSDQCGRVTWTNVAFNRAVSGREDVDAAMAPSAAASEVRVVLAAKDGAPVPAWGSCAGFTCRVRVPYACPRRGSLVAPCDVWRLDAGGYLWRLDLQATLSLSLGGFI

SEQ ID NO: 69102 - DNA, 1188 bp, Triticum aestivum
  misc_feature (1)..(1188): Ceres Seq. ID no. 12586854
gtcgcagaacagtccgccacgcgaacaccacagcccaaacctcgcgaaccaaaccctgcacagcagatggcgcccgtggcgggcagcagcttctttcaggaagcgcggctcccggagcagcgggccgtcgagggcgtcgccttccccgcggtgctcgtcccgaccgccgggcccccggggccgggagaggggagcctcgacgagttcctggccgccgtgcggtcggagcgggcgtcccgggtggagccgctgctgcgggaggcaggggcggtgctgctgcgggggttccccgcgcggacggcggcggacttcgacgccgccgtggaggcgttcgggtacgaggagctgccgtacgtcggcggcgcggcgccccggaccaacgtggtggggcgggtgttcaccgccaacgagtcgccgcccgaccagaagatccccttccaccatgagatggcgcaggttccgacttttccggcaaaactgttcttcttctgtgaggtagaaccaaaaagtggtggagagacaccaatagtgctgagccactatgtgtataagaggatgaaggaaaacttccctgaatttgtggagaaattggagaagcatggcctgatatacacaagggtattgggagagggtgacgacccatcttctccaatcggccgtggatggcaatctacatttctcactaaagataaatccgttgccgaggaaagggctgcgaagcttgggatgaagctggaatggacccacgacggggttaaaacagtgatgggtccaataccagcagtcaagtgggacgagagccgagggaggaagatatggttcaacagcatggtcgccgcctacacagggtggaaggacgcccgcaatgatccagttaaggccgtcaccttcggcgacggctcgcccttgcccgccgatgtcatagaggaatgtggcaagatcctagaagaagaatgcgtcgcggttccatggcagcaaggtgacatccttctcatcgacaactgggcggtgctgcactcacggcggtcctttgagcccccacggcgcgtacttgcttctctctgtaaatagcatgtaaatgttcgacattagagatgaggctttgctcgggattgatccgcacttctgcgggttgtatgtaccatgtacgtgatcggatttgcacatacaaaactggaataattttgt

SEQ ID NO: 69103 - protein, 356 aa, Triticum aestivum
  peptide (1)..(356): Ceres Seq. ID no. 12586855
  misc_feature (76)..(356): Homolog of NCBI NO: 28869349 NR Description: pyoverdine biosynthesis regulatory gene, putative
  misc_feature (63)..(354): Homolog of NCBI NO: 29830181 NR Description: putative SyrP-like protein [Streptomyces
  misc_feature (59)..(356): Homolog of NCBI NO: 23106239 NR Description: hypothetical protein [Azotobacter vinelandii]
  misc_feature (76)..(356): Homolog of NCBI NO: 23468981 NR Description: hypothetical protein [Pseudomonas syringae pv.
  misc_feature (53)..(356): Homolog of NCBI NO: 22985582 NR Description: hypothetical protein [Burkholderia fungorum]
  misc_feature (44)..(354): Homolog of NCBI NO: 26541507 NR Description: putative regulatory protein [Streptomyces
  misc_feature (85)..(356): Homolog of NCBI NO: 23128425 NR Description: hypothetical protein [Nostoc punctiforme]
  misc_feature (59)..(356): Homolog of NCBI NO: 26990914 NR Description: syrP protein, putative [Pseudomonas putida
  misc_feature (34)..(356): Homolog of NCBI NO: 15232542 NR Description: unknown protein; protein id: At3g21360.1
  misc_feature (23)..(354): Homolog of NCBI NO: 34906388 NR Description: P0710E05.6 [Oryza sativa (japonica
VAEQSATRTPQPKPREPNPAQQMAPVAGSSFFQEARLPEQRAVEGVAFPAVLVPTAGPPGPGEGSLDEFLAAVRSERASRVEPLLREAGAVLLRGFPARTAADFDAAVEAFGYEELPYVGGAAPRTNVVGRVFTANESPPDQKIPFHHEMAQVPTFPAKLFFFCEVEPKSGGETPIVLSHYVYKRMKENFPEFVEKLEKHGLIYTRVLGEGDDPSSPIGRGWQSTFLTKDKSVAEERAAKLGMKLEWTHDGVKTVMGPIPAVKWDESRGRKIWFNSMVAAYTGWKDARNDPVKAVTFGDGSPLPADVIEECGKILEEECVAVPWQQGDILLIDNWAVLHSRRSFEPPRRVLASLCK

SEQ ID NO: 69104 - protein, 334 aa, Triticum aestivum
  peptide (1)..(334): Ceres Seq. ID no. 12586856
  misc_feature (54)..(334): Homolog of NCBI NO: 28869349 NR Description: pyoverdine biosynthesis regulatory gene, putative
  misc_feature (41)..(332): Homolog of NCBI NO: 29830181 NR Description: putative SyrP-like protein [Streptomyces
  misc_feature (37)..(334): Homolog of NCBI NO: 23106239 NR Description: hypothetical protein [Azotobacter vinelandii]
  misc_feature (54)..(334): Homolog of NCBI NO: 23468981 NR Description: hypothetical protein [Pseudomonas syringae pv.
  misc_feature (31)..(334): Homolog of NCBI NO: 22985582 NR Description: hypothetical protein [Burkholderia fungorum]
  misc_feature (22)..(332): Homolog of NCBI NO: 26541507 NR Description: putative regulatory protein [Streptomyces
  misc_feature (63)..(334): Homolog of NCBI NO: 23128425 NR Description: hypothetical protein [Nostoc punctiforme]
  misc_feature (37)..(334): Homolog of NCBI NO: 26990914 NR Description: syrP protein, putative [Pseudomonas putida
  misc_feature (12)..(334): Homolog of NCBI NO: 15232542 NR Description: unknown protein; protein id: At3g21360.1
  misc_feature (1)..(332): Homolog of NCBI NO: 34906388 NR Description: P0710E05.6 [Oryza sativa (japonica
MAPVAGSSFFQEARLPEQRAVEGVAFPAVLVPTAGPPGPGEGSLDEFLAAVRSERASRVEPLLREAGAVLLRGFPARTAADFDAAVEAFGYEELPYVGGAAPRTNVVGRVFTANESPPDQKIPFHHEMAQVPTFPAKLFFFCEVEPKSGGETPIVLSHYVYKRMKENFPEFVEKLEKHGLIYTRVLGEGDDPSSPIGRGWQSTFLTKDKSVAEERAAKLGMKLEWTHDGVKTVMGPIPAVKWDESRGRKIWFNSMVAAYTGWKDARNDPVKAVTFGDGSPLPADVIEECGKILEEECVAVPWQQGDILLIDNWAVLHSRRSFEPPRRVLASLCK

SEQ ID NO: 69105 - protein, 207 aa, Triticum aestivum
  peptide (1)..(207): Ceres Seq. ID no. 12586857
  misc_feature (1)..(207): Homolog of NCBI NO: 28869349 NR Description: pyoverdine biosynthesis regulatory gene, putative
  misc_feature (1)..(205): Homolog of NCBI NO: 29830181 NR Description: putative SyrP-like protein [Streptomyces
  misc_feature (1)..(207): Homolog of NCBI NO: 23106239 NR Description: hypothetical protein [Azotobacter vinelandii]
  misc_feature (1)..(207): Homolog of NCBI NO: 23468981 NR Description: hypothetical protein [Pseudomonas syringae pv.
  misc_feature (1)..(207): Homolog of NCBI NO: 22985582 NR Description: hypothetical protein [Burkholderia fungorum]
  misc_feature (1)..(205): Homolog of NCBI NO: 26541507 NR Description: putative regulatory protein [Streptomyces
  misc_feature (1)..(207): Homolog of NCBI NO: 23128425 NR Description: hypothetical protein [Nostoc punctiforme]
  misc_feature (1)..(207): Homolog of NCBI NO: 26990914 NR Description: syrP protein, putative [Pseudomonas putida
  misc_feature (1)..(207): Homolog of NCBI NO: 15232542 NR Description: unknown protein; protein id: At3g21360.1
  misc_feature (1)..(205): Homolog of NCBI NO: 34906388 NR Description: P0710E05.6 [Oryza sativa (japonica
MAQVPTFPAKLFFFCEVEPKSGGETPIVLSHYVYKRMKENFPEFVEKLEKHGLIYTRVLGEGDDPSSPIGRGWQSTFLTKDKSVAEERAAKLGMKLEWTHDGVKTVMGPIPAVKWDESRGRKIWFNSMVAAYTGWKDARNDPVKAVTFGDGSPLPADVIEECGKILEEECVAVPWQQGDILLIDNWAVLHSRRSFEPPRRVLASLCK

SEQ ID NO: 69106 - DNA, 1140 bp, Triticum aestivum
  misc_feature (1)..(1140): Ceres Seq. ID no. 13585461
aatcgagcacgccgtccacttccgaggtcgcgtgcgtggatagggtttgcttcgccgccgtcccgccgactgcgcctccccggccctcatcgtcgcgccaccgccggggagaccaggccaccaccagccgagccaccgatcgatcgatcgaccgaggcggtgatggcgcaccagatccccaaggtcgcgcacaccctcgtcgagatcgccgaggtcgcgcgctacgcctacgagcaccgctccggccacgctccggaccacgacggcgccacggcgctggccgccgacggggaggaggccgcgcggctgcgggcggagaacgccgtcctccgcgcccgcctcgcggacgacctcgccctccttcgcgagcttcagggcgcgccctttgtttcccaggagtgccctcccgacttgcataatcgtcttgtagcatcagtcaacaatgctggcttccttgctcatcttgagaaagtacgagacgagccgctgcatcaacataccaaactatctattggcggtgtgacagaggtggatattggagatattccttacactaaagatgaggggaagactgggtcatggctcttggtttcctgtgacactgctgggggcaatttggaggaaattagtggaattgatgacgaaaattatgtgatggttaatgaagatgacatcgtcgatgctattgctacctttgttgctaggtgcattcttgaagatccaaagtccaagtcattatcatcgaaagagctgcaaaaagctgttgcatcggcattgagcagcatgacagaccggaagaaatggataagtttctgggaggctggaaaggtgatttacatactggcaacttgggggatcacaatagcagggctgtacaggagtcgtgctgtcctgaagatggcagccaaaggagctgtcgtctccaccaaatttatcatgaaggcattgtgaggtgccaagtgccgaatagtggcatcatgatcacacgcaacggtcagcaagttgtaaatacaaactcatcgtgtcaactgtacatatgtgttgtgtgatatgatttatctgagaactattcgttggtcagatgtgctgtaacttctgaaatgataacgatttctctcatcgtgtatgaataatgggggc

SEQ ID NO: 69107 - protein, 316 aa, Triticum aestivum
  peptide (1)..(316): Ceres Seq. ID no. 13585462
  misc_feature (191)..(314): Homolog of NCBI NO: 30695733 NR Description: expressed protein [Arabidopsis thaliana]
  misc_feature (191)..(314): Homolog of NCBI NO: 30686591 NR Description: expressed protein [Arabidopsis thaliana]
  misc_feature (56)..(316): Homolog of NCBI NO: 25373234 NR Description: hypothetical protein T12C22.4 [imported] -
  misc_feature (56)..(316): Homolog of NCBI NO: 15219442 NR Description: expressed protein [Arabidopsis thaliana]
  misc_feature (55)..(307): Homolog of NCBI NO: 19033559 NR Description: putative growth factor [Oryza sativa (japonica
NRARRPLPRSRAWIGFASPPSRRLRLPGPHRRATAGETRPPPAEPPIDRSTEAVMAHQIPKVAHTLVEIAEVARYAYEHRSGHAPDHDGATALAADGEEAARLRAENAVLRARLADDLALLRELQGAPFVSQECPPDLHNRLVASVNNAGFLAHLEKVRDEPLHQHTKLSIGGVTEVDIGDIPYTKDEGKTGSWLLVSCDTAGGNLEEISGIDDENYVMVNEDDIVDAIATFVARCILEDPKSKSLSSKELQKAVASALSSMTDRKKWISFWEAGKVIYILATWGITIAGLYRSRAVLKMAAKGAVVSTKFIMKAL

SEQ ID NO: 69108 - protein, 262 aa, Triticum aestivum
  peptide (1)..(262): Ceres Seq. ID no. 13585463
  misc_feature (137)..(260): Homolog of NCBI NO: 30695733 NR Description: expressed protein [Arabidopsis thaliana]
  misc_feature (137)..(260): Homolog of NCBI NO: 30686591 NR Description: expressed protein [Arabidopsis thaliana]
  misc_feature (2)..(262): Homolog of NCBI NO: 25373234 NR Description: hypothetical protein T12C22.4 [imported] -
  misc_feature (2)..(262): Homolog of NCBI NO: 15219442 NR Description: expressed protein [Arabidopsis thaliana]
  misc_feature (1)..(253): Homolog of NCBI NO: 19033559 NR Description: putative growth factor [Oryza sativa (japonica
MAHQIPKVAHTLVEIAEVARYAYEHRSGHAPDHDGATALAADGEEAARLRAENAVLRARLADDLALLRELQGAPFVSQECPPDLHNRLVASVNNAGFLAHLEKVRDEPLHQHTKLSIGGVTEVDIGDIPYTKDEGKTGSWLLVSCDTAGGNLEEISGIDDENYVMVNEDDIVDAIATFVARCILEDPKSKSLSSKELQKAVASALSSMTDRKKWISFWEAGKVIYILATWGITIAGLYRSRAVLKMAAKGAVVSTKFIMKAL

SEQ ID NO: 69109 - DNA, 426 bp, Triticum aestivum
  misc_feature (1)..(426): Ceres Seq. ID no. 13655970
acaagcccaccaccattgcactcgaaagcttcagctcaagctcaagctccacatcaacaatggcgagcagcagctcaatgctggccgtcctagccaccctggccctgctgctctccccagccgcctcagccctgtcgtccacgctgtccccggacttccacgcggagacgtgcccgcagctggacggcatcgtgcgcgcggcggtgcaggccgccctcacgagcgaaatcgccatcgccgctggcctcgtccgcatctacttccacgactgcttcccgcagggctgcgacgcctccatcctcctcaactccacctccgcccgcgagacggcgctgggccccaacctcagcatccagccgcgcgccatgcagctcgtcgagtccatccgctccacggcgcacgccgcctgcgggcccgttgtctcct

SEQ ID NO: 69110 - protein, 141 aa, Triticum aestivum
  peptide (1)..(141): Ceres Seq. ID no. 13655971
QAHHHCTRKLQLKLKLHINNGEQQLNAGRPSHPGPAALPSRLSPVVHAVPGLPRGDVPAAGRHRARGGAGRPHERNRHRRWPRPHLLPRLLPAGLRRLHPPQLHLRPRDGAGPQPQHPAARHAARRVHPLHGARRLRARCL

SEQ ID NO: 69111 - protein, 141 aa, Triticum aestivum
  peptide (1)..(141): Ceres Seq. ID no. 13655972
  misc_feature (64)..(140): Pfam Name: Peroxidase Pfam Description: Peroxidase
  misc_feature (20)..(140): Homolog of NCBI NO: 7433077 NR Description: probable peroxidase (EC 1.11.1.7) precursor -
  misc_feature (27)..(140): Homolog of NCBI NO: 7433075 NR Description: probable peroxidase (EC 1.11.1.-) 1 precursor,
  misc_feature (27)..(140): Homolog of NCBI NO: 38345507 NR Description: OSJNBa0039K24.8 [Oryza sativa (japonica
  misc_feature (20)..(140): Homolog of NCBI NO: 5777627 NR Description: CAA303715.1 protein [Oryza sativa]
  misc_feature (26)..(140): Homolog of NCBI NO: 32480042 NR Description: OSJNBa0039K24.5 [Oryza sativa (japonica
  misc_feature (26)..(140): Homolog of NCBI NO: 5777628 NR Description: CAA303716.1 protein [Oryza sativa]
  misc_feature (33)..(140): Homolog of NCBI NO: 5777624 NR Description: CAA303712.1 protein [Oryza sativa]
  misc_feature (26)..(140): Homolog of NCBI NO: 38345508 NR Description: OSJNBa0039K24.10 [Oryza sativa (japonica
  misc_feature (16)..(140): Homolog of NCBI NO: 32480046 NR Description: OSJNBa0039K24.9 [Oryza sativa (japonica
  misc_feature (20)..(140): Homolog of NCBI NO: 38345511 NR Description: OSJNBa0039K24.14 [Oryza sativa (japonica
KPTTIALESFSSSSSSTSTMASSSSMLAVLATLALLLSPAASALSSTLSPDFHAETCPQLDGIVRAAVQAALTSEIAIAAGLVRIYFHDCFPQGCDASILLNSTSARETALGPNLSIQPRAMQLVESIRSTAHAACGPVVS

SEQ ID NO: 69112 - protein, 122 aa, Triticum aestivum
  peptide (1)..(122): Ceres Seq. ID no. 13655973
  misc_feature (45)..(121): Pfam Name: Peroxidase Pfam Description: Peroxidase
  misc_feature (1)..(121): Homolog of NCBI NO: 7433077 NR Description: probable peroxidase (EC 1.11.1.7) precursor -
  misc_feature (8)..(121): Homolog of NCBI NO: 7433075 NR Description: probable peroxidase (EC 1.11.1.-) 1 precursor,
  misc_feature (8)..(121): Homolog of NCBI NO: 38345507 NR Description: OSJNBa0039K24.8 [Oryza sativa (japonica
  misc_feature (1)..(121): Homolog of NCBI NO: 5777627 NR Description: CAA303715.1 protein [Oryza sativa]
  misc_feature (7)..(121): Homolog of NCBI NO: 32480042 NR Description: OSJNBa0039K24.5 [Oryza sativa (japonica
  misc_feature (7)..(121): Homolog of NCBI NO: 5777628 NR Description: CAA303716.1 protein [Oryza sativa]
  misc_feature (14)..(121): Homolog of NCBI NO: 5777624 NR Description: CAA303712.1 protein [Oryza sativa]
  misc_feature (7)..(121): Homolog of NCBI NO: 38345508 NR Description: OSJNBa0039K24.10 [Oryza sativa (japonica
  misc_feature (1)..(121): Homolog of NCBI NO: 32480046 NR Description: OSJNBa0039K24.9 [Oryza sativa (japonica
  misc_feature (1)..(121): Homolog of NCBI NO: 38345511 NR Description: OSJNBa0039K24.14 [Oryza sativa (japonica
MASSSSMLAVLATLALLLSPAASALSSTLSPDFHAETCPQLDGIVRAAVQAALTSEIAIAAGLVRIYFHDCFPQGCDASILLNSTSARETALGPNLSIQPRAMQLVESIRSTAHAACGPVVS

SEQ ID NO: 69113 - DNA, 2241 bp, Triticum aestivum
  misc_feature (1)..(2241): Ceres Seq. ID no. 12626078
aacgttctagaatcttcacaaaccctcaacaaggttcccctccctcccctcccctgctccccctctgttcctccgccccctcatcgcagccgcctctctcccgaccaaaagccctagctagctagacccaccccatccatggcgaccatccccaccaccggctccgcctccctcctccggggctccgccgccctccagagggacgggaggtcaaccaggccgtcgtcggcggccaggccgctgccggggcgacgcgcgcgctcgttgtcggtcgtgcgcgcctccgccaaggacatcgccttcgaccaggcgtcgcgctccgccctccaggccggcgtcgagaagctcgccgccgccgtcggcgtcaccctcggccccagaggaaggaatgtcgttttggacgagtttggcagccccaaagtggtcaatgatggagttacaatcgcccgggctattgagcttgctgatcccatggagaatgctggtgctgctttgattcgtgaagttgctagcaagacaaatgactcggcgggtgatgggaccacgaccgcatctgttctggctcgtgagatcattaaactgggattgctgagtgttacctcaggggcaaatccagtgtcaattaagaagggcatagataagactgtgcaaagtttagttgaggaactcgagaagaagtcacgacctgtgaagggcagcggggacattaaagctattgctgccatatctgctggaaatgatgactttattggtaccatgatcgcggaggctattaacaaagttggccctgatggtgtcctctcgattgagtcatcatcgtcgtttgagaccactgttgaagttgaagaaggaatggagattgacagaggatacatctctcctcagtttgtcacaaactctgagaagtcagttgttgagtttgaaaacgctagagttcttgtcactgatcagaagatttcctcaatcaaagaaatccttcctttgttggagcaaactacgcagttgagagcaccacttctcataattgcagaggacgtatctggtgaggctttggcaactctagttgtcaacaagcttagaggaattctgaatgtagctgcgattaaagctcctggttttggtgaaaggcgcaaggctctccttcaggacattgccattgttacaggtgctgaatttcaagccaaagatcttggccaactgatcgagcagacaacagtggagcagctcggcatagccaggaaggtgacaatctccgggtcatccacaaccataatagcagatgttgccaccaaggatgagatccaggccagaatcgcacagctgaagagagagctttctcagacagactccacatatgattctgagaagctggcagagagaatagcaaagctctctggcggagttgccgtgatcaaggttggagctgcaaccgagacggagctcgaggaccgcaagctccgcatagaggatgccaagaatgcaacttttgcagccattgaggaaggtatagtacctggaggtggtgcggcctatgttcacctgtccacatttgtaccagccatcaaggagaagctggatgaccctgaggagcgcctcggtgctgatatcattcagaaggctctagtggcacccgcatcgttgatagcacacaatgcgggagtcgaaggggaggtgatcgtggagaaaatcaaggacagcgagtgggagtttggatacaacgcgatgaccgacaagcatgagaacctggtagaggctggcgtcatcgaccccgcgaaggtgacgaggtgtgccctgcagaacgcggcgtcggtggccggaatggtcctgaccacgcaggcgatcgtcgtggagaagcctagcaagaaggcccccgcgcccgccgggatgccccagggcatgatgtagaagcgcaatgatacgtagcaacctgggggcatgcaattttaggggcagtgggagtgatcatttctccaagggagataactgtgggtacctcgagaaatcattggtgtgtaatggatagtgatgacctgttctattgtctatttggtaccgctaatatcgtgaaaactattttgcctagctgagtttgagaagagtaataaatgagtaaagttgagcatgcccctgatttttctcttgattgtttgatctgggattttaggcaacaactggatgttctctctaggggaatgaaagcatgtaggcaggcagctttggctcaaagcctgaacacttttt

SEQ ID NO: 69114 - protein, 588 aa, Triticum aestivum
  peptide (1)..(588): Ceres Seq. ID no. 12626079
  misc_feature (70)..(573): Pfam Name: TCP-1/cpn60 chaperonin family Pfam Description: TCP-1/cpn60 chaperonin family
  misc_feature (60)..(554): Homolog of NCBI NO: 134101 NR Description: RUBISCO SUBUNIT BINDING-PROTEIN ALPHA SUBUNIT (60
  misc_feature (60)..(555): Homolog of NCBI NO: 5650721 NR Description: rubisco subunit binding-protein alpha subunit (
  misc_feature (1)..(588): Homolog of NCBI NO: 464727 NR Description: RuBisCO subunit binding-protein alpha subunit,
  misc_feature (46)..(588): Homolog of NCBI NO: 99801 NR Description: chaperonine 60K alpha chain - rape (fragment)
  misc_feature (1)..(587): Homolog of NCBI NO: 3790441 NR Description: chaperonin 60 alpha subunit [Canavalia lineata]
  misc_feature (1)..(588): Homolog of NCBI NO: 21554572 NR Description: putative rubisco subunit binding-protein alpha
  misc_feature (1)..(588): Homolog of NCBI NO: 15226314 NR Description: putative rubisco subunit binding-protein alpha
  misc_feature (48)..(588): Homolog of NCBI NO: 134102 NR Description: RuBisCO subunit binding-protein alpha subunit,
  misc_feature (46)..(588): Homolog of NCBI NO: 1351030 NR Description: RuBisCO subunit binding-protein alpha subunit,
  misc_feature (1)..(587): Homolog of NCBI NO: 1710807 NR Description: RuBisCO subunit binding-protein alpha subunit,
MATIPTTGSASLLRGSAALQRDGRSTRPSSAARPLPGRRARSLSVVRASAKDIAFDQASRSALQAGVEKLAAAVGVTLGPRGRNVVLDEFGSPKVVNDGVTIARAIELADPMENAGAALIREVASKTNDSAGDGTTTASVLAREIIKLGLLSVTSGANPVSIKKGIDKTVQSLVEELEKKSRPVKGSGDIKAIAAISAGNDDFIGTMIAEAINKVGPDGVLSIESSSSFETTVEVEEGMEIDRGYISPQFVTNSEKSVVEFENARVLVTDQKISSIKEILPLLEQTTQLRAPLLIIAEDVSGEALATLVVNKLRGILNVAAIKAPGFGERRKALLQDIAIVTGAEFQAKDLGQLIEQTTVEQLGIARKVTISGSSTTIIADVATKDEIQARIAQLKRELSQTDSTYDSEKLAERIAKLSGGVAVIKVGAATETELEDRKLRIEDAKNATFAAIEEGIVPGGGAAYVHLSTFVPAIKEKLDDPEERLGADIIQKALVAPASLIAHNAGVEGEVIVEKIKDSEWEFGYNAMTDKHENLVEAGVIDPAKVTRCALQNAASVAGMVLTTQAIVVEKPSKKAPAPAGMPQGMM

SEQ ID NO: 69115 - protein, 477 aa, Triticum aestivum
  peptide (1)..(477): Ceres Seq. ID no. 12626080
  misc_feature (1)..(462): Pfam Name: TCP-1/cpn60 chaperonin family Pfam Description: TCP-1/cpn60 chaperonin family
  misc_feature (1)..(443): Homolog of NCBI NO: 134101 NR Description: RUBISCO SUBUNIT BINDING-PROTEIN ALPHA SUBUNIT (60
  misc_feature (1)..(444): Homolog of NCBI NO: 5650721 NR Description: rubisco subunit binding-protein alpha subunit (
  misc_feature (1)..(477): Homolog of NCBI NO: 464727 NR Description: RuBisCO subunit binding-protein alpha subunit,
  misc_feature (1)..(477): Homolog of NCBI NO: 99801 NR Description: chaperonine 60K alpha chain - rape (fragment)
  misc_feature (1)..(476): Homolog of NCBI NO: 3790441 NR Description: chaperonin 60 alpha subunit [Canavalia lineata]
  misc_feature (1)..(477): Homolog of NCBI NO: 21554572 NR Description: putative rubisco subunit binding-protein alpha
  misc_feature (1)..(477): Homolog of NCBI NO: 15226314 NR Description: putative rubisco subunit binding-protein alpha
  misc_feature (1)..(477): Homolog of NCBI NO: 134102 NR Description: RuBisCO subunit binding-protein alpha subunit,
  misc_feature (1)..(477): Homolog of NCBI NO: 1351030 NR Description: RuBisCO subunit binding-protein alpha subunit,
  misc_feature (1)..(476): Homolog of NCBI NO: 1710807 NR Description: RuBisCO subunit binding-protein alpha subunit,
MENAGAALIREVASKTNDSAGDGTTTASVLAREIIKLGLLSVTSGANPVSIKKGIDKTVQSLVEELEKKSRPVKGSGDIKAIAAISAGNDDFIGTMIAEAINKVGPDGVLSIESSSSFETTVEVEEGMEIDRGYISPQFVTNSEKSVVEFENARVLVTDQKISSIKEILPLLEQTTQLRAPLLIIAEDVSGEALATLVVNKLRGILNVAAIKAPGFGERRKALLQDIAIVTGAEFQAKDLGQLIEQTTVEQLGIARKVTISGSSTTIIADVATKDEIQARIAQLKRELSQTDSTYDSEKLAERIAKLSGGVAVIKVGAATETELEDRKLRIEDAKNATFAAIEEGIVPGGGAAYVHLSTFVPAIKEKLDDPEERLGADIIQKALVAPASLIAHNAGVEGEVIVEKIKDSEWEFGYNAMTDKHENLVEAGVIDPAKVTRCALQNAASVAGMVLTTQAIVVEKPSKKAPAPAGMPQGMM

SEQ ID NO: 69116 - protein, 382 aa, Triticum aestivum
  peptide (1)..(382): Ceres Seq. ID no. 12626081
  misc_feature (1)..(367): Pfam Name: TCP-1/cpn60 chaperonin family Pfam Description: TCP-1/cpn60 chaperonin family
  misc_feature (1)..(348): Homolog of NCBI NO: 134101 NR Description: RUBISCO SUBUNIT BINDING-PROTEIN ALPHA SUBUNIT (60
  misc_feature (1)..(349): Homolog of NCBI NO: 5650721 NR Description: rubisco subunit binding-protein alpha subunit (
  misc_feature (1)..(382): Homolog of NCBI NO: 464727 NR Description: RuBisCO subunit binding-protein alpha subunit,
  misc_feature (1)..(382): Homolog of NCBI NO: 99801 NR Description: chaperonine 60K alpha chain - rape (fragment)
  misc_feature (1)..(381): Homolog of NCBI NO: 3790441 NR Description: chaperonin 60 alpha subunit [Canavalia lineata]
  misc_feature (1)..(382): Homolog of NCBI NO: 21554572 NR Description: putative rubisco subunit binding-protein alpha
  misc_feature (1)..(382): Homolog of NCBI NO: 15226314 NR Description: putative rubisco subunit binding-protein alpha
  misc_feature (1)..(382): Homolog of NCBI NO: 134102 NR Description: RuBisCO subunit binding-protein alpha subunit,
  misc_feature (1)..(382): Homolog of NCBI NO: 1351030 NR Description: RuBisCO subunit binding-protein alpha subunit,
  misc_feature (1)..(381): Homolog of NCBI NO: 1710807 NR Description: RuBisCO subunit binding-protein alpha subunit,
MIAEAINKVGPDGVLSIESSSSFETTVEVEEGMEIDRGYISPQFVTNSEKSVVEFENARVLVTDQKISSIKEILPLLEQTTQLRAPLLIIAEDVSGEALATLVVNKLRGILNVAAIKAPGFGERRKALLQDIAIVTGAEFQAKDLGQLIEQTTVEQLGIARKVTISGSSTTIIADVATKDEIQARIAQLKRELSQTDSTYDSEKLAERIAKLSGGVAVIKVGAATETELEDRKLRIEDAKNATFAAIEEGIVPGGGAAYVHLSTFVPAIKEKLDDPEERLGADIIQKALVAPASLIAHNAGVEGEVIVEKIKDSEWEFGYNAMTDKHENLVEAGVIDPAKVTRCALQNAASVAGMVLTTQAIVVEKPSKKAPAPAGMPQGMM

SEQ ID NO: 69117 - DNA, 1851 bp, Triticum aestivum
  misc_feature (1)..(1851): Ceres Seq. ID no. 13597826
atctatccaggtccagccgagcccatggcggccaagcacctgctctcccgcgcccgcctcctcctcacccgccaccgcagccgccccaccatcctcccgcccgcgctcacccgcctcctcttcggcgggacaaccacccccgccgagccggaggacgacgacaaggccagggcccgggcggcggcggcggcggcggccgtcgccctggacgccaagagggccaagcgggaaggctccgacgacgacgacgagggcgccgggctgccctggacgtcctggcggcccgacgtggcctggctgaccaaggcactcgagcccgcgctgcagctctacaagcactacaactggaagccattcgcctctgacaacatccccgcaagcacccgcacttttagcgagatcataagtgacctccagcacagcaaggtgagcatacaggactggagcctcagtgatcttaccgtcggtctctacctcatttaccttacccaagcttccgcaaagaatgctcaagccttcaagggcgttcagatttcctccaataagaaggttcaagaactaatttatcaccttgaacttgcaaaaggttgctataagggcagtgccactgggcttgcaaagcatagcatgctccggccaaggaatgttttaaagtttgtgaaagattctagtatctttagacctggatattacatcggcatcgatccacgtgctaaactggtcatccttgggattcgtgggacccatacggtttatgaccttgtcaccgatttggttgcattgagcgataagaaggtatcacctaaaggtttctcaacacactttggaacctacgaggccgctcgatggtacctacgccatgagttgagcatcatcagaaaatgtttggaaaaacacaaggactacaagttgcggttggtaggtcactcccttggaggagcttcagctgcattgcttgctataatgttaaggaagaagtcgaaggaggagcttggatttagtcccgacatagtttcagctgttggatttggagtcccaccctgtgtatcgagagagatagccgagagttgcgcaagctatgtcaccactgttgtattgcaggatgatatagttcctaggttaagtgcagcttcactggcaagattgcgaaatgagataattgaaacagattgggccaaagttttggagaaggaagattggaagcatatagtggatatcgtgaccaatgctaagctagttgtttcgtccatccaagacgtggcaaacaaacttgccgattacgccaaagttgtaacatcagctagctccggtgatgccgcgaaagaccagccccgtcttcagggcccgacgaaagttttgaagcctgacggtgaagaagacgtctatgtgcctgaggatctcttcctcccagggacgctgtattacctccagagggacgtcgagaatataaatggcgttgaggacgagtcgtacacgctctggagaggcaacgccggggagaatttccagcggatactgttgtctggcaatttgatgtctgatcacaaatgcgatagcatacagtacgcgctcagagatgtgctcaagactctgcccctccctctgcccctgcaggaggattgatactaccaagttccaaagcttatgcagaaagcgggcttcgcaaaaatcgagtgttttgttgtacagttttaggttatgcaagggattgccaagaatgacaaagtgctaggaaactctcaagttgcagttcagagtttctggtgctgatctaggtgtagtacacctcttctttttttacaagaggtatatatagtgtaactctttgaaacttgagataaaagggtgacg

SEQ ID NO: 69118 - protein, 540 aa, Triticum aestivum
  peptide (1)..(540): Ceres Seq. ID no. 13597827
  misc_feature (230)..(377): Homolog of NCBI NO: 7486555 NR Description: hypothetical protein F6N23.21 - Arabidopsis
  misc_feature (205)..(528): Homolog of NCBI NO: 26352195 NR Description: unnamed protein product [Mus musculus]
  misc_feature (143)..(455): Homolog of NCBI NO: 34897262 NR Description: putative heat-shock protein
  misc_feature (225)..(437): Homolog of NCBI NO: 7485204 NR Description: hypothetical protein - Arabidopsis thaliana
  misc_feature (58)..(437): Homolog of NCBI NO: 9294632 NR Description: emb|CAB10386.1~gene_id:MAG2.3~strong similarity
  misc_feature (148)..(398): Homolog of NCBI NO: 34894492 NR Description: OJ1116_C07.9 [Oryza sativa (japonica
  misc_feature (130)..(437): Homolog of NCBI NO: 17064828 NR Description: Unknown protein [Arabidopsis thaliana]
  misc_feature (58)..(437): Homolog of NCBI NO: 18400268 NR Description: lipase (class 3) family [Arabidopsis thaliana]
  misc_feature (130)..(437): Homolog of NCBI NO: 22328699 NR Description: lipase (class 3) family [Arabidopsis thaliana]
  misc_feature (123)..(532): Homolog of NCBI NO: 15227944 NR Description: lipase (class 3) family [Arabidopsis thaliana]
IYPGPAEPMAAKHLLSRARLLLTRHRSRPTILPPALTRLLFGGTTTPAEPEDDDKARARAAAAAAAVALDAKRAKREGSDDDDEGAGLPWTSWRPDVAWLTKALEPALQLYKHYNWKPFASDNIPASTRTFSEIISDLQHSKVSIQDWSLSDLTVGLYLIYLTQASAKNAQAFKGVQISSNKKVQELIYHLELAKGCYKGSATGLAKHSMLRPRNVLKFVKDSSIFRPGYYIGIDPRAKLVILGIRGTHTVYDLVTDLVALSDKKVSPKGFSTHFGTYEAARWYLRHELSIIRKCLEKHKDYKLRLVGHSLGGASAALLAIMLRKKSKEELGFSPDIVSAVGFGVPPCVSREIAESCASYVTTVVLQDDIVPRLSAASLARLRNEIIETDWAKVLEKEDWKHIVDIVTNAKLVVSSIQDVANKLADYAKVVTSASSGDAAKDQPRLQGPTKVLKPDGEEDVYVPEDLFLPGTLYYLQRDVENINGVEDESYTLWRGNAGENFQRILLSGNLMSDHKCDSIQYALRDVLKTLPLPLPLQED

SEQ ID NO: 69119 - protein, 532 aa, Triticum aestivum
  peptide (1)..(532): Ceres Seq. ID no. 13597828
  misc_feature (222)..(369): Homolog of NCBI NO: 7486555 NR Description: hypothetical protein F6N23.21 - Arabidopsis
  misc_feature (197)..(520): Homolog of NCBI NO: 26352195 NR Description: unnamed protein product [Mus musculus]
  misc_feature (135)..(447): Homolog of NCBI NO: 34897262 NR Description: putative heat-shock protein
  misc_feature (217)..(429): Homolog of NCBI NO: 7485204 NR Description: hypothetical protein - Arabidopsis thaliana
  misc_feature (50)..(429): Homolog of NCBI NO: 9294632 NR Description: emb|CAB10386.1~gene_id:MAG2.3~strong similarity
  misc_feature (140)..(390): Homolog of NCBI NO: 34894492 NR Description: OJ1116_C07.9 [Oryza sativa (japonica
  misc_feature (122)..(429): Homolog of NCBI NO: 17064828 NR Description: Unknown protein [Arabidopsis thaliana]
  misc_feature (50)..(429): Homolog of NCBI NO: 18400268 NR Description: lipase (class 3) family [Arabidopsis thaliana]
  misc_feature (122)..(429): Homolog of NCBI NO: 22328699 NR Description: lipase (class 3) family [Arabidopsis thaliana]
  misc_feature (115)..(524): Homolog of NCBI NO: 15227944 NR Description: lipase (class 3) family [Arabidopsis thaliana]
MAAKHLLSRARLLLTRHRSRPTILPPALTRLLFGGTTTPAEPEDDDKARARAAAAAAAVALDAKRAKREGSDDDDEGAGLPWTSWRPDVAWLTKALEPALQLYKHYNWKPFASDNIPASTRTFSEIISDLQHSKVSIQDWSLSDLTVGLYLIYLTQASAKNAQAFKGVQISSNKKVQELIYHLELAKGCYKGSATGLAKHSMLRPRNVLKFVKDSSIFRPGYYIGIDPRAKLVILGIRGTHTVYDLVTDLVALSDKKVSPKGFSTHFGTYEAARWYLRHELSIIRKCLEKHKDYKLRLVGHSLGGASAALLAIMLRKKSKEELGFSPDIVSAVGFGVPPCVSREIAESCASYVTTVVLQDDIVPRLSAASLARLRNEIIETDWAKVLEKEDWKHIVDIVTNAKLVVSSIQDVANKLADYAKVVTSASSGDAAKDQPRLQGPTKVLKPDGEEDVYVPEDLFLPGTLYYLQRDVENINGVEDESYTLWRGNAGENFQRILLSGNLMSDHKCDSIQYALRDVLKTLPLPLPLQED

SEQ ID NO: 69120 - protein, 331 aa, Triticum aestivum
  peptide (1)..(331): Ceres Seq. ID no. 13597829
  misc_feature (21)..(168): Homolog of NCBI NO: 7486555 NR Description: hypothetical protein F6N23.21 - Arabidopsis
  misc_feature (1)..(319): Homolog of NCBI NO: 26352195 NR Description: unnamed protein product [Mus musculus]
  misc_feature (1)..(246): Homolog of NCBI NO: 34897262 NR Description: putative heat-shock protein
  misc_feature (16)..(228): Homolog of NCBI NO: 7485204 NR Description: hypothetical protein - Arabidopsis thaliana
  misc_feature (1)..(228): Homolog of NCBI NO: 9294632 NR Description: emb|CAB10386.1~gene_id:MAG2.3~strong similarity
  misc_feature (1)..(189): Homolog of NCBI NO: 34894492 NR Description: OJ1116_C07.9 [Oryza sativa (japonica
  misc_feature (1)..(228): Homolog of NCBI NO: 17064828 NR Description: Unknown protein [Arabidopsis thaliana]
  misc_feature (1)..(228): Homolog of NCBI NO: 18400268 NR Description: lipase (class 3) family [Arabidopsis thaliana]
  misc_feature (1)..(228): Homolog of NCBI NO: 22328699 NR Description: lipase (class 3) family [Arabidopsis thaliana]
  misc_feature (1)..(323): Homolog of NCBI NO: 15227944 NR Description: lipase (class 3) family [Arabidopsis thaliana]
MLRPRNVLKFVKDSSIFRPGYYIGIDPRAKLVILGIRGTHTVYDLVTDLVALSDKKVSPKGFSTHFGTYEAARWYLRHELSIIRKCLEKHKDYKLRLVGHSLGGASAALLAIMLRKKSKEELGFSPDIVSAVGFGVPPCVSREIAESCASYVTTVVLQDDIVPRLSAASLARLRNEIIETDWAKVLEKEDWKHIVDIVTNAKLVVSSIQDVANKLADYAKVVTSASSGDAAKDQPRLQGPTKVLKPDGEEDVYVPEDLFLPGTLYYLQRDVENINGVEDESYTLWRGNAGENFQRILLSGNLMSDHKCDSIQYALRDVLKTLPLPLPLQED

SEQ ID NO: 69121 - DNA, 3007 bp, Triticum aestivum
  misc_feature (1)..(3007): Ceres Seq. ID no. 14302220
ctccaaaacaaaagccccgaagaaaccccaccaaactcctccatcctccgctcccatttccttcgtgccgtccgcctccgccgtctcgtctgccacccctcgccaccccctctcctccccaaggagcgcagccgcggagcccctcgcccccgtctcccatggcggcctctctcctccacgcagccgcctcctccccgctcgcgggcccctacccggccgcccgcgcggccttccgccccctcgcttcctccccattcctgcgcctcgcgcgctcctctcccgaccgccgtgcccgactggacttcccgctccgggcgctctcgggtggcgctcgcctctccaccggagtggccgccctccgtcctcgccgcttcgtcgccgccctcgcgggggaggaaccgatgagttcagaattgggtgatgacaaggaaaaggaaacggaaaagatcgaaatagagcctgaggaggcccaggaagtgtggagggaaatgctcaagcagttcaaggccgaggccatccgaatgcaggccctgacaacgcaggcatacgatgtctactccaagagggcgagggaggtgctgttagaggcctcagagaagctaaggatccaggcagataaagcacaaaaggacctgaccattatcgctgcagaggttggtgaggaggggcaggaatatctacagctggcagctaagaactccccagattcaatcaaggatatcaccgagacaatcaatgcagttggcaacctcaatgggccatcagagtataaggattatcatgtcggcatttcatttggtacctttcttactgtaggaggtttcctgaacttcatgctaactggaagtacatctgcaattcgctttggctttgttcttggctttgcactattggctctgggtatctcaagtttgagatcacaaagagcaggcggtcgtcagcctcgtcttctgctgaaagggcaagctgctattgcaagcgttatcttcttcaaggacttgtcagttttcttcaggtatgggtggtttccaaatgttttcgcggtccttctcagtggaatggtggcgaccttttacattcatcgcattgtgactggtggccacaaaggtcgcgcggagagcagttcagataactaatggttatacaacacacttggatgaatcatatgtccgcggaaacttgggttctgaagattgatggtgacccttcgccttaaggtttccttctttcatcagccttcaactcaggcacactctgtggtgtctctgaactcttaagtggttctatacagtgatacctggactcacaagacttgcctcgcatactcgcccctcacctttgttgctttcctcgtgtaatatagatgctgccccataagcagaataaggaatggcccttgaaggtctctagtatgtatcaatctgttcatcatttatgttgtttatttatgcaacgtagttgtaacacattgaatatccagtgaaatcccgaaaatcggtctgtcccaaaaaaaaaaaaaaaaagcttttttttttttttttttgatatctattccccccagatgtatgtatcagttcatgctacagatggagatggacagccgaatatgccgataaatatggcttacagtttcgacgagtcctacaattcagtagtgtagaaattatttctgaaccgaagaaaaccaggaaccattgcctggcctgcaatctcgagtagccgtcccaatcctcgatctgttctcagaccctcctccgtccgtcgcagctccagatttccttccccatggctccgatcaagatcggtatcaacggtttcggccggatcggcaggcttgtggccagggttgcgctccagagccccgatgtcgagctcgtcgccgtcaacgaccccttcatcaccaccgactacatgacctacatgttcaagtatgacactgtccacggacagtggaagcaccatgaagttaaggtgaaggactccaagacccttctcttcggtgagaaggaggttgctgtgtttggctgcaggaaccctgaggagatcccatgggctgctgctggtgctgagtacgttgttgagtccaccggtgttttcaccgacaaggacaaggctgcagctcacattaagggtggtgccaagaaggtcatcatttctgctcccagcaaggatgctcccatgtttgtctgtggtgtcaatgagaaggaatacaagtctgacatcgacattgtctccaacgctagctgcaccactaactgccttgctcctcttgctaaggttatcaatgacaggtttggcattgttgagggtttgatgaccacagttcatgccatgactgcaacccagaagactgttgatggtccttccagcaaggactggagaggtggaagggctgccagcttcaacatcattccaagcagcactggtgccgcaaaggctgttggcaaggtgctcccagagcttaacggaaagttgactggaatggccttccgtgttcccactgttgatgtttctgttgttgatctgactgttagacttgcgaagccagcaacctatgatcagattaaggctgctatcaaggaggagtctgagggaaacctcaagggcattttgggttacgttgatgaggaccttgtttccactgactttcagggtgacaacaggtccagcatcttcgatgccaaggccgggattgctctgaacgacaactttgtcaagcttgtctcctggtacgacaacgagtggggatacagcacccgcgtggtcgacctcatccgtcacatgcacagcaccaagtaaatgagaggcatgaagatacaggggagagtggtttgccccagaggagtgttcaaagcctcttcttctgagaataaatttttgtatggaattatgtcagctaaaaaccttttattggatgtatcctgatggttggtcacattttggtggtattatgtacttgcttgaactaaatcatgagtcattttcactcatcttctttggttatcat

SEQ ID NO: 69122 - protein, 377 aa, Triticum aestivum
  peptide (1)..(377): Ceres Seq. ID no. 14302221
  misc_feature (1)..(52): Homolog of NCBI NO: 13027414 NR Description: glyceraldehyde-3-phosphate dehydrogenase type 2
  misc_feature (1)..(52): Homolog of NCBI NO: 13027414 NR Description: glyceraldehyde-3-phosphate dehydrogenase type 2
PKQKPRRNPTKLLHPPLPFPSCRPPPPSRLPPLATPSPPQGAQPRSPSPPSPMAASLLHAAASSPLAGPYPAARAAFRPLASSPFLRLARSSPDRRARLDFPLRALSGGARLSTGVAALRPRRFVAALAGEEPMSSELGDDKEKETEKIEIEPEEAQEVWREMLKQFKAEAIRMQALTTQAYDVYSKRAREVLLEASEKLRIQADKAQKDLTIIAAEVGEEGQEYLQLAAKNSPDSIKDITETINAVGNLNGPSEYKDYHVGISFGTFLTVGGFLNFMLTGSTSAIRFGFVLGFALLALGISSLRSQRAGGRQPRLLLKGQAAIASVIFFKDLSVFFRYGWFPNVFAVLLSGMVATFYIHRIVTGGHKGRAESSSDN

SEQ ID NO: 69123 - protein, 337 aa, Triticum aestivum; identical to SEQ ID NO: 56415
  peptide (1)..(337): Ceres Seq. ID no. 14302222
  misc_feature (155)..(316): Pfam Name: Glyceraldehyde 3-phosphate dehydrogenase, Pfam Description: Glyceraldehyde 3-phosphate dehydrogenase,
  misc_feature (1)..(336): Homolog of NCBI NO: 462141 NR Description: Glyceraldehyde 3-phosphate dehydrogenase (GAPDH)
  misc_feature (1)..(337): Homolog of NCBI NO: 4539543 NR Description: glyceraldehyde-3-phosphate dehydrogenase
  misc_feature (2)..(337): Homolog of NCBI NO: 1345501 NR Description: glycolytic glyceraldehyde 3-phosphate
  misc_feature (1)..(337): Homolog of NCBI NO: 120666 NR Description: Glyceraldehyde 3-phosphate dehydrogenase,
  misc_feature (1)..(336): Homolog of NCBI NO: 462137 NR Description: GLYCERALDEHYDE 3-PHOSPHATE DEHYDROGENASE,
  misc_feature (33)..(337): Homolog of NCBI NO: 120668 NR Description: Glyceraldehyde 3-phosphate dehydrogenase,
  misc_feature (1)..(336): Homolog of NCBI NO: 7431535 NR Description: glyceraldehyde-3-phosphate dehydrogenase
  misc_feature (1)..(337): Homolog of NCBI NO: 6166167 NR Description: Glyceraldehyde 3-phosphate dehydrogenase,
  misc_feature (1)..(47): Homolog of NCBI NO: 29150193 NR Description: putative glyceraldehydes 3-phosphate
  misc_feature (43)..(337): Homolog of NCBI NO: 29150193 NR Description: putative glyceraldehydes 3-phosphate

SEQ ID NO: 69124 - protein, 325 aa, Triticum aestivum
  peptide (1)..(325): Ceres Seq. ID no. 14302223
MAASLLHAAASSPLAGPYPAARAAFRPLASSPFLRLARSSPDRRARLDFPLRALSGGARLSTGVAALRPRRFVAALAGEEPMSSELGDDKEKETEKIEIEPEEAQEVWREMLKQFKAEAIRMQALTTQAYDVYSKRAREVLLEASEKLRIQADKAQKDLTIIAAEVGEEGQEYLQLAAKNSPDSIKDITETINAVGNLNGPSEYKDYHVGISFGTFLTVGGFLNFMLTGSTSAIRFGFVLGFALLALGISSLRSQRAGGRQPRLLLKGQAAIASVIFFKDLSVFFRYGWFPNVFAVLLSGMVATFYIHRIVTGGHKGRAESSSDN

SEQ ID NO: 69125 - DNA, 1629 bp, Triticum aestivum
  misc_feature (1)..(1629): Ceres Seq. ID no. 13597648
agcgcgagacctctcccgcaagcaaacccaaatcggccgccgtcccctctcctcctccgcccacccccgccgccggtgccgcctcctcgcgagatcccgaccatggagggcagcagcggcctcgacgcggcgatcgagtcgctcctgaacacggagaagcagtgccgcctcgccggggatgtggccggcacccggaaggccgccgtcgacatcgtcgagctctgcttcaaggacgccgcctggaagacgctcaacgaccagatcgtcgtcctctccaagcggaggggccagctcaaacaggctattactgctgttgttcagaaagcgatggagtacattgacgtgacaccagacgtggagacacgtattgagcttatcaaaacattgagcagtgtcgctgctggaaaaatatatgtggagatagagagagctagattgatcaaaagacttgcaaaaattaaagaggagcagggaaagattgatgaagctgctgaaatcatgcaggaagttgctgttgaaacatttggctcgatggcaaagacagagaaacttgcattcattctggagcaggttcggctatgcctggatcgtcaagattatgtgcgcgcacaaattttatccaggaagattagccctagggtctttgatgcggatacatcaaaggacaaaaagaagccaaaggaaggcgataatatggttcaggaagcccctgcagatgtaccttcactcttagaactgaagcgcatctactatgaactgatgattcgctattactcacataacaatgattacctggaaatctgccgttgctacaagtcgatctatgaaattccatcaataaaagaggatccagcaaagtggacaccgattcttaggaagatctgttggttcttggtgctggcacctcatgatccaatgcagtcaagccttctcaatgctacactagaggataaaaacctttctgagatcccaaatttcagattactactgaagcaagttgttactatggaggtgatccagtggacaaagttgtgggaattcttcaaggatgaatacgagaacgagaagaatctccttggaggagctttaggcacaaaagctgcggaggatttgaagctgaggatcattgaacataatatcttggttgtttcaaagtactattcgaggattaccctgaagaggctggcggatcttctttgcttgagcctgcaggaggcggagaagcatatctcggacatggtgaactcaaaggctctgattgccaagatcgacagaccgatggggatcgtgtccttccggacggcccaggacagcaacggggtgctcaactcgtgggcgtcgaacctggagaagctcctggacctggtggagaagagctgcccccaaatacacaaggagacgatgatccccaaggcggtgttgaaagcctgaagtgaaccattttgaactgaatggccttgtttaggttgtgtgcgtagtagactttctgtggatctgaattcactttcactgtatgggtaaaactattctctctgctcaagtgggcgtcgcctgtttgctttgggaacttgtgtgcgaaccggtctggaaatactgtaaccccagggaatgacgaatactatttgctgt

SEQ ID NO: 69126 - protein, 476 aa, Triticum aestivum
  peptide (1)..(476): Ceres Seq. ID no. 13597649
  misc_feature (324)..(434): Pfam Name: PCI domain Pfam Description: PCI domain
  misc_feature (41)..(469): Homolog of NCBI NO: 34874104 NR Description: similar to proteasome 26S non-ATPase subunit 12
  misc_feature (41)..(469): Homolog of NCBI NO: 13385384 NR Description: proteasome 26S non-ATPase subunit 12 [Mus
  misc_feature (41)..(469): Homolog of NCBI NO: 4506221 NR Description: proteasome 26S non-ATPase subunit 12 isoform 1
  misc_feature (31)..(469): Homolog of NCBI NO: 27924244 NR Description: Similar to proteasome (prosome, macropain) 26S
  misc_feature (31)..(469): Homolog of NCBI NO: 27503944 NR Description: Similar to proteasome (prosome, macropain) 26S
  misc_feature (209)..(476): Homolog of NCBI NO: 17298157 NR Description: 26S proteasome regulatory particle non-ATPase
  misc_feature (35)..(476): Homolog of NCBI NO: 30698065 NR Description: 26S proteasome regulatory subunit (RPN5),
  misc_feature (35)..(476): Homolog of NCBI NO: 10177207 NR Description: proteasome regulatory subunit-like [Arabidopsis
  misc_feature (37)..(475): Homolog of NCBI NO: 15242545 NR Description: 26S proteasome regulatory subunit (RPN5),
  misc_feature (35)..(476): Homolog of NCBI NO: 27573351 NR Description: putative proteasome regulatory non-ATPase subunit
SARPLPQANPNRPPSPLLLRPPPPPVPPPREIPTMEGSSGLDAAIESLLNTEKQCRLAGDVAGTRKAAVDIVELCFKDAAWKTLNDQIVVLSKRRGQLKQAITAVVQKAMEYIDVTPDVETRIELIKTLSSVAAGKIYVEIERARLIKRLAKIKEEQGKIDEAAEIMQEVAVETFGSMAKTEKLAFILEQVRLCLDRQDYVRAQILSRKISPRVFDADTSKDKKKPKEGDNMVQEAPADVPSLLELKRIYYELMIRYYSHNNDYLEICRCYKSIYEIPSIKEDPAKWTPILRKICWFLVLAPHDPMQSSLLNATLEDKNLSEIPNFRLLLKQVVTMEVIQWTKLWEFFKDEYENEKNLLGGALGTKAAEDLKLRIIEHNILVVSKYYSRITLKRLADLLCLSLQEAEKHISDMVNSKALIAKIDRPMGIVSFRTAQDSNGVLNSWASNLEKLLDLVEKSCPQIHKETMIPKAVLKA

SEQ ID NO: 69127 - protein, 442 aa, Triticum aestivum
  peptide (1)..(442): Ceres Seq. ID no. 13597650
  misc_feature (290)..(400): Pfam Name: PCI domain Pfam Description: PCI domain
  misc_feature (7)..(435): Homolog of NCBI NO: 34874104 NR Description: similar to proteasome 26S non-ATPase subunit 12
  misc_feature (7)..(435): Homolog of NCBI NO: 13385384 NR Description: proteasome 26S non-ATPase subunit 12 [Mus
  misc_feature (7)..(435): Homolog of NCBI NO: 4506221 NR Description: proteasome 26S non-ATPase subunit 12 isoform 1
  misc_feature (1)..(435): Homolog of NCBI NO: 27924244 NR Description: Similar to proteasome (prosome, macropain) 26S
  misc_feature (1)..(435): Homolog of NCBI NO: 27503944 NR Description: Similar to proteasome (prosome, macropain) 26S
  misc_feature (175)..(442): Homolog of NCBI NO: 17298157 NR Description: 26S proteasome regulatory particle non-ATPase
  misc_feature (1)..(442): Homolog of NCBI NO: 30698065 NR Description: 26S proteasome regulatory subunit (RPN5),
  misc_feature (1)..(442): Homolog of NCBI NO: 10177207 NR Description: proteasome regulatory subunit-like [Arabidopsis
  misc_feature (3)..(441): Homolog of NCBI NO: 15242545 NR Description: 26S proteasome regulatory subunit (RPN5),
  misc_feature (1)..(442): Homolog of NCBI NO: 27573351 NR Description: putative proteasome regulatory non-ATPase subunit
MEGSSGLDAAIESLLNTEKQCRLAGDVAGTRKAAVDIVELCFKDAAWKTLNDQIVVLSKRRGQLKQAITAVVQKAMEYIDVTPDVETRIELIKTLSSVAAGKIYVEIERARLIKRLAKIKEEQGKIDEAAEIMQEVAVETFGSMAKTEKLAFILEQVRLCLDRQDYVRAQILSRKISPRVFDADTSKDKKKPKEGDNMVQEAPADVPSLLELKRIYYELMIRYYSHNNDYLEICRCYKSIYEIPSIKEDPAKWTPILRKICWFLVLAPHDPMQSSLLNATLEDKNLSEIPNFRLLLKQVVTMEVIQWTKLWEFFKDEYENEKNLLGGALGTKAAEDLKLRIIEHNILVVSKYYSRITLKRLADLLCLSLQEAEKHISDMVNSKALIAKIDRPMGIVSFRTAQDSNGVLNSWASNLEKLLDLVEKSCPQIHKETMIPKAVLKA

SEQ ID NO: 69128 - protein, 367 aa, Triticum aestivum
  peptide (1)..(367): Ceres Seq. ID no. 13597651
  misc_feature (215)..(325): Pfam Name: PCI domain Pfam Description: PCI domain
  misc_feature (1)..(360): Homolog of NCBI NO: 34874104 NR Description: similar to proteasome 26S non-ATPase subunit 12
  misc_feature (1)..(360): Homolog of NCBI NO: 13385384 NR Description: proteasome 26S non-ATPase subunit 12 [Mus
  misc_feature (1)..(360): Homolog of NCBI NO: 4506221 NR Description: proteasome 26S non-ATPase subunit 12 isoform 1
  misc_feature (1)..(360): Homolog of NCBI NO: 27924244 NR Description: Similar to proteasome (prosome, macropain) 26S
  misc_feature (1)..(360): Homolog of NCBI NO: 27503944 NR Description: Similar to proteasome (prosome, macropain) 26S
  misc_feature (100)..(367): Homolog of NCBI NO: 17298157 NR Description: 26S proteasome regulatory particle non-ATPase
  misc_feature (1)..(367): Homolog of NCBI NO: 30698065 NR Description: 26S proteasome regulatory subunit (RPN5),
  misc_feature (1)..(367): Homolog of NCBI NO: 10177207 NR Description: proteasome regulatory subunit-like [Arabidopsis
  misc_feature (1)..(366): Homolog of NCBI NO: 15242545 NR Description: 26S proteasome regulatory subunit (RPN5),
  misc_feature (1)..(367): Homolog of NCBI NO: 27573351 NR Description: putative proteasome regulatory non-ATPase subunit
MEYIDVTPDVETRIELIKTLSSVAAGKIYVEIERARLIKRLAKIKEEQGKIDEAAEIMQEVAVETFGSMAKTEKLAFILEQVRLCLDRQDYVRAQILSRKISPRVFDADTSKDKKKPKEGDNMVQEAPADVPSLLELKRIYYELMIRYYSHNNDYLEICRCYKSIYEIPSIKEDPAKWTPILRKICWFLVLAPHDPMQSSLLNATLEDKNLSEIPNFRLLLKQVVTMEVIQWTKLWEFFKDEYENEKNLLGGALGTKAAEDLKLRIIEHNILVVSKYYSRITLKRLADLLCLSLQEAEKHISDMVNSKALIAKIDRPMGIVSFRTAQDSNGVLNSWASNLEKLLDLVEKSCPQIHKETMIPKAVLKA

SEQ ID NO: 69129 - DNA, 1628 bp, Triticum aestivum
  misc_feature (1)..(1628): Ceres Seq. ID no. 13598601
ctcttcctcctctcgccccccgccgccgccatcccttccttatagagacagcgtgtaggcgccgggcgagcaggccaccaccgcaaccctagccagccagcccgactaacgccgccggttggagaggactagctattgctgctcgagagagagagatgtcgtcgggacggtacatggcctactcgccctccccgtccaccacgccgcactccccgcgcatctccggcctccgcgcctcctccgccgccgtcgccgaccaggagaagtaccttgcggagctgctcgcggagcgccacaagctgaacccgttcgtcccagtgctccctcatagcatacggttgctgaatcaagaaattttacgtgtttccacactattggagaacgcctcccttttaaaccaaagtggctttgaacatggtagtccactaacatcgggaggattatattcaaatggagcagcaactgatatgaatggatggacatcagcatttcaatcagaaagttcatcagcttatagttggcttggagggtctcaaggcagctcatctggactaattgtcaagaaaacaatgagggttgatattccagtagacaaatatccaacatacaacttcgttggtcgcatccttggtcccagaggaaattccttgaagcgagtggaggcaactactgactgccgtgtgcttataagaggccggggtagcattaaagatccagctcgggaggaaatgatgcgtggaaagccaggatatgaacatctgaatgaacccctacatatattggtcgaggcagagctgcctgttgaaattattgatgctcgtctgatgcaagcccgcgagatccttgaggatctgttaaggccaatgcaggacgagtctcaggacttcttcaagaagcagcagctccgggagcttgcaatgctcaatggcaccctccgtgaggaagggatgcaaagatctggttccgcatcccctttccacaacagccttggaatgaagagggccaagacaagggggtaaaaggccacgagtaccatgggagaagcaatcatctgtcctgagacggaaactgagtatgcctatgggtttgccttcgtggctaatggcgcaaaaatggtctcgcaccgctagcgtcggagcagcccgtacttgataatacatatgcctggagtcgtgttcgctgctactggagaggtttggttatggcaagactgggtgtcgactgtcgagctatatatcgggttgtgcaagaaagtggtttgtgtattgctatgagctatgactggggttttgatttatggttcttgtgcttgtatttgaacttttgaagaatgttatctggttaagttatttgggattgaaatgatgttgtaatctgttacagttatagtattgcttaataatagatggatattgtaataanaaaaaaaaaaaaaaaaaaaaaaaaaaaaaaaaaaaaaaaaaaaaaaaaaaaaaaaaaaaaaaaaaaaaaaaaaaaaaaaaaaaaaaaaaaaaaaaaaagtttttttcaacccccccaccccaaaggggggccccgaacccaattcccccaaaaaagaaacaaaaaaacccccccccctggcccgccttttaaaaacgcggaaatgg

SEQ ID NO: 69130 - protein, 287 aa, Triticum aestivum
  peptide (1)..(287): Ceres Seq. ID no. 13598602
  misc_feature (140)..(195): Pfam Name: KH domain Pfam Description: KH domain
  misc_feature (12)..(285): Homolog of NCBI NO: 22329449 NR Description: KH domain quaking protein, putative [Arabidopsis
  misc_feature (1)..(284): Homolog of NCBI NO: 34900448 NR Description: contains EST C27129(C51039)~similar to
  misc_feature (19)..(285): Homolog of NCBI NO: 15224909 NR Description: KH domain protein [Arabidopsis thaliana]
  misc_feature (3)..(285): Homolog of NCBI NO: 30680583 NR Description: KH domain protein [Arabidopsis thaliana]
  misc_feature (3)..(285): Homolog of NCBI NO: 12322716 NR Description: unknown protein; 28504-31237 [Arabidopsis
  misc_feature (9)..(285): Homolog of NCBI NO: 40645104 NR Description: hypothetical protein [Nicotiana tabacum]
  misc_feature (29)..(286): Homolog of NCBI NO: 19424087 NR Description: putative RNA-binding protein [Arabidopsis
  misc_feature (4)..(286): Homolog of NCBI NO: 20268733 NR Description: unknown protein [Arabidopsis thaliana]
  misc_feature (4)..(287): Homolog of NCBI NO: 15236738 NR Description: KH domain protein [Arabidopsis thaliana]
  misc_feature (4)..(286): Homolog of NCBI NO: 15241136 NR Description: KH domain protein [Arabidopsis thaliana]
MSSGRYMAYSPSPSTTPHSPRISGLRASSAAVADQEKYLAELLAERHKLNPFVPVLPHSIRLLNQEILRVSTLLENASLLNQSGFEHGSPLTSGGLYSNGAATDMNGWTSAFQSESSSAYSWLGGSQGSSSGLIVKKTMRVDIPVDKYPTYNFVGRILGPRGNSLKRVEATTDCRVLIRGRGSIKDPAREEMMRGKPGYEHLNEPLHILVEAELPVEIIDARLMQAREILEDLLRPMQDESQDFFKKQQLRELAMLNGTLREEGMQRSGSASPFHNSLGMKRAKTRG

SEQ ID NO: 69131 - protein, 281 aa, Triticum aestivum
  peptide (1)..(281): Ceres Seq. ID no. 13598603
  misc_feature (134)..(189): Pfam Name: KH domain Pfam Description: KH domain
  misc_feature (6)..(279): Homolog of NCBI NO: 22329449 NR Description: KH domain quaking protein, putative [Arabidopsis
  misc_feature (1)..(278): Homolog of NCBI NO: 34900448 NR Description: contains EST C27129(C51039)~similar to
  misc_feature (13)..(279): Homolog of NCBI NO: 15224909 NR Description: KH domain protein [Arabidopsis thaliana]
  misc_feature (1)..(279): Homolog of NCBI NO: 30680583 NR Description: KH domain protein [Arabidopsis thaliana]
  misc_feature (1)..(279): Homolog of NCBI NO: 12322716 NR Description: unknown protein; 28504-31237 [Arabidopsis
  misc_feature (3)..(279): Homolog of NCBI NO: 40645104 NR Description: hypothetical protein [Nicotiana tabacum]
  misc_feature (23)..(280): Homolog of NCBI NO: 19424087 NR Description: putative RNA-binding protein [Arabidopsis
  misc_feature (1)..(280): Homolog of NCBI NO: 20268733 NR Description: unknown protein [Arabidopsis thaliana]
  misc_feature (1)..(281): Homolog of NCBI NO: 15236738 NR Description: KH domain protein [Arabidopsis thaliana]
  misc_feature (1)..(280): Homolog of NCBI NO: 15241136 NR Description: KH domain protein [Arabidopsis thaliana]
MAYSPSPSTTPHSPRISGLRASSAAVADQEKYLAELLAERHKLNPFVPVLPHSIRLLNQEILRVSTLLENASLLNQSGFEHGSPLTSGGLYSNGAATDMNGWTSAFQSESSSAYSWLGGSQGSSSGLIVKKTMRVDIPVDKYPTYNFVGRILGPRGNSLKRVEATTDCRVLIRGRGSIKDPAREEMMRGKPGYEHLNEPLHILVEAELPVEIIDARLMQAREILEDLLRPMQDESQDFFKKQQLRELAMLNGTLREEGMQRSGSASPFHNSLGMKRAKTRG

SEQ ID NO: 69132 - protein, 183 aa, Triticum aestivum
  peptide (1)..(183): Ceres Seq. ID no. 13598604
  misc_feature (36)..(91): Pfam Name: KH domain Pfam Description: KH domain
  misc_feature (1)..(181): Homolog of NCBI NO: 22329449 NR Description: KH domain quaking protein, putative [Arabidopsis
  misc_feature (1)..(180): Homolog of NCBI NO: 34900448 NR Description: contains EST C27129(C51039)~similar to
  misc_feature (1)..(181): Homolog of NCBI NO: 15224909 NR Description: KH domain protein [Arabidopsis thaliana]
  misc_feature (1)..(181): Homolog of NCBI NO: 30680583 NR Description: KH domain protein [Arabidopsis thaliana]
  misc_feature (1)..(181): Homolog of NCBI NO: 12322716 NR Description: unknown protein; 28504-31237 [Arabidopsis
  misc_feature (1)..(181): Homolog of NCBI NO: 40645104 NR Description: hypothetical protein [Nicotiana tabacum]
  misc_feature (1)..(182): Homolog of NCBI NO: 19424087 NR Description: putative RNA-binding protein [Arabidopsis
  misc_feature (1)..(182): Homolog of NCBI NO: 20268733 NR Description: unknown protein [Arabidopsis thaliana]
  misc_feature (1)..(183): Homolog of NCBI NO: 15236738 NR Description: KH domain protein [Arabidopsis thaliana]
  misc_feature (1)..(182): Homolog of NCBI NO: 15241136 NR Description: KH domain protein [Arabidopsis thaliana]
MNGWTSAFQSESSSAYSWLGGSQGSSSGLIVKKTMRVDIPVDKYPTYNFVGRILGPRGNSLKRVEATTDCRVLIRGRGSIKDPAREEMMRGKPGYEHLNEPLHILVEAELPVEIIDARLMQAREILEDLLRPMQDESQDFFKKQQLRELAMLNGTLREEGMQRSGSASPFHNSLGMKRAKTRG

SEQ ID NO: 69133 - DNA, 1106 bp, Triticum aestivum
  misc_feature (1)..(1106): Ceres Seq. ID no. 15225495
aacatttcgtctccgcacgcgcgccagaggaagaagaccgcggaggaggagagaaagcgcgcgcgagaggaggaagaacatgttcatccagaaggcatggaggacggcagcgttcgggctctatggcttcacccagttcaccaaatccggcttcgtggaacacgccaagaaatttagagaggaggatatgcagatccggttggatgggaaaaattgcctggtaactggagcaaattctggcctaggttatgcgacagctcagggcttggcttctcatggcgccactgtctatatgctttgccgtaacaaagaaaggggagagactgctctgaatgaaataagatccaaaactggcaatatgaatgttcatctggagatatgtgacctttcatcaattaacgaagtcaagacatttgccacaaaattctcttcattggagaagccacttcatgtccttgttaacaacgccggcttactagagcacaagcgtacgactacatcggaaggtttggagctcaattttgctgtgaatgtggcagcaacatacactttaacagagctagtgatgccactgttggaaaaagcagcacctgatgctcgtgtcattacagttgcttcaggagggatgtacactgagccactgaacacgaatttacaatacagcgaaagcgaatttgacgggacaaaacaatatgctcgtaacaagagagttcaggttgctctcaccgaatggtgggctgagaaatacagcaacaagggagtgggtttctactccatgcatccaggatgggctgatacacctggagtctcgaagagcttgccgggactatcagagaagctatcaggaaacctgagatcgaacgaagaaggggctgacacagtggtctggttggctttgcaacccaaggagaagttagtcccaggggctttctacttcgaccgggccgaagcgcaaaaacatttgaagtatgctgggactgcagcatcccatgagcagataggttcgattgttgacagcattcgctccatctgtaacctacctgctaacccacaagtttatcagtgaagggatggaagtcctggacaaaaataaaattgaaattctg

SEQ ID NO: 69134 - protein, 354 aa, Triticum aestivum
  peptide (1)..(354): Ceres Seq. ID no. 15225496
  misc_feature (65)..(313): Homolog of NCBI NO: 5668735 NR Description: UBE-1b [Mus musculus]
  misc_feature (65)..(313): Homolog of NCBI NO: 5668733 NR Description: UBE-1a [Mus musculus]
  misc_feature (69)..(313): Homolog of NCBI NO: 24586328 NR Description: CG30491-PA [Drosophila melanogaster]
  misc_feature (57)..(313): Homolog of NCBI NO: 31198521 NR Description: ENSANGP00000021522 [Anopheles gambiae]
  misc_feature (107)..(267): Homolog of NCBI NO: 14602619 NR Description: FLJ13639 protein [Homo sapiens]
  misc_feature (65)..(313): Homolog of NCBI NO: 6630624 NR Description: M42C60 [Mus musculus]
  misc_feature (57)..(317): Homolog of NCBI NO: 24586330 NR Description: CG30495-PA [Drosophila melanogaster]
  misc_feature (107)..(312): Homolog of NCBI NO: 13375997 NR Description: hypothetical protein FLJ13639 [Homo sapiens]
  misc_feature (33)..(329): Homolog of NCBI NO: 34106252 NR Description: short chain dehydrogenase/reductase [Danio rerio]
  misc_feature (27)..(350): Homolog of NCBI NO: 15234031 NR Description: short-chain dehydrogenase/reductase family
TFRLRTRARGRRPRRRRESARERRKNMFIQKAWRTAAFGLYGFTQFTKSGFVEHAKKFREEDMQIRLDGKNCLVTGANSGLGYATAQGLASHGATVYMLCRNKERGETALNEIRSKTGNMNVHLEICDLSSINEVKTFATKFSSLEKPLHVLVNNAGLLEHKRTTTSEGLELNFAVNVAATYTLTELVMPLLEKAAPDARVITVASGGMYTEPLNTNLQYSESEFDGTKQYARNKRVQVALTEWWAEKYSNKGVGFYSMHPGWADTPGVSKSLPGLSEKLSGNLRSNEEGADTVVWLALQPKEKLVPGAFYFDRAEAQKHLKYAGTAASHEQIGSIVDSIRSICNLPANPQVYQ

SEQ ID NO: 69135 - protein, 328 aa, Triticum aestivum
  peptide (1)..(328): Ceres Seq. ID no. 15225497
  misc_feature (39)..(287): Homolog of NCBI NO: 5668735 NR Description: UBE-1b [Mus musculus]
  misc_feature (39)..(287): Homolog of NCBI NO: 5668733 NR Description: UBE-1a [Mus musculus]
  misc_feature (43)..(287): Homolog of NCBI NO: 24586328 NR Description: CG30491-PA [Drosophila melanogaster]
  misc_feature (31)..(287): Homolog of NCBI NO: 31198521 NR Description: ENSANGP00000021522 [Anopheles gambiae]
  misc_feature (81)..(241): Homolog of NCBI NO: 14602619 NR Description: FLJ13639 protein [Homo sapiens]
  misc_feature (39)..(287): Homolog of NCBI NO: 6630624 NR Description: M42C60 [Mus musculus]
  misc_feature (31)..(291): Homolog of NCBI NO: 24586330 NR Description: CG30495-PA [Drosophila melanogaster]
  misc_feature (81)..(286): Homolog of NCBI NO: 13375997 NR Description: hypothetical protein FLJ13639 [Homo sapiens]
  misc_feature (7)..(303): Homolog of NCBI NO: 34106252 NR Description: short chain dehydrogenase/reductase [Danio rerio]
  misc_feature (1)..(324): Homolog of NCBI NO: 15234031 NR Description: short-chain dehydrogenase/reductase family
MFIQKAWRTAAFGLYGFTQFTKSGFVEHAKKFREEDMQIRLDGKNCLVTGANSGLGYATAQGLASHGATVYMLCRNKERGETALNEIRSKTGNMNVHLEICDLSSINEVKTFATKFSSLEKPLHVLVNNAGLLEHKRTTTSEGLELNFAVNVAATYTLTELVMPLLEKAAPDARVITVASGGMYTEPLNTNLQYSESEFDGTKQYARNKRVQVALTEWWAEKYSNKGVGFYSMHPGWADTPGVSKSLPGLSEKLSGNLRSNEEGADTVVWLALQPKEKLVPGAFYFDRAEAQKHLKYAGTAASHEQIGSIVDSIRSICNLPANPQVYQ

SEQ ID NO: 69136 - protein, 292 aa, Triticum aestivum
  peptide (1)..(292): Ceres Seq. ID no. 15225498
  misc_feature (3)..(251): Homolog of NCBI NO: 5668735 NR Description: UBE-1b [Mus musculus]
  misc_feature (3)..(251): Homolog of NCBI NO: 5668733 NR Description: UBE-1a [Mus musculus]
  misc_feature (7)..(251): Homolog of NCBI NO: 24586328 NR Description: CG30491-PA [Drosophila melanogaster]
  misc_feature (1)..(251): Homolog of NCBI NO: 31198521 NR Description: ENSANGP00000021522 [Anopheles gambiae]
  misc_feature (45)..(205): Homolog of NCBI NO: 14602619 NR Description: FLJ13639 protein [Homo sapiens]
  misc_feature (3)..(251): Homolog of NCBI NO: 6630624 NR Description: M42C60 [Mus musculus]
  misc_feature (1)..(255): Homolog of NCBI NO: 24586330 NR Description: CG30495-PA [Drosophila melanogaster]
  misc_feature (45)..(250): Homolog of NCBI NO: 13375997 NR Description: hypothetical protein FLJ13639 [Homo sapiens]
  misc_feature (1)..(267): Homolog of NCBI NO: 34106252 NR Description: short chain dehydrogenase/reductase [Danio rerio]
  misc_feature (1)..(288): Homolog of NCBI NO: 15234031 NR Description: short-chain dehydrogenase/reductase family
MQIRLDGKNCLVTGANSGLGYATAQGLASHGATVYMLCRNKERGETALNEIRSKTGNMNVHLEICDLSSINEVKTFATKFSSLEKPLHVLVNNAGLLEHKRTTTSEGLELNFAVNVAATYTLTELVMPLLEKAAPDARVITVASGGMYTEPLNTNLQYSESEFDGTKQYARNKRVQVALTEWWAEKYSNKGVGFYSMHPGWADTPGVSKSLPGLSEKLSGNLRSNEEGADTVVWLALQPKEKLVPGAFYFDRAEAQKHLKYAGTAASHEQIGSIVDSIRSICNLPANPQVYQ

SEQ ID NO: 69137 - DNA, 1801 bp, Triticum aestivum
  misc_feature (1)..(1801): Ceres Seq. ID no. 13584744
aaacgattgatcaattccctctgagaaagaaagcaattgcctaattttcccgtctgctgaggaaatccgtgctgtcctgaggaaatccgggttggggatttgccaaatttcttgatttcagccctattgttggggctgccgaggccggattatgagatgggcttcttgtcgtgcctattccggtgccccgaggaggaggagcgggtggtgaaggagcacgatgacgacgaggactccggcggaatcgaccatggagtcgcctcagagtcatcagaaagtgccccactgaagactgaatccgcacatatggaaggaatccagagaaatggcacacataatgaggcgacgatcttcactttgcgtgagcttgttgatgctaccaaaaacttcagcaaggattttcagttggggcgaggaggatttggttgtgtgtataaagcatatctgaatgatggtcaggttgttgcagtcaaacaacttgatctaaatgggcttcaggggaaccgagaattccttgtggaggttctcatgctcaacctcttgcatcaccctaaccttgtcaatttgatagggtactgtgttgacggtgatcaacgcttgcttgtttatgaatatatgccattgggatcactagaagaccatctacacgaccttccacccaataaagaacctctagattggacaacacggatgaagatagctgctggcgcagctgctggtttggaatacctacatgataaggcaaatccaccagttatttaccgagatattaagccatcaaacattcttctttctgaaaggtatcatgcgaagttgtccgactttggacttgctaaacttggtcctgtgggtgataagactcatgtgacaacccgtgtcatggggacttatggctattgtgctcctgagtacgccgcgactggacagctaacggttaagtctgacatctatagttttggtgtggtgttcctcgagctaattacaggacgaagggcactcgatagcaatcggcctcgtgaggaacaggacttggtctcatgggctcgtccattgttcaaagaccaaaggaaatttccaaagatggctgatcctttgttgcgtggccgctttccaaagaggggtttgtaccaggccttggctattgcagcgatgtgtttgcaggagaagtcaaggaatcgccctctgattagggaagttgctgctgctctctcctatttgtcatcacaaacatacgatgggaatgacgctgctgttcgccgttaccttgatggcccttcagcatcaaaagtgtcagacgatcaggttaaccaagatgatgctttggctagtcaacatggagctcaaacgtcgatgcatgaccgtatgaatgacttcgtcccagaaggaaaagaacattgcaggagtggctccaaccgtggaggacggggcagggttgttccaaacggtgtcgacagagaccgcgcacttgcagatgcgaatgtctgggccgaggcttggagacgccatgagaaggcaagcaaagtgcgtgtaaccgatgaaatcctcggatagtgagctgagctctgcttgatgttttggcatgctggcgattttgaagagagcgttgttaggagaggaggaataatgcgcagcgaggtgtgtagtactgcaccaccagagtgagcgctcgcaaggtttcaccggtggagcctgtcactgtcacgtccaccatcgtttcgctgcatacattacacggtctgaatttcacatgtaggtattgtttcaggggctttgtaaataaatgtaataacccccttaattg

SEQ ID NO: 69138 - protein, 464 aa, Triticum aestivum
  peptide (1)..(464): Ceres Seq. ID no. 13584745
  misc_feature (1)..(360): Homolog of NCBI NO: 30679773 NR Description: protein kinase family [Arabidopsis thaliana]
  misc_feature (1)..(360): Homolog of NCBI NO: 11259782 NR Description: protein kinase-like - Arabidopsis thaliana
  misc_feature (1)..(373): Homolog of NCBI NO: 10445209 NR Description: protein serine/threonine kinase BNK1 [Brassica
  misc_feature (63)..(360): Homolog of NCBI NO: 34394036 NR Description: putative protein serine/threonine kinase BNK1
  misc_feature (1)..(381): Homolog of NCBI NO: 15240038 NR Description: protein kinase family [Arabidopsis thaliana]
  misc_feature (36)..(397): Homolog of NCBI NO: 34899302 NR Description: putative protein serine/threonine kinase
  misc_feature (36)..(397): Homolog of NCBI NO: 34395193 NR Description: putative protein serine/threonine kinase
  misc_feature (14)..(425): Homolog of NCBI NO: 15238886 NR Description: protein kinase family [Arabidopsis thaliana]
  misc_feature (13)..(362): Homolog of NCBI NO: 34907210 NR Description: putative serine/threonine kinase PBS1 protein
  misc_feature (51)..(457): Homolog of NCBI NO: 34902958 NR Description: putative protein kinase [Oryza sativa (japonica
MGFLSCLFRCPEEEERVVKEHDDDEDSGGIDHGVASESSESAPLKTESAHMEGIQRNGTHNEATIFTLRELVDATKNFSKDFQLGRGGFGCVYKAYLNDGQVVAVKQLDLNGLQGNREFLVEVLMLNLLHHPNLVNLIGYCVDGDQRLLVYEYMPLGSLEDHLHDLPPNKEPLDWTTRMKIAAGAAAGLEYLHDKANPPVIYRDIKPSNILLSERYHAKLSDFGLAKLGPVGDKTHVTTRVMGTYGYCAPEYAATGQLTVKSDIYSFGVVFLELITGRRALDSNRPREEQDLVSWARPLFKDQRKFPKMADPLLRGRFPKRGLYQALAIAAMCLQEKSRNRPLIREVAAALSYLSSQTYDGNDAAVRRYLDGPSASKVSDDQVNQDDALASQHGAQTSMHDRMNDFVPEGKEHCRSGSNRGGRGRVVPNGVDRDRALADANVWAEAWRRHEKASKVRVTDEILG

SEQ ID NO: 69139 - protein, 414 aa, Triticum aestivum
  peptide (1)..(414): Ceres Seq. ID no. 13584746
  misc_feature (1)..(310): Homolog of NCBI NO: 30679773 NR Description: protein kinase family [Arabidopsis thaliana]
  misc_feature (1)..(310): Homolog of NCBI NO: 11259782 NR Description: protein kinase-like - Arabidopsis thaliana
  misc_feature (1)..(323): Homolog of NCBI NO: 10445209 NR Description: protein serine/threonine kinase BNK1 [Brassica
  misc_feature (13)..(310): Homolog of NCBI NO: 34394036 NR Description: putative protein serine/threonine kinase BNK1
  misc_feature (1)..(331): Homolog of NCBI NO: 15240038 NR Description: protein kinase family [Arabidopsis thaliana]
  misc_feature (1)..(347): Homolog of NCBI NO: 34899302 NR Description: putative protein serine/threonine kinase
  misc_feature (1)..(347): Homolog of NCBI NO: 34395193 NR Description: putative protein serine/threonine kinase
  misc_feature (1)..(375): Homolog of NCBI NO: 15238886 NR Description: protein kinase family [Arabidopsis thaliana]
  misc_feature (1)..(312): Homolog of NCBI NO: 34907210 NR Description: putative serine/threonine kinase PBS1 protein
  misc_feature (1)..(407): Homolog of NCBI NO: 34902958 NR Description: putative protein kinase [Oryza sativa (japonica
MEGIQRNGTHNEATIFTLRELVDATKNFSKDFQLGRGGFGCVYKAYLNDGQVVAVKQLDLNGLQGNREFLVEVLMLNLLHHPNLVNLIGYCVDGDQRLLVYEYMPLGSLEDHLHDLPPNKEPLDWTTRMKIAAGAAAGLEYLHDKANPPVIYRDIKPSNILLSERYHAKLSDFGLAKLGPVGDKTHVTTRVMGTYGYCAPEYAATGQLTVKSDIYSFGVVFLELITGRRALDSNRPREEQDLVSWARPLFKDQRKFPKMADPLLRGRFPKRGLYQALAIAAMCLQEKSRNRPLIREVAAALSYLSSQTYDGNDAAVRRYLDGPSASKVSDDQVNQDDALASQHGAQTSMHDRMNDFVPEGKEHCRSGSNRGGRGRVVPNGVDRDRALADANVWAEAWRRHEKASKVRVTDEILG

SEQ ID NO: 69140 - protein, 340 aa, Triticum aestivum
  peptide (1)..(340): Ceres Seq. ID no. 13584747
  misc_feature (1)..(236): Homolog of NCBI NO: 30679773 NR Description: protein kinase family [Arabidopsis thaliana]
  misc_feature (1)..(236): Homolog of NCBI NO: 11259782 NR Description: protein kinase-like - Arabidopsis thaliana
  misc_feature (1)..(249): Homolog of NCBI NO: 10445209 NR Description: protein serine/threonine kinase BNK1 [Brassica
  misc_feature (1)..(236): Homolog of NCBI NO: 34394036 NR Description: putative protein serine/threonine kinase BNK1
  misc_feature (1)..(257): Homolog of NCBI NO: 15240038 NR Description: protein kinase family [Arabidopsis thaliana]
  misc_feature (1)..(273): Homolog of NCBI NO: 34899302 NR Description: putative protein serine/threonine kinase
  misc_feature (1)..(273): Homolog of NCBI NO: 34395193 NR Description: putative protein serine/threonine kinase
  misc_feature (1)..(301): Homolog of NCBI NO: 15238886 NR Description: protein kinase family [Arabidopsis thaliana]
  misc_feature (1)..(238): Homolog of NCBI NO: 34907210 NR Description: putative serine/threonine kinase PBS1 protein
  misc_feature (1)..(333): Homolog of NCBI NO: 34902958 NR Description: putative protein kinase [Oryza sativa (japonica
MLNLLHHPNLVNLIGYCVDGDQRLLVYEYMPLGSLEDHLHDLPPNKEPLDWTTRMKIAAGAAAGLEYLHDKANPPVIYRDIKPSNILLSERYHAKLSDFGLAKLGPVGDKTHVTTRVMGTYGYCAPEYAATGQLTVKSDIYSFGVVFLELITGRRALDSNRPREEQDLVSWARPLFKDQRKFPKMADPLLRGRFPKRGLYQALAIAAMCLQEKSRNRPLIREVAAALSYLSSQTYDGNDAAVRRYLDGPSASKVSDDQVNQDDALASQHGAQTSMHDRMNDFVPEGKEHCRSGSNRGGRGRVVPNGVDRDRALADANVWAEAWRRHEKASKVRVTDEILG

SEQ ID NO: 69141 - DNA, 873 bp, Triticum aestivum
  misc_feature (1)..(873): Ceres Seq. ID no. 15226827
atcaaattggtcgcgagtttgcgtgccgatctacctctaaccttctcctccgcattgcacctgcgaacggcgggcagatccatggcggcgctggcgtcaaggatggcgctgcagtccagggcggcgttggcctcgaggatggcgcagctgcagtccaaggcggccgaggcgacgaggttcgcggccaagcacgggggtgcgctgcagtccgaggcggcaagcttcgcggccaagcacggggccactctgcagtccaaggcgtccgaggcggcaagcttcgcggccaagcacgggggcgcgctgcagtccaaggcgtccgaggcggcaagcatcgcggccaagcacggggccacgctgcagtccaaggcgtccaaggcggcgagcttcgcggccaagcaagggagcgcgatgcagtccaaggcggccgaggcggcgagctccgcggccaagcaagggcgcgagtaccacaagacgctcatggagaggaacaggcagtacgtcgtcgacccgcccaccgtcgaaaagtgccaggagctctccaagcagctcttctacacccgcctcgccagcattcctggccgttacgaggctttctggaaagaggttgatgctgtaaagctcttgctgaaaaacagaaaggacctgaaggctgagcaagccggggttgccgcattgtttggcattgagttgtatgcatggcttcgtgccggtgagtttattggtagaggatttaccctcacaggttgatcgctgacgtctagcatgagcgcacattattagtctacatacatttgccgtctagctatgagcgtacattgttagtctacatttgccatcggatacagtgttcgttgatcaaaaaaaaaaaaaaaa

SEQ ID NO: 69142 - protein, 248 aa, Triticum aestivum
  peptide (1)..(248): Ceres Seq. ID no. 15226828
  misc_feature (137)..(248): Pfam Name: Mitochondrial ATP synthase g subunit Pfam Description: Mitochondrial ATP synthase g subunit
  misc_feature (8)..(164): Homolog of NCBI NO: 18135 NR Description: cgcr-1 product [Chlamydomonas reinhardtii]
  misc_feature (8)..(164): Homolog of NCBI NO: 99381 NR Description: cgcr-1 protein - Chlamydomonas reinhardtii
  misc_feature (137)..(248): Homolog of NCBI NO: 15236143 NR Description: expressed protein [Arabidopsis thaliana]
  misc_feature (137)..(248): Homolog of NCBI NO: 15224821 NR Description: copia-related retroelement pol polyprotein
  misc_feature (137)..(248): Homolog of NCBI NO: 15233603 NR Description: expressed protein [Arabidopsis thaliana]
  misc_feature (131)..(248): Homolog of NCBI NO: 34912342 NR Description: P0518F01.5 [Oryza sativa (japonica
IKLVASLRADLPLTFSSALHLRTAGRSMAALASRMALQSRAALASRMAQLQSKAAEATRFAAKHGGALQSEAASFAAKHGATLQSKASEAASFAAKHGGALQSKASEAASIAAKHGATLQSKASKAASFAAKQGSAMQSKAAEAASSAAKQGREYHKTLMERNRQYVVDPPTVEKCQELSKQLFYTRLASIPGRYEAFWKEVDAVKLLLKNRKDLKAEQAGVAALFGIELYAWLRAGEFIGRGFTLTG

SEQ ID NO: 69143 - protein, 221 aa, Triticum aestivum
  peptide (1)..(221): Ceres Seq. ID no. 15226829
  misc_feature (110)..(221): Pfam Name: Mitochondrial ATP synthase g subunit Pfam Description: Mitochondrial ATP synthase g subunit
  misc_feature (1)..(137): Homolog of NCBI NO: 18135 NR Description: cgcr-1 product [Chlamydomonas reinhardtii]
  misc_feature (1)..(137): Homolog of NCBI NO: 99381 NR Description: cgcr-1 protein - Chlamydomonas reinhardtii
  misc_feature (110)..(221): Homolog of NCBI NO: 15236143 NR Description: expressed protein [Arabidopsis thaliana]
  misc_feature (110)..(221): Homolog of NCBI NO: 15224821 NR Description: copia-related retroelement pol polyprotein
  misc_feature (110)..(221): Homolog of NCBI NO: 15233603 NR Description: expressed protein [Arabidopsis thaliana]
  misc_feature (104)..(221): Homolog of NCBI NO: 34912342 NR Description: P0518F01.5 [Oryza sativa (japonica
MAALASRMALQSRAALASRMAQLQSKAAEATRFAAKHGGALQSEAASFAAKHGATLQSKASEAASFAAKHGGALQSKASEAASIAAKHGATLQSKASKAASFAAKQGSAMQSKAAEAASSAAKQGREYHKTLMERNRQYVVDPPTVEKCQELSKQLFYTRLASIPGRYEAFWKEVDAVKLLLKNRKDLKAEQAGVAALFGIELYAWLRAGEFIGRGFTLTG

SEQ ID NO: 69144 - protein, 214 aa, Triticum aestivum
  peptide (1)..(214): Ceres Seq. ID no. 15226830
  misc_feature (103)..(214): Pfam Name: Mitochondrial ATP synthase g subunit Pfam Description: Mitochondrial ATP synthase g subunit
  misc_feature (1)..(130): Homolog of NCBI NO: 18135 NR Description: cgcr-1 product [Chlamydomonas reinhardtii]
  misc_feature (1)..(130): Homolog of NCBI NO: 99381 NR Description: cgcr-1 protein - Chlamydomonas reinhardtii
  misc_feature (103)..(214): Homolog of NCBI NO: 15236143 NR Description: expressed protein [Arabidopsis thaliana]
  misc_feature (103)..(214): Homolog of NCBI NO: 15224821 NR Description: copia-related retroelement pol polyprotein
  misc_feature (103)..(214): Homolog of NCBI NO: 15233603 NR Description: expressed protein [Arabidopsis thaliana]
  misc_feature (97)..(214): Homolog of NCBI NO: 34912342 NR Description: P0518F01.5 [Oryza sativa (japonica
MALQSRAALASRMAQLQSKAAEATRFAAKHGGALQSEAASFAAKHGATLQSKASEAASFAAKHGGALQSKASEAASIAAKHGATLQSKASKAASFAAKQGSAMQSKAAEAASSAAKQGREYHKTLMERNRQYVVDPPTVEKCQELSKQLFYTRLASIPGRYEAFWKEVDAVKLLLKNRKDLKAEQAGVAALFGIELYAWLRAGEFIGRGFTLTG

SEQ ID NO: 69145 - DNA, 978 bp, Triticum aestivum
  misc_feature (1)..(978): Ceres Seq. ID no. 13663965
gaaaccaaaaaaccctcgttccccactctggactgccctcctcctccctcggcggtttgttcatcgcctctgccgaaaaatcaaacccaaaaccaagaaagggggcgaaaatggctgaggcgaactcgtacgaggagcagcgcaggaggcaggtggaggagaacaagcggaagctggaggagctgcgcctgcaccacctctccgccgccgtccgcgaggccgccgtcaagcccaagctgaagaggaaggccccgaagccgtgggacgccgccgatgacgccccgccccggcgttccggccgtatcgccaccctccccgagcagcccgactatcgcgacaatctgggcaccgggaaaccacggcagcagaaggaagtaaagcctgatcatgcgtacgccatcgccaaggccgaagagctacaggatgagctaggctccgactacccgacctttgtcaaacccatgccacagtctcttacctcgctgcatatcccggcacagttcagcatggagcatctcccggacaatggcatgagaatggttttggtggatgaggaggaggaggagtttaaggtgagctatcgtccacacagtagcagtcttgtcgccgggtggagcgagtttgccatcgacaatgagctagttgaaggtgattgcttggtgttccagctgatcaagagggcattgttcaaggtctacatattcagggcaagttcgtactatgaaaatgagcattaatggagcagccggcaggctcctggttgcttcatgtcaacttgtgttgaactagcacagttcagaaatctgcactatctcagcggttagttatgtatgtatggctactgtcaggcattattagaatctctcgtgtgattgcaagtcgtatggtaactgtcggcatcttgtaaagtttgtcatgcgacggcaagtgtgaaacttgacatgtgatacccatcatggttgatatcctattgattcg

SEQ ID NO: 69146 - protein, 244 aa, Triticum aestivum
  peptide (1)..(244): Ceres Seq. ID no. 13663966
  misc_feature (149)..(237): Pfam Name: B3 DNA binding domain Pfam Description: B3 DNA binding domain
  misc_feature (43)..(160): Homolog of NCBI NO: 10177273 NR Description: gene_id:MJB21.7~unknown protein [Arabidopsis
  misc_feature (132)..(244): Homolog of NCBI NO: 15237157 NR Description: transcriptional factor B3 family [Arabidopsis
  misc_feature (43)..(242): Homolog of NCBI NO: 30694114 NR Description: expressed protein [Arabidopsis thaliana]
  misc_feature (37)..(100): Homolog of NCBI NO: 9294620 NR Description: gene_id:MVI11.9~unknown protein [Arabidopsis
  misc_feature (131)..(243): Homolog of NCBI NO: 9294620 NR Description: gene_id:MVI11.9~unknown protein [Arabidopsis
  misc_feature (42)..(123): Homolog of NCBI NO: 15217278 NR Description: Unknown protein [Oryza sativa]
  misc_feature (132)..(243): Homolog of NCBI NO: 15217278 NR Description: Unknown protein [Oryza sativa]
NQKTLVPHSGLPSSSLGGLFIASAEKSNPKPRKGAKMAEANSYEEQRRRQVEENKRKLEELRLHHLSAAVREAAVKPKLKRKAPKPWDAADDAPPRRSGRIATLPEQPDYRDNLGTGKPRQQKEVKPDHAYAIAKAEELQDELGSDYPTFVKPMPQSLTSLHIPAQFSMEHLPDNGMRMVLVDEEEEEFKVSYRPHSSSLVAGWSEFAIDNELVEGDCLVFQLIKRALFKVYIFRASSYYENEH

SEQ ID NO: 69147 - protein, 208 aa, Triticum aestivum
  peptide (1)..(208): Ceres Seq. ID no. 13663967
  misc_feature (113)..(201): Pfam Name: B3 DNA binding domain Pfam Description: B3 DNA binding domain
  misc_feature (7)..(124): Homolog of NCBI NO: 10177273 NR Description: gene_id:MJB21.7~unknown protein [Arabidopsis
  misc_feature (96)..(208): Homolog of NCBI NO: 15237157 NR Description: transcriptional factor B3 family [Arabidopsis
  misc_feature (7)..(206): Homolog of NCBI NO: 30694114 NR Description: expressed protein [Arabidopsis thaliana]
  misc_feature (1)..(64): Homolog of NCBI NO: 9294620 NR Description: gene_id:MVI11.9~unknown protein [Arabidopsis
  misc_feature (95)..(207): Homolog of NCBI NO: 9294620 NR Description: gene_id:MVI11.9~unknown protein [Arabidopsis
  misc_feature (6)..(87): Homolog of NCBI NO: 15217278 NR Description: Unknown protein [Oryza sativa]
  misc_feature (96)..(207): Homolog of NCBI NO: 15217278 NR Description: Unknown protein [Oryza sativa]
MAEANSYEEQRRRQVEENKRKLEELRLHHLSAAVREAAVKPKLKRKAPKPWDAADDAPPRRSGRIATLPEQPDYRDNLGTGKPRQQKEVKPDHAYAIAKAEELQDELGSDYPTFVKPMPQSLTSLHIPAQFSMEHLPDNGMRMVLVDEEEEEFKVSYRPHSSSLVAGWSEFAIDNELVEGDCLVFQLIKRALFKVYIFRASSYYENEH

SEQ ID NO: 69148 - DNA, 1528 bp, Triticum aestivum
  misc_feature (1)..(1528): Ceres Seq. ID no. 14313344
gtcaccctgtttgtccagtggacttccaactccagtctgacttcatcttcttcccaaaatcaaagaagcagcagaaatgcaggggtagcagctcacgccatgtccaaatccaaatccaaatagcttcgcctccgataggtggaggcggctactctgataggaggagaaggaagcaaaggagggaggcagcagaactgcagaagcaccatggtttccctctggcacacctccgtcattgtccttgtgctcctattcctcggaggatctgatgccaacccagctgcccgtcgacacggtcagctggatgtaaaccacaagaagaagccactacagacatccagaccttacaacattgcccacaggggttccaatggcgaaatacccgaagagacagctgcagcatatttgagggcaatcgaggaaggtgcagacttcatagagactgatatacttgcatcaaaggacggacatctgatatgtttccatgatgtaatcctggatgccacgacggacatcgtgaaccgtaccgagtttgctggcaggaagagaacctatgatgtccagggatttaagttgactgggtggtttatcgtggattttactttaagagaactgaaatcactgagggtgaaacagcgctacaatttcagggatcaacagtataattggaagtacaatattcttacatttgatgagtttattttgattgcacttcatgctgatagggtggtcggaatatacccagagatcaagaatcctattttcatcaaccagcatgtcaagtggtcaggtggcaagaagtttgaggacaagtttgtcgggacgcttctcaagcatggctacaaaggcaaatatatgtctaaagattggctcaagaagccactattcatccaatcctttgctccaacttcactaatttacatctcaaacatgacaaatgctccaaaactgcttctaatatacgataccacagttccaactcaagataccaaccagtcacactatgagataacttcgaacggctatctcgcgttcataaggaagtatgtaattgggattgggccatggaaggatacaattatccccccaaagaataaccatctaggccctgcaaccaatcttgtggcacgggcacacactctgaatcttcaggtgcatccgtacacattcagaaatgagaactcattcctgcacttcgacttccatcaagacccttatgctgaatatgagtactggctcagagaaatcggagtcgacgcgctgttcaccgatttcacgggcagcttgcacaagtaccaggagtggacagctccacacgaaaagaaggaaaagaagtgcagaggatctcctgcatgagatcgccaagacgctgaaggttgatgttcactaaagcttaggttgccaagtctgtatacctcctccctttcaggagctatttcattgttgtcagtaccgagaaaatgaactggttaataccattctatgtaattgcttcctataaatcacgagcagagcatcatagagttcg

SEQ ID NO: 69149 - protein, 382 aa, Triticum aestivum
  peptide (1)..(382): Ceres Seq. ID no. 14313345
  misc_feature (49)..(355): Homolog of NCBI NO: 22976139 NR Description: hypothetical protein [Ralstonia metallidurans]
  misc_feature (46)..(355): Homolog of NCBI NO: 23105793 NR Description: hypothetical protein [Azotobacter vinelandii]
  misc_feature (42)..(356): Homolog of NCBI NO: 16127502 NR Description: glycerophosphoryl diester phosphodiesterase
  misc_feature (30)..(355): Homolog of NCBI NO: 15595544 NR Description: glycerophosphoryl diester phosphodiesterase,
  misc_feature (32)..(355): Homolog of NCBI NO: 32997080 NR Description: glycerophosphoryl diester phosphodiesterase
  misc_feature (41)..(356): Homolog of NCBI NO: 23126501 NR Description: hypothetical protein [Nostoc punctiforme]
  misc_feature (38)..(372): Homolog of NCBI NO: 34394918 NR Description: putative glycerophosphoryl diester
  misc_feature (11)..(369): Homolog of NCBI NO: 15241502 NR Description: glycerophosphodiester phosphodiesterase - like
  misc_feature (38)..(378): Homolog of NCBI NO: 15221164 NR Description: glycerophosphodiester phosphodiesterase -related
  misc_feature (37)..(374): Homolog of NCBI NO: 34909788 NR Description: putative glycerophosphoryl diester
MVSLWHTSVIVLVLLFLGGSDANPAARRHGQLDVNHKKKPLQTSRPYNIAHRGSNGEIPEETAAAYLRAIEEGADFIETDILASKDGHLICFHDVILDATTDIVNRTEFAGRKRTYDVQGFKLTGWFIVDFTLRELKSLRVKQRYNFRDQQYNWKYNILTFDEFILIALHADRVVGIYPEIKNPIFINQHVKWSGGKKFEDKFVGTLLKHGYKGKYMSKDWLKKPLFIQSFAPTSLIYISNMTNAPKLLLIYDTTVPTQDTNQSHYEITSNGYLAFIRKYVIGIGPWKDTIIPPKNNHLGPATNLVARAHTLNLQVHPYTFRNENSFLHFDFHQDPYAEYEYWLREIGVDALFTDFTGSLHKYQEWTAPHEKKEKKCRGSPA

SEQ ID NO: 69150 - DNA, 1216 bp, Triticum aestivum
  misc_feature (1)..(1216): Ceres Seq. ID no. 13502979
acgcaggcacgcggctgtccccgtccgcgtggcctccaactcgactcgttccctttccttccttcttcccctcgtctccccaaccagaaacctaaacagaatcccaacccacccccgcagccaatcccaccggacgccagtcagccaaccccaatctcgactcctccgccgcctgaatccggttccgagtccatatttgaggtgccaccatgttcaacaggttatttgggaagcccaaggagcaggccaacgccggcgcgttggccactttggataagttaaacgagactcttgatatgctggagaagaaagagaaagtgttagagaaaaaagcaggcgctgagcttgagagggccaaggaattctcaaaagcaaagaataaaagagcggctatccaatcattgaagaggaaaaaactttatgagcagcaaattgagcagcttgggaatttccagttgagaatccatgatcagatgatcatgttagaagctgctaaagctacaacagagactgttgatgcattgaggactggagctaaagctatgaaagcgatgcaaaaagcaacaaatatcgatgatgtcgacaagactatggacgaaattaatgaacagacagaaaacatgaaacaaatacaagatgctctgtcagctcctcttggagcttctgctgattttgacgaggatgaactggaagcggagctggaagagttggagggagcagagttggaatcccaactactggagcctgttgtaactattcctattcatacgacgcccgtcccaggcaaggcgcaaccaactcgccctgctccacagaaagcatcggctgaggaggatgagcttgctgcactgcaagctgaaatggcattgtgatcaggcccccagtgaatgaagaggtgaaatgtacaaatgattggctggacggtacgctgtcgcaggcgagtcctggctacacatatatttgcccgtgtgtataatctttggtgggagacatttggcgaacagaggcaggaaaggctgctccagtccagtgtttatctagttgtttgattgaaggtctgtttcccggacataatttttggcacggtcagctccattccaggtcgtgtgcaatgctcattgttgtggcacactatttactgttgacccgtattatctcttgccatgtaaaccaagttatctcattccagtgtttgctaatttggtgtgttgacggg

SEQ ID NO: 69151 - protein, 220 aa, Triticum aestivum
  peptide (1)..(220): Ceres Seq. ID no. 13502980
  misc_feature (20)..(201): Pfam Name: SNF7 Pfam Description: SNF7
  misc_feature (6)..(219): Homolog of NCBI NO: 29841209 NR Description: similar to GenBank Accession Number BC011429
  misc_feature (4)..(214): Homolog of NCBI NO: 13182765 NR Description: CDA04 [Homo sapiens]
  misc_feature (1)..(199): Homolog of NCBI NO: 34859075 NR Description: similar to RIKEN cDNA 2010012F05 [Rattus
  misc_feature (1)..(210): Homolog of NCBI NO: 28278647 NR Description: Similar to RIKEN cDNA 2010012F05 gene [Danio
  misc_feature (1)..(215): Homolog of NCBI NO: 28827795 NR Description: chromosome 20 open reading frame 178 [Homo
  misc_feature (1)..(215): Homolog of NCBI NO: 28077049 NR Description: RIKEN cDNA 2010012F05 [Mus musculus]
  misc_feature (1)..(216): Homolog of NCBI NO: 28277855 NR Description: Unknown (protein for MGC:56112) [Danio rerio]
  misc_feature (1)..(220): Homolog of NCBI NO: 15224854 NR Description: copia-related retroelement pol polyprotein
  misc_feature (3)..(220): Homolog of NCBI NO: 21594892 NR Description: copia-like retroelement pol polyprotein
  misc_feature (1)..(220): Homolog of NCBI NO: 15233464 NR Description: expressed protein [Arabidopsis thaliana]
MFNRLFGKPKEQANAGALATLDKLNETLDMLEKKEKVLEKKAGAELERAKEFSKAKNKRAAIQSLKRKKLYEQQIEQLGNFQLRIHDQMIMLEAAKATTETVDALRTGAKAMKAMQKATNIDDVDKTMDEINEQTENMKQIQDALSAPLGASADFDEDELEAELEELEGAELESQLLEPVVTIPIHTTPVPGKAQPTRPAPQKASAEEDELAALQAEMAL

SEQ ID NO: 69152 - protein, 191 aa, Triticum aestivum
  peptide (1)..(191): Ceres Seq. ID no. 13502981
  misc_feature (1)..(172): Pfam Name: SNF7 Pfam Description: SNF7
  misc_feature (1)..(190): Homolog of NCBI NO: 29841209 NR Description: similar to GenBank Accession Number BC011429
  misc_feature (1)..(185): Homolog of NCBI NO: 13182765 NR Description: CDA04 [Homo sapiens]
  misc_feature (1)..(170): Homolog of NCBI NO: 34859075 NR Description: similar to RIKEN cDNA 2010012F05 [Rattus
  misc_feature (1)..(181): Homolog of NCBI NO: 28278647 NR Description: Similar to RIKEN cDNA 2010012F05 gene [Danio
  misc_feature (1)..(186): Homolog of NCBI NO: 28827795 NR Description: chromosome 20 open reading frame 178 [Homo
  misc_feature (1)..(186): Homolog of NCBI NO: 28077049 NR Description: RIKEN cDNA 2010012F05 [Mus musculus]
  misc_feature (1)..(187): Homolog of NCBI NO: 28277855 NR Description: Unknown (protein for MGC:56112) [Danio rerio]
  misc_feature (1)..(191): Homolog of NCBI NO: 15224854 NR Description: copia-related retroelement pol polyprotein
  misc_feature (1)..(191): Homolog of NCBI NO: 21594892 NR Description: copia-like retroelement pol polyprotein
  misc_feature (1)..(191): Homolog of NCBI NO: 15233464 NR Description: expressed protein [Arabidopsis thaliana]
MLEKKEKVLEKKAGAELERAKEFSKAKNKRAAIQSLKRKKLYEQQIEQLGNFQLRIHDQMIMLEAAKATTETVDALRTGAKAMKAMQKATNIDDVDKTMDEINEQTENMKQIQDALSAPLGASADFDEDELEAELEELEGAELESQLLEPVVTIPIHTTPVPGKAQPTRPAPQKASAEEDELAALQAEMAL

SEQ ID NO: 69153 - protein, 132 aa, Triticum aestivum
  peptide (1)..(132): Ceres Seq. ID no. 13502982
  misc_feature (1)..(113): Pfam Name: SNF7 Pfam Description: SNF7
  misc_feature (1)..(131): Homolog of NCBI NO: 29841209 NR Description: similar to GenBank Accession Number BC011429
  misc_feature (1)..(126): Homolog of NCBI NO: 13182765 NR Description: CDA04 [Homo sapiens]
  misc_feature (1)..(111): Homolog of NCBI NO: 34859075 NR Description: similar to RIKEN cDNA 2010012F05 [Rattus
  misc_feature (1)..(122): Homolog of NCBI NO: 28278647 NR Description: Similar to RIKEN cDNA 2010012F05 gene [Danio
  misc_feature (1)..(127): Homolog of NCBI NO: 28827795 NR Description: chromosome 20 open reading frame 178 [Homo
  misc_feature (1)..(127): Homolog of NCBI NO: 28077049 NR Description: RIKEN cDNA 2010012F05 [Mus musculus]
  misc_feature (1)..(128): Homolog of NCBI NO: 28277855 NR Description: Unknown (protein for MGC:56112) [Danio rerio]
  misc_feature (1)..(132): Homolog of NCBI NO: 15224854 NR Description: copia-related retroelement pol polyprotein
  misc_feature (1)..(132): Homolog of NCBI NO: 21594892 NR Description: copia-like retroelement pol polyprotein
  misc_feature (1)..(132): Homolog of NCBI NO: 15233464 NR Description: expressed protein [Arabidopsis thaliana]
MIMLEAAKATTETVDALRTGAKAMKAMQKATNIDDVDKTMDEINEQTENMKQIQDALSAPLGASADFDEDELEAELEELEGAELESQLLEPVVTIPIHTTPVPGKAQPTRPAPQKASAEEDELAALQAEMAL

SEQ ID NO: 69154 - DNA, 979 bp, Triticum aestivum
  misc_feature (1)..(979): Ceres Seq. ID no. 13656436
cagttggtctaaaatcgggctggcctgctggagcctggtcctctcccagcgcattgttgattgattcacgtcaagagcgagcgagacgccaagaactcggacggggaagtcgtgaggccgcctgcctccgcccgcccaggactcgatctcgatccccgccgacaagccgatcccccgtcctcctgcccgcgagagagaccggacgccgcgggagcgcccagatcccgccatgaatcccgagtatgattacctcttcaagcttttgcttattggagactcaggtgttggcaagtcatgtctgctgttaagatttgctgacgactcatacctggatagttacatcagtactattggagttgattttaaaatacggaccgtggagcaggacggaaagactatcaagttgcaaatctgggacactgctgggcaagaacgttttagaactattaccagcagctactaccgaggggcccatgggattattatcgtctatgatgtgacagaccaagatagcttcaacaatgtgaagcagtggctcaacgagattgaccgctatgccagtgagaatgtgaacaagcttctcgtggggaacaaatgtgatctggctgacaaaagagctgtgtcatatgaaacagcaaaggcatttgctgatgagattggcattccattcatggagaccagtgcaaagaacgccctgaatgttgaacaggccttcatggccatggctgcttcgatcaaggataggatggcgagccagccagccgcaaacaacgctcgcccagctactgtacagatccgcgggcaacctgtcgagcagaaggccagctgttgctcttcttagaaaaccatgcaaacttgttgatgctccgtcacctttatacatgttttcttatttgtttttacttgttatctttattcttttctttctagtgtacctgccttctgaaattgtgtaacttggatgaatatatatcttctt

SEQ ID NO: 69155 - protein, 203 aa, Triticum aestivum
  peptide (1)..(203): Ceres Seq. ID no. 15219223
  misc_feature (10)..(171): Pfam Name: Ras family Pfam Description: Ras family
  misc_feature (1)..(203): Homolog of NCBI NO: 1616614 NR Description: small GTP-binding protein [Nicotiana
  misc_feature (1)..(203): Homolog of NCBI NO: 541978 NR Description: GTP-binding protein, ras-like (clone vfa-ypt1) -
  misc_feature (1)..(203): Homolog of NCBI NO: 1053067 NR Description: small GTP-binding protein
  misc_feature (1)..(203): Homolog of NCBI NO: 303750 NR Description: GTP-binding protein [Pisum sativum]
  misc_feature (1)..(203): Homolog of NCBI NO: 7643790 NR Description: small GTP-binding protein [Capsicum annuum]
  misc_feature (1)..(203): Homolog of NCBI NO: 4586580 NR Description: rab-type small GTP-binding protein [Cicer
  misc_feature (1)..(203): Homolog of NCBI NO: 466172 NR Description: GTP-BINDING PROTEIN YPTM2
  misc_feature (1)..(203): Homolog of NCBI NO: 14140133 NR Description: putative GTP-binding protein [Oryza sativa]
  misc_feature (1)..(203): Homolog of NCBI NO: 1370166 NR Description: RAB1C [Lotus japonicus]
MNPEYDYLFKLLLIGDSGVGKSCLLLRFADDSYLDSYISTIGVDFKIRTVEQDGKTIKLQIWDTAGQERFRTITSSYYRGAHGIIIVYDVTDQDSFNNVKQWLNEIDRYASENVNKLLVGNKCDLADKRAVSYETAKAFADEIGIPFMETSAKNALNVEQAFMAMAASIKDRMASQPAANNARPATVQIRGQPVEQKASCCSS

SEQ ID NO: 69156 - DNA, 1948 bp, Triticum aestivum
  misc_feature (1)..(1948): Ceres Seq. ID no. 14301518
gatctcccatccccccaccctatcgaaaccattcccaagcaaaacaccctgcgcgatcccaaaccctagccatggcgaccggggcggcggcgaagactccgaccaagccatcggcccccgcggcgcccaagaccccggccaagcccgcgccctcggccgcggcgacggcggcgaagactcccgcaaggcccccgtcctcggcggcggcgacggcgaagaccccggccaggtccgtctcccgcgcgcggttcgcgcacgcctccgagaactccgaccccaacatcctcgcctcccctccccggaccacgtccaagacccccgccaagcccgccgccgccgccaccttctccgcctccgtcaggaagaagcgtgccacgcccgccccgccgccgccggtcccgcagcgccgcttcctcgtggcgaagaagggagcgcatcggcggaggcaagccggcgcgagcggaggaggcggccagttcgacttcgacaagtgccgcgaggccgcccgcgaggcgctgcgcgcgtcgcacgaggagttcttcctcaaggagcgcgcggtgtccgcggccagcgaggagcaggagtcgcagaaggaggaggaagcggccgaagatgacgcaaacagtgccgctgttgtcgaggagggggagggagcggaggtggcggatttggaggggagcggcaaagttagagcgattcggagcagagtcatggccaaggcgatgaacagcgtgccagatgctggggcgggccgtgtcaagcacctggtgcatgccttcgagagcctgctctccatctccggggccactgctgactccgaacgggcaggcgaggaggcctgggcgctgcctggattgcagccatggaacgaggggagtgggctcgccggtggcagtgttctcctcgtccgatttcatgagcatgggaccaaccagactttgcagttcactcgatggcaagagcaacagatctagctgggacagccagaccggaggacgcaggagccggcggaactcatccgaatcactaaggagcagctggaataaaaagctcaaggtcactagccagcatcccttcaagctgagaacagagcaaaggggaagagctaaagaacaacagtttattcagaaagtccaggaaatgctaattgaggatgagaagaagcgcatacatattgctcaaggacttccgtggacaacagatgagcctgagtgcttgattaagccaccagtcaaggaaagaacagagccagtcgaccttgttctacatagtgatgtgcgcgcagttgaacgtgctgaatttgatcaatatgtgtcagagaagaccaagttcggtgaggaattaagattggagcgggaacgtcaacaaaagttagaggaggaagaaatgataagacagctgaggaaagagcttgttcctaaagcacagccaatgccgtattttgatcggccattcatccccaaaaagtcatcaaagacaataacaattccgaaggagccaaactttcatctccggcctgaaaggttatcatgcgatgcatggtcactggaaagctgaagacatggccccgcaagcaacatgaatgtcagctgcatctagcaagagccgcagagcagcatcatcaacacgcatgatttagatgctcctcattctttcaagtgcctagcttcttcttaacgtctccatgcgcaacgagactcggtctttgtggcttgggtgatctccaacttctgttctgtgtacatgcgtttatgcatatcgatagctctgtgcttcagatgcatcctccacctccagggttaaaacagcttgttgtacaagagaccgcagatgggaaattcaaggatgaatttctgtggtcttgtattcctaagttgattgccaaaaaccccgaaataccaatgtgttgatatatatgtggattttgaaaaaaaatctctattttctg

SEQ ID NO: 69157 - protein, 323 aa, Triticum aestivum
  peptide (1)..(323): Ceres Seq. ID no. 14301519
  misc_feature (4)..(82): Pfam Name: Glycoprotein GG/GX Pfam Description: Glycoprotein GG/GX
SPIPPPYRNHSQAKHPARSQTLAMATGAAAKTPTKPSAPAAPKTPAKPAPSAAATAAKTPARPPSSAAATAKTPARSVSRARFAHASENSDPNILASPPRTTSKTPAKPAAAATFSASVRKKRATPAPPPPVPQRRFLVAKKGAHRRRQAGASGGGGQFDFDKCREAAREALRASHEEFFLKERAVSAASEEQESQKEEEAAEDDANSAAVVEEGEGAEVADLEGSGKVRAIRSRVMAKAMNSVPDAGAGRVKHLVHAFESLLSISGATADSERAGEEAWALPGLQPWNEGSGLAGGSVLLVRFHEHGTNQTLQFTRWQEQQI

SEQ ID NO: 69158 - protein, 300 aa, Triticum aestivum
  peptide (1)..(300): Ceres Seq. ID no. 14301520
  misc_feature (1)..(59): Pfam Name: Glycoprotein GG/GX Pfam Description: Glycoprotein GG/GX
MATGAAAKTPTKPSAPAAPKTPAKPAPSAAATAAKTPARPPSSAAATAKTPARSVSRARFAHASENSDPNILASPPRTTSKTPAKPAAAATFSASVRKKRATPAPPPPVPQRRFLVAKKGAHRRRQAGASGGGGQFDFDKCREAAREALRASHEEFFLKERAVSAASEEQESQKEEEAAEDDANSAAVVEEGEGAEVADLEGSGKVRAIRSRVMAKAMNSVPDAGAGRVKHLVHAFESLLSISGATADSERAGEEAWALPGLQPWNEGSGLAGGSVLLVRFHEHGTNQTLQFTRWQEQQI

SEQ ID NO: 69159 - protein, 272 aa, Triticum aestivum
  peptide (1)..(272): Ceres Seq. ID no. 14301521
  misc_feature (1)..(34): Homolog of NCBI NO: 5032119 NR Description: Ser/Arg-related nuclear matrix protein (plenty of
  misc_feature (1)..(34): Homolog of NCBI NO: 23274133 NR Description: Similar to serine/arginine repetitive matrix 1
  misc_feature (1)..(35): Homolog of NCBI NO: 7949115 NR Description: Ser/Arg-related nuclear matrix protein
  misc_feature (1)..(148): Homolog of NCBI NO: 34784016 NR Description: Unknown (protein for MGC:63802) [Danio rerio]
  misc_feature (1)..(111): Homolog of NCBI NO: 7949115 NR Description: Ser/Arg-related nuclear matrix protein
  misc_feature (1)..(36): Homolog of NCBI NO: 34872074 NR Description: similar to Ser/Arg-related nuclear matrix protein
  misc_feature (1)..(36): Homolog of NCBI NO: 23274133 NR Description: Similar to serine/arginine repetitive matrix 1
  misc_feature (78)..(269): Homolog of NCBI NO: 11358122 NR Description: hypothetical protein T20K14_120 - Arabidopsis
  misc_feature (54)..(269): Homolog of NCBI NO: 15232025 NR Description: hypothetical protein [Arabidopsis thaliana]
  misc_feature (78)..(269): Homolog of NCBI NO: 30685394 NR Description: expressed protein [Arabidopsis thaliana]
MLGRAVSSTWCMPSRACSPSPGPLLTPNGQARRPGRCLDCSHGTRGVGSPVAVFSSSDFMSMGPTRLCSSLDGKSNRSSWDSQTGGRRSRRNSSESLRSSWNKKLKVTSQHPFKLRTEQRGRAKEQQFIQKVQEMLIEDEKKRIHIAQGLPWTTDEPECLIKPPVKERTEPVDLVLHSDVRAVERAEFDQYVSEKTKFGEELRLERERQQKLEEEEMIRQLRKELVPKAQPMPYFDRPFIPKKSSKTITIPKEPNFHLRPERLSCDAWSLES

SEQ ID NO: 69160 - DNA, 1390 bp, Triticum aestivum
  misc_feature (1)..(1390): Ceres Seq. ID no. 13657369
  misc_feature: Pfam Name: DUF1668 Pfam Description: Protein of unknown function (DUF1668)
aggcgttcccctgccgccgcctcctatgtgaacatcttcttcacatctcccaccgcagcagtctcctggcgccgcctccgatctttgcatcttcttcacatctatctccggatataccaaaacaaggaggaagtagagaggaaggggtgtcatggctagccggtttgtgaatctcgcggtcaagcacatgaacggccgccatattcctttcagcatacaccgtattaatccggcagatttcttttacccaaccggatcgccagttcccaaacaaggttcagcttttgtaccaccggacgaaattcagctgcctccggccaccatcgccttcgactggccctcccggcagggccaaccctgctcaatggatttcatggccttcggcgccaaccgggataagatcgtcgccgtggacagcatagggtgctcctacctttacgacgctcccgtacgcagtatcagcaccaatatgcccatgatgcccacgtgcatgctacaacccatgtccattgctgtcggtgacaacggcctgttagttatgagtaaagccgatcaccagttcgtggctctgaatgatggctgcgaccccaattccagatatttattaccaatgtctggctggtactggcagtccctcaagccgcctcccttccccagccgctcctaccaccagaacgagaaaggcagtcaccatccatttgaagtcagctcttacacggtagttggcaattcacagttctgggtgtccacagtgggtgcaggcacgttttcctttgatatgaacagcggtgcgtggatgaaggctggcaattgggagctgccattcagaggtcgtgccgagtatgtccccgagcacaatctctggtttggcatgtttggcaaagacgaccagctttgcgcatctgacctcattgccgtgtccgcagtgagctcaccagtgccacatatactttggaaagagctggtttggccgaaagattggaagctcaggtcgacccacctcctgcctcttggttctagcagactctgcattgccaggttcttcctaacttcagatgatgacaaggaagagaacatgtcagactataagcgcagcacaacaaataattttggggtgctcacgggggtggaagtggtgtctgatgaaggaggactgcgcattatccatcacaagtccattcgcttcgatttcggcctcagcattgctagtgtgctgtgatacgttgactcctctagtgcaggtgagtttatttatatccggaacctgctgtagcacacctttcttttccatcctttgctcaaacgcactacaaaagcttgtccttttagcactatggaaaacgctttctttgctggaacataatgcctcaatcaaataaaaagttcttag

SEQ ID NO: 69161 - protein, 355 aa, Triticum aestivum
  peptide (1)..(355): Ceres Seq. ID no. 15220606
  misc_feature: Pfam Name: DUF1668 Pfam Description: Protein of unknown function (DUF1668)
  misc_feature (15)..(342): Homolog of NCBI NO: 34897052 NR Description: hypothetical protein [Oryza sativa (japonica
  misc_feature (53)..(342): Homolog of NCBI NO: 28876026 NR Description: hypothetical protein [Oryza sativa (japonica
  misc_feature (202)..(305): Homolog of NCBI NO: 27818009 NR Description: OSJNBb0041J06.17 [Oryza sativa (japonica
  misc_feature (1)..(329): Homolog of NCBI NO: 34907072 NR Description: OSJNBa0093F16.25 [Oryza sativa (japonica
  misc_feature (77)..(342): Homolog of NCBI NO: 38344193 NR Description: OSJNBa0064G10.9 [Oryza sativa (japonica
  misc_feature (157)..(328): Homolog of NCBI NO: 37531434 NR Description: hypothetical protein [Oryza sativa (japonica
  misc_feature (157)..(343): Homolog of NCBI NO: 34902348 NR Description: Hypothetical protein [Oryza sativa (japonica
  misc_feature (157)..(329): Homolog of NCBI NO: 15451605 NR Description: Hypothetical protein [Oryza sativa]
  misc_feature (77)..(328): Homolog of NCBI NO: 15451604 NR Description: Hypothetical protein [Oryza sativa]
  misc_feature (1)..(306): Homolog of NCBI NO: 34904128 NR Description: unnamed protein product [Oryza sativa (japonica
MASRFVNLAVKHMNGRHIPFSIHRINPADFFYPTGSPVPKQGSAFVPPDEIQLPPATIAFDWPSRQGQPCSMDFMAFGANRDKIVAVDSIGCSYLYDAPVRSISTNMPMMPTCMLQPMSIAVGDNGLLVMSKADHQFVALNDGCDPNSRYLLPMSGWYWQSLKPPPFPSRSYHQNEKGSHHPFEVSSYTVVGNSQFWVSTVGAGTFSFDMNSGAWMKAGNWELPFRGRAEYVPEHNLWFGMFGKDDQLCASDLIAVSAVSSPVPHILWKELVWPKDWKLRSTHLLPLGSSRLCIARFFLTSDDDKEENMSDYKRSTTNNFGVLTGVEVVSDEGGLRIIHHKSIRFDFGLSIASVL

SEQ ID NO: 69162 - protein, 343 aa, Triticum aestivum
  peptide (1)..(343): Ceres Seq. ID no. 15220607
  misc_feature: Pfam Name: DUF1668 Pfam Description: Protein of unknown function (DUF1668)
  misc_feature (3)..(330): Homolog of NCBI NO: 34897052 NR Description: hypothetical protein [Oryza sativa (japonica
  misc_feature (41)..(330): Homolog of NCBI NO: 28876026 NR Description: hypothetical protein [Oryza sativa (japonica
  misc_feature (190)..(293): Homolog of NCBI NO: 27818009 NR Description: OSJNBb0041J06.17 [Oryza sativa (japonica
  misc_feature (1)..(317): Homolog of NCBI NO: 34907072 NR Description: OSJNBa0093F16.25 [Oryza sativa (japonica
  misc_feature (65)..(330): Homolog of NCBI NO: 38344193 NR Description: OSJNBa0064G10.9 [Oryza sativa (japonica
  misc_feature (145)..(316): Homolog of NCBI NO: 37531434 NR Description: hypothetical protein [Oryza sativa (japonica
  misc_feature (145)..(331): Homolog of NCBI NO: 34902348 NR Description: Hypothetical protein [Oryza sativa (japonica
  misc_feature (145)..(317): Homolog of NCBI NO: 15451605 NR Description: Hypothetical protein [Oryza sativa]
  misc_feature (65)..(316): Homolog of NCBI NO: 15451604 NR Description: Hypothetical protein [Oryza sativa]
  misc_feature (1)..(294): Homolog of NCBI NO: 34904128 NR Description: unnamed protein product [Oryza sativa (japonica
MNGRHIPFSIHRINPADFFYPTGSPVPKQGSAFVPPDEIQLPPATIAFDWPSRQGQPCSMDFMAFGANRDKIVAVDSIGCSYLYDAPVRSISTNMPMMPTCMLQPMSIAVGDNGLLVMSKADHQFVALNDGCDPNSRYLLPMSGWYWQSLKPPPFPSRSYHQNEKGSHHPFEVSSYTVVGNSQFWVSTVGAGTFSFDMNSGAWMKAGNWELPFRGRAEYVPEHNLWFGMFGKDDQLCASDLIAVSAVSSPVPHILWKELVWPKDWKLRSTHLLPLGSSRLCIARFFLTSDDDKEENMSDYKRSTTNNFGVLTGVEVVSDEGGLRIIHHKSIRFDFGLSIASVL

SEQ ID NO: 69163 - protein, 284 aa, Triticum aestivum
  peptide (1)..(284): Ceres Seq. ID no. 15220608
  misc_feature: Pfam Name: DUF1668 Pfam Description: Protein of unknown function (DUF1668)
  misc_feature (1)..(271): Homolog of NCBI NO: 34897052 NR Description: hypothetical protein [Oryza sativa (japonica
  misc_feature (1)..(271): Homolog of NCBI NO: 28876026 NR Description: hypothetical protein [Oryza sativa (japonica
  misc_feature (131)..(234): Homolog of NCBI NO: 27818009 NR Description: OSJNBb0041J06.17 [Oryza sativa (japonica
  misc_feature (1)..(258): Homolog of NCBI NO: 34907072 NR Description: OSJNBa0093F16.25 [Oryza sativa (japonica
  misc_feature (6)..(271): Homolog of NCBI NO: 38344193 NR Description: OSJNBa0064G10.9 [Oryza sativa (japonica
  misc_feature (86)..(257): Homolog of NCBI NO: 37531434 NR Description: hypothetical protein [Oryza sativa (japonica
  misc_feature (86)..(272): Homolog of NCBI NO: 34902348 NR Description: Hypothetical protein [Oryza sativa (japonica
  misc_feature (86)..(258): Homolog of NCBI NO: 15451605 NR Description: Hypothetical protein [Oryza sativa]
  misc_feature (6)..(257): Homolog of NCBI NO: 15451604 NR Description: Hypothetical protein [Oryza sativa]
  misc_feature (1)..(235): Homolog of NCBI NO: 34904128 NR Description: unnamed protein product [Oryza sativa (japonica
MDFMAFGANRDKIVAVDSIGCSYLYDAPVRSISTNMPMMPTCMLQPMSIAVGDNGLLVMSKADHQFVALNDGCDPNSRYLLPMSGWYWQSLKPPPFPSRSYHQNEKGSHHPFEVSSYTVVGNSQFWVSTVGAGTFSFDMNSGAWMKAGNWELPFRGRAEYVPEHNLWFGMFGKDDQLCASDLIAVSAVSSPVPHILWKELVWPKDWKLRSTHLLPLGSSRLCIARFFLTSDDDKEENMSDYKRSTTNNFGVLTGVEVVSDEGGLRIIHHKSIRFDFGLSIASVL

SEQ ID NO: 69164 - DNA, 2100 bp, Triticum aestivum
  misc_feature (1)..(2100): Ceres Seq. ID no. 13657008
acctagaacatcctaatcgaaaaccctccccgcgttcccacaccgccacgcgcatacagactccacagccccgcactgttcctcgagctggagcgtgggctcgcgtagcctcgcccgttcatgagcggcggcgagtcggcggcctcgcgcgagggggattgtaggcaatgaggctgtacatcacggcggcggccgccgacgacgacgcgacgaagccgaaggcgccgcagcagctgcaggcggcgcggcgaggttaccgttccgttgtggtcacggggctcctggccggcgttctcctcttccgcgccgcgctcctcgccatcgagaccggcgcctccctctgcccttccgccaccggttgctcggactggagcgcggggctcgggcgctggctctacggcggcggcggcgacgcgacggaggaatttatgaaagagtggaagagaagccacagggtagctaccctgttggaccccgtggtggtggaagcggcaccagattccttggacgatctcatggtggagatggacaccattctggcgtcctatgatcggcttgacatggaggccgtggtggtcaagataatggccatgctgctaaagatggaccggaagctcaagtcgtcaagaatccgaactctgttcaaccggcacctggcctcgctcggcatccccaagagcatgcactgcctggcgctgcggctggccgaggagttcgcggtgaactccgcggcccgctccccggtaccgttgccgcagtacgcccctcgcctcaccgacgcctctcgcatccacgtctgcctcgtcaccgacaacgttcttgcggccgccgtcgccgtggcgtctgccgtccggagctcggccggtccgtcgaggctcgtgttccacgtcgtcaccgacaagaagagctacgtcccgatgcactcgtggttcgcgctgcacccggtctctccggcggtcgtcgaggtcaagggcctccaccagttcgactggcgcgacggcgatgccatcgcctctgtcatgaggaccatcgacgaggtccagaagagctcgctggattaccaccagctgtgtgatggatcggtggagagggagtacagaaggcttgaggccaccaagccaagcacgttttcgatcctcaactatctcaaaatccatctcccagagttcttcccggagctcccgagggtgatactgctcgacgacgacgtcttggtgcgcaaggatctggccgggctgtgggagcaggatctggacgggaacatcatgggcgcggtcggcgcgcaccggcccggcgcagacggtggcatctgcatcgagaggacgctcagcgagcacctcaacttctctgaccctgcagtgtcgtcgctaggcctcgacggttcgaactgcacgtggtcttggggcgccaccatcgtcgacctcgacgcttggcgaggagcgaacgtcaccgagacgtaccagctatggctgcaaaagaaccgcgaatcggggttcaggctgtggaagatgggatcgctgccgccggctctgatagcgttcgacggccgggtgcaggcgatcgagccgctgtggcacctgccggacctcggctggcgcatgcccgacgccgagctgctgcagctctccgccgtcctgcatttcagcgggccgcggaagccgtggctggaggtggcgttcccggagctgcgggagctgtggctcgggcacttgaataactcggacagcttcctacgaggctgtggcgtagtggaatgacggtaatggaacagggagaagattcaagctggaaaaggggatacgtacagtgatccggtgcaagaatcgggtgcggcgctgggtttgtgaggagagggaagtaggtgctgccttcagcctttcctcgacctggctctgccatgtttgctggtttaatgccactgagtagaaactactcatggcgtatacatatatataactgggatatttatttgttattagttacaaaacggaaagtggaaattgcagaagttgtagccacgagataatttttctttggctccaatgatgaactcactgtatggaactatggttcatttaagagtcaaatacattactggtg

SEQ ID NO: 69165 - protein, 529 aa, Triticum aestivum
  peptide (1)..(529): Ceres Seq. ID no. 15219227
  misc_feature (110)..(527): Homolog of NCBI NO: 15239707 NR Description: glycosyltransferase family 8 [Arabidopsis
  misc_feature (25)..(529): Homolog of NCBI NO: 11358133 NR Description: hypothetical protein T20K14_80 - Arabidopsis
  misc_feature (25)..(529): Homolog of NCBI NO: 30685369 NR Description: glycosyltransferase family 8 [Arabidopsis
  misc_feature (25)..(529): Homolog of NCBI NO: 30678270 NR Description: glycosyltransferase family 8 [Arabidopsis
  misc_feature (25)..(529): Homolog of NCBI NO: 6714484 NR Description: unknown protein [Arabidopsis thaliana]
  misc_feature (25)..(528): Homolog of NCBI NO: 11358146 NR Description: hypothetical protein T20N10.140 - Arabidopsis
  misc_feature (25)..(528): Homolog of NCBI NO: 22331857 NR Description: glycosyltransferase family 8 [Arabidopsis
  misc_feature (1)..(85): Homolog of NCBI NO: 34910786 NR Description: P0042A10.22 [Oryza sativa (japonica
  misc_feature (435)..(529): Homolog of NCBI NO: 34910786 NR Description: P0042A10.22 [Oryza sativa (japonica
  misc_feature (86)..(424): Homolog of NCBI NO: 34910786 NR Description: P0042A10.22 [Oryza sativa (japonica
MRLYITAAAADDDATKPKAPQQLQAARRGYRSVVVTGLLAGVLLFRAALLAIETGASLCPSATGCSDWSAGLGRWLYGGGGDATEEFMKEWKRSHRVATLLDPVVVEAAPDSLDDLMVEMDTILASYDRLDMEAVVVKIMAMLLKMDRKLKSSRIRTLFNRHLASLGIPKSMHCLALRLAEEFAVNSAARSPVPLPQYAPRLTDASRIHVCLVTDNVLAAAVAVASAVRSSAGPSRLVFHVVTDKKSYVPMHSWFALHPVSPAVVEVKGLHQFDWRDGDAIASVMRTIDEVQKSSLDYHQLCDGSVEREYRRLEATKPSTFSILNYLKIHLPEFFPELPRVILLDDDVLVRKDLAGLWEQDLDGNIMGAVGAHRPGADGGICIERTLSEHLNFSDPAVSSLGLDGSNCTWSWGATIVDLDAWRGANVTETYQLWLQKNRESGFRLWKMGSLPPALIAFDGRVQAIEPLWHLPDLGWRMPDAELLQLSAVLHFSGPRKPWLEVAFPELRELWLGHLNNSDSFLRGCGVVE

SEQ ID NO: 69166 - protein, 442 aa, Triticum aestivum
  peptide (1)..(442): Ceres Seq. ID no. 15219228
  misc_feature (1)..(440): Homolog of NCBI NO: 10177914 NR Description: emb|CAB71043.1~gene_id:MCA23.10~strong similarity
  misc_feature (23)..(440): Homolog of NCBI NO: 15239707 NR Description: glycosyltransferase family 8 [Arabidopsis
  misc_feature (1)..(442): Homolog of NCBI NO: 11358133 NR Description: hypothetical protein T20K14_80 - Arabidopsis
  misc_feature (1)..(442): Homolog of NCBI NO: 30685369 NR Description: glycosyltransferase family 8 [Arabidopsis
  misc_feature (1)..(442): Homolog of NCBI NO: 30678270 NR Description: glycosyltransferase family 8 [Arabidopsis
  misc_feature (1)..(442): Homolog of NCBI NO: 6714484 NR Description: unknown protein [Arabidopsis thaliana]
  misc_feature (1)..(441): Homolog of NCBI NO: 11358146 NR Description: hypothetical protein T20N10.140 - Arabidopsis
  misc_feature (1)..(441): Homolog of NCBI NO: 22331857 NR Description: glycosyltransferase family 8 [Arabidopsis
  misc_feature (348)..(442): Homolog of NCBI NO: 34910786 NR Description: P0042A10.22 [Oryza sativa (japonica
  misc_feature (1)..(337): Homolog of NCBI NO: 34910786 NR Description: P0042A10.22 [Oryza sativa (japonica
MKEWKRSHRVATLLDPVVVEAAPDSLDDLMVEMDTILASYDRLDMEAVVVKIMAMLLKMDRKLKSSRIRTLFNRHLASLGIPKSMHCLALRLAEEFAVNSAARSPVPLPQYAPRLTDASRIHVCLVTDNVLAAAVAVASAVRSSAGPSRLVFHVVTDKKSYVPMHSWFALHPVSPAVVEVKGLHQFDWRDGDAIASVMRTIDEVQKSSLDYHQLCDGSVEREYRRLEATKPSTFSILNYLKIHLPEFFPELPRVILLDDDVLVRKDLAGLWEQDLDGNIMGAVGAHRPGADGGICIERTLSEHLNFSDPAVSSLGLDGSNCTWSWGATIVDLDAWRGANVTETYQLWLQKNRESGFRLWKMGSLPPALIAFDGRVQAIEPLWHLPDLGWRMPDAELLQLSAVLHFSGPRKPWLEVAFPELRELWLGHLNNSDSFLRGCGVVE

SEQ ID NO: 69167 - protein, 413 aa, Triticum aestivum
  peptide (1)..(413): Ceres Seq. ID no. 15219229
  misc_feature (1)..(411): Homolog of NCBI NO: 10177914 NR Description: emb|CAB71043.1~gene_id:MCA23.10~strong similarity
  misc_feature (1)..(411): Homolog of NCBI NO: 15239707 NR Description: glycosyltransferase family 8 [Arabidopsis
  misc_feature (1)..(413): Homolog of NCBI NO: 11358133 NR Description: hypothetical protein T20K14_80 - Arabidopsis
  misc_feature (1)..(413): Homolog of NCBI NO: 30685369 NR Description: glycosyltransferase family 8 [Arabidopsis
  misc_feature (1)..(413): Homolog of NCBI NO: 30678270 NR Description: glycosyltransferase family 8 [Arabidopsis
  misc_feature (1)..(413): Homolog of NCBI NO: 6714484 NR Description: unknown protein [Arabidopsis thaliana]
  misc_feature (1)..(412): Homolog of NCBI NO: 11358146 NR Description: hypothetical protein T20N10.140 - Arabidopsis
  misc_feature (1)..(412): Homolog of NCBI NO: 22331857 NR Description: glycosyltransferase family 8 [Arabidopsis
  misc_feature (319)..(413): Homolog of NCBI NO: 34910786 NR Description: P0042A10.22 [Oryza sativa (japonica
  misc_feature (1)..(308): Homolog of NCBI NO: 34910786 NR Description: P0042A10.22 [Oryza sativa (japonica
MVEMDTILASYDRLDMEAVVVKIMAMLLKMDRKLKSSRIRTLFNRHLASLGIPKSMHCLALRLAEEFAVNSAARSPVPLPQYAPRLTDASRIHVCLVTDNVLAAAVAVASAVRSSAGPSRLVFHVVTDKKSYVPMHSWFALHPVSPAVVEVKGLHQFDWRDGDAIASVMRTIDEVQKSSLDYHQLCDGSVEREYRRLEATKPSTFSILNYLKIHLPEFFPELPRVILLDDDVLVRKDLAGLWEQDLDGNIMGAVGAHRPGADGGICIERTLSEHLNFSDPAVSSLGLDGSNCTWSWGATIVDLDAWRGANVTETYQLWLQKNRESGFRLWKMGSLPPALIAFDGRVQAIEPLWHLPDLGWRMPDAELLQLSAVLHFSGPRKPWLEVAFPELRELWLGHLNNSDSFLRGCGVVE

SEQ ID NO: 69168 - DNA, 1085 bp, Triticum aestivum
  misc_feature (1)..(1085): Ceres Seq. ID no. 13656286
tccaacattattccctgtctcacccaagctgtcctgccccgcctcgcggcagcaaacagcaatacctgcagctgccggccaccaccaaccgcgccacgccatttaccaccatataatcatcactcaccccaaggcttgtcgggagcgaagccaagccagtcttgtgttggaagaacagagcagcagcttgcagatcgagagttcgggagaggcaatggcgacttcgttccaggggacgaccaccaagtgcaacgcctgcgacaagacggtgtacctcgtcgacaagctcaccgccgacaaccgggtctaccacaaggcctgcttcaggtgccaccactgcaagggcaccctcaagctcgcaaattacaactcgttcgaaggagtgctctactgcaggcctcactttgaccagctcttcaagaggaccgggagcctggacaagagcttcgaaggcactccaaaggttgtcaagccagaaaggaatgttgggaatgagaatgctactaaagtctccagcgcatttgctggcactagagagaaatgttttggatgcagcaagacagtctatccaattgagagggttactgtgaataacactatgtaccacaagagctgcttcaaatgctgccatggagggtgcaccatcagcccttcgaattacatcgcgcacgagggcaagctcttctgcaagcaccaccacacccagctgatcaaagagaagggtaatttcagccagctcgagaacgaccacgacaagacatcacagagtgccgggtcagtggatgatgaagactcggagtattagtcagtccttgaggatatccagagatgaataacgagcccttctgcatttgcaccagagcagtatatctttctgctgtgtggttcttttgagtttttccaatcgagatcaagtgcattccgaagacaattatgttattgccttgtacgcatgtaaaccttgttatatccgagtcaaaatatctctacctggttcgacgacgtctatgcgcatacaagcaagagaattgtaagttgattttwaactcamawrawaraaamatgccacctttaaaaaaaaaaaa

SEQ ID NO: 69169 - protein, 267 aa, Triticum aestivum
  peptide (1)..(267): Ceres Seq. ID no. 15219819
  misc_feature (181)..(238): Pfam Name: LIM domain Pfam Description: LIM domain
  misc_feature (75)..(255): Homolog of NCBI NO: 15218450 NR Description: transcription factor -related [Arabidopsis
  misc_feature (75)..(263): Homolog of NCBI NO: 5689136 NR Description: transcription factor Ntlim1 [Nicotiana tabacum]
  misc_feature (75)..(251): Homolog of NCBI NO: 6467905 NR Description: pollen specific LIM domain protein 1b [Nicotiana
  misc_feature (75)..(263): Homolog of NCBI NO: 18565124 NR Description: transcription factor LIM [Nicotiana tabacum]
  misc_feature (75)..(263): Homolog of NCBI NO: 5932413 NR Description: LIM domain protein WLIM1 [Nicotiana tabacum]
  misc_feature (75)..(251): Homolog of NCBI NO: 5932418 NR Description: LIM domain protein PLIM1 [Nicotiana tabacum]
  misc_feature (75)..(251): Homolog of NCBI NO: 6467903 NR Description: pollen specific LIM domain protein 1a [Nicotiana
  misc_feature (75)..(256): Homolog of NCBI NO: 18565116 NR Description: transcription factor LIM [Populus kitakamiensis]
  misc_feature (75)..(256): Homolog of NCBI NO: 18565112 NR Description: transcription factor LIM [Populus kitakamiensis]
  misc_feature (72)..(246): Homolog of NCBI NO: 7715037 NR Description: LIM transcription factor homolog [Zea mays]
PTLFPVSPKLSCPASRQQTAIPAAAGHHQPRHAIYHHIIITHPKACRERSQASLVLEEQSSSLQIESSGEAMATSFQGTTTKCNACDKTVYLVDKLTADNRVYHKACFRCHHCKGTLKLANYNSFEGVLYCRPHFDQLFKRTGSLDKSFEGTPKVVKPERNVGNENATKVSSAFAGTREKCFGCSKTVYPIERVTVNNTMYHKSCFKCCHGGCTISPSNYIAHEGKLFCKHHHTQLIKEKGNFSQLENDHDKTSQSAGSVDDEDSEY

SEQ ID NO: 69170 - protein, 196 aa, Triticum aestivum
  peptide (1)..(196): Ceres Seq. ID no. 15219820
  misc_feature (110)..(167): Pfam Name: LIM domain Pfam Description: LIM domain
  misc_feature (4)..(184): Homolog of NCBI NO: 15218450 NR Description: transcription factor -related [Arabidopsis
  misc_feature (4)..(192): Homolog of NCBI NO: 5689136 NR Description: transcription factor Ntlim1 [Nicotiana tabacum]
  misc_feature (4)..(180): Homolog of NCBI NO: 6467905 NR Description: pollen specific LIM domain protein 1b [Nicotiana
  misc_feature (4)..(192): Homolog of NCBI NO: 18565124 NR Description: transcription factor LIM [Nicotiana tabacum]
  misc_feature (4)..(192): Homolog of NCBI NO: 5932413 NR Description: LIM domain protein WLIM1 [Nicotiana tabacum]
  misc_feature (4)..(180): Homolog of NCBI NO: 5932418 NR Description: LIM domain protein PLIM1 [Nicotiana tabacum]
  misc_feature (4)..(180): Homolog of NCBI NO: 6467903 NR Description: pollen specific LIM domain protein 1a [Nicotiana
  misc_feature (4)..(185): Homolog of NCBI NO: 18565116 NR Description: transcription factor LIM [Populus kitakamiensis]
  misc_feature (4)..(185): Homolog of NCBI NO: 18565112 NR Description: transcription factor LIM [Populus kitakamiensis]
  misc_feature (1)..(175): Homolog of NCBI NO: 7715037 NR Description: LIM transcription factor homolog [Zea mays]
MATSFQGTTTKCNACDKTVYLVDKLTADNRVYHKACFRCHHCKGTLKLANYNSFEGVLYCRPHFDQLFKRTGSLDKSFEGTPKVVKPERNVGNENATKVSSAFAGTREKCFGCSKTVYPIERVTVNNTMYHKSCFKCCHGGCTISPSNYIAHEGKLFCKHHHTQLIKEKGNFSQLENDHDKTSQSAGSVDDEDSEY

SEQ ID NO: 69171 - protein, 135 aa, Triticum aestivum
  peptide (1)..(135): Ceres Seq. ID no. 15219821
SNIIPCLTQAVLPRLAAANSNTCSCRPPPTAPRHLPPYNHHSPQGLSGAKPSQSCVGRTEQQLADREFGRGNGDFVPGDDHQVQRLRQDGVPRRQAHRRQPGLPQGLLQVPPLQGHPQARKLQLVRRSALLQASL

SEQ ID NO: 69172 - DNA, 874 bp, Triticum aestivum
  misc_feature (1)..(874): Ceres Seq. ID no. 12619532
tgacatacaagaggtggaggaggtgaagagtcagtacacttcctttgaaatagcaagaggaagagacctagggatcaacaggctcgagatatcaacagcaaccctggagcctcagcagttatggaccaaaaatgtccttgagaagctcgccaccgatgctcagggtctgctaatcatccaagcaagcatcgaggaagtgaagcagaaaatcgagggaacttccaagggcaaatctcccatgagctcagagtacagcagcatcagggctcagctgcaggagatcgagggctctgtcttggaacagataggtttcaacagcagtttgacaaagaaggccgagaattatcctgcattcgaggtgaatgccgacctagagggctattccagcagaaggaagatctccgagcaggtgcagaaagggtcggagaaggtggcgaggctggacctcgagctccagaagatacagtacgtgctgctgaagctcgaggaagagcatgagttcaagagggtcaaggtctccgagaagcggtcgcggctgctcttgagggactacgtgtacgcaaagaaggacaagaatgacgccgggcagaagaagaagagtagggtgcccttctgcggctgtgtgcgccccaaaacagtgactgagtcttgattcggagtccgcagcaagcaatgtctttagtatctcttctgtaatgggttgcatgataatgttaacaaggagctcatgcattcggagttttgtccttgttcagaaatgccccctagtttaactagttaatcctactgatacttttatgaatcgaagcattttgtaattccgttgcccttcgctgtttctctgtgtctgcaatgaagatatatgagaatcttc

SEQ ID NO: 69173 - protein, 216 aa, Triticum aestivum
  peptide (1)..(216): Ceres Seq. ID no. 12619533
  misc_feature (21)..(133): Homolog of NCBI NO: 29370236 NR Description: centromere protein-like protein
  misc_feature (25)..(215): Homolog of NCBI NO: 15233570 NR Description: centromere protein homolog; protein id:
  misc_feature (9)..(209): Homolog of NCBI NO: 9279697 NR Description: centromere protein [Arabidopsis thaliana]
  misc_feature (9)..(209): Homolog of NCBI NO: 15228859 NR Description: unknown protein; protein id: At3g22790.1
  misc_feature (4)..(209): Homolog of NCBI NO: 15235468 NR Description: unknown protein; protein id: At4g02710.1
  misc_feature (1)..(210): Homolog of NCBI NO: 15218702 NR Description: unknown protein; protein id: At1g03080.1
  misc_feature (21)..(216): Homolog of NCBI NO: 4894628 NR Description: NT3 [Nicotiana tabacum]
  misc_feature (1)..(214): Homolog of NCBI NO: 37534452 NR Description: putative centromere protein
DIQEVEEVKSQYTSFEIARGRDLGINRLEISTATLEPQQLWTKNVLEKLATDAQGLLIIQASIEEVKQKIEGTSKGKSPMSSEYSSIRAQLQEIEGSVLEQIGFNSSLTKKAENYPAFEVNADLEGYSSRRKISEQVQKGSEKVARLDLELQKIQYVLLKLEEEHEFKRVKVSEKRSRLLLRDYVYAKKDKNDAGQKKKSRVPFCGCVRPKTVTES

SEQ ID NO: 69174 - protein, 137 aa, Triticum aestivum
  peptide (1)..(137): Ceres Seq. ID no. 12619534
  misc_feature (1)..(54): Homolog of NCBI NO: 29370236 NR Description: centromere protein-like protein
  misc_feature (1)..(136): Homolog of NCBI NO: 15233570 NR Description: centromere protein homolog; protein id:
  misc_feature (1)..(130): Homolog of NCBI NO: 9279697 NR Description: centromere protein [Arabidopsis thaliana]
  misc_feature (1)..(130): Homolog of NCBI NO: 15228859 NR Description: unknown protein; protein id: At3g22790.1
  misc_feature (1)..(130): Homolog of NCBI NO: 15235468 NR Description: unknown protein; protein id: At4g02710.1
  misc_feature (1)..(131): Homolog of NCBI NO: 15218702 NR Description: unknown protein; protein id: At1g03080.1
  misc_feature (1)..(137): Homolog of NCBI NO: 4894628 NR Description: NT3 [Nicotiana tabacum]
  misc_feature (1)..(135): Homolog of NCBI NO: 37534452 NR Description: putative centromere protein
MSSEYSSIRAQLQEIEGSVLEQIGFNSSLTKKAENYPAFEVNADLEGYSSRRKISEQVQKGSEKVARLDLELQKIQYVLLKLEEEHEFKRVKVSEKRSRLLLRDYVYAKKDKNDAGQKKKSRVPFCGCVRPKTVTES

SEQ ID NO: 69175 - DNA, 1124 bp, Triticum aestivum
  misc_feature (1)..(1124): Ceres Seq. ID no. 13496281
acagtcacaccgagcgagagagaaaataaagggggctcgtcgggctcgtgcagggtcgagagagaaaaaaaagagagagagctcgctcattcccattcccatcccatcccctcccctcgtcggagccgcgccgccgcccgccaatccgccgccgccgcccatgtcaaagacgccggggaagacgccgcggacgcccaggcggatcctggagtcctacaccatcaagggatccgacggcgtcatccgccctggggactctgtgctgatgaaggcgcccgacacatcaaagcctccgtatgtggccaagattgaggaaatcgaggcagcaggacctcggggcgcaaatgtcaaggttaaagtgcgctggtactaccgaccagaggagtctattggtgggcgcaggccattccatggcgaaaaggaggtgttcctctctgaccaccaagatgtgcagagtgctgacaccatagagtgcaagtgcaacgtttacagcttccgggactacaccaagctttctgctgtcaatcctgaggactatttttgccgcttcgagtacaagtcaatcacaggcagctttgtgcctgatcgcattgctgtgttttgtaagtgtgagatgccatacaaccctgatgatcttatgatccagtgtgaggaatgctctgattggtttcaccctgcttgtattggaaagaccatcaaagaagcaaagaaacttgagaattttacatgcgaaggttgtgttgctgaaaatggaaatggaaatggagtcaagaacgaaaattcccatgaatctactggtgaatcagatgagaagcaggtgcagtcgaagcggcgacggcggtgaaggcgaaggcgatctgggcggaagtcctccatctcttcacgcatgtgttgcggtggatgtacattgctgtttccagtttgatgtagaacgaacctgtattgagagtgtcttctagagtctggcaatcggccagtttgcgactttgcatatccatgtggacctaccagttagagggagtcatttttctctcttcttttttccatcccccttgtgttgacatggacaatggtgtgcttgaacgtcctttcttcattgactagaaaagaggatttcaactttc

SEQ ID NO: 69176 - protein, 280 aa, Triticum aestivum
  peptide (1)..(280): Ceres Seq. ID no. 15222984
  misc_feature (79)..(196): Pfam Name: BAH domain Pfam Description: BAH domain
  misc_feature (89)..(271): Homolog of NCBI NO: 15234729 NR Description: receptor like protein (fragment) [Arabidopsis
  misc_feature (84)..(271): Homolog of NCBI NO: 11292613 NR Description: receptor like protein - Arabidopsis thaliana
  misc_feature (66)..(251): Homolog of NCBI NO: 34904940 NR Description: OSJNBa0077M12.13 [Oryza sativa (japonica
  misc_feature (63)..(261): Homolog of NCBI NO: 7484948 NR Description: ES43 protein homolog F19H22.200 - Arabidopsis
  misc_feature (63)..(277): Homolog of NCBI NO: 21595796 NR Description: ES43 like protein [Arabidopsis thaliana]
  misc_feature (63)..(277): Homolog of NCBI NO: 18420377 NR Description: ES43 like protein [Arabidopsis thaliana]
  misc_feature (66)..(280): Homolog of NCBI NO: 37573088 NR Description: receptor like protein [Oryza sativa (japonica
  misc_feature (60)..(280): Homolog of NCBI NO: 34897170 NR Description: putative DNA-binding protein
  misc_feature (63)..(280): Homolog of NCBI NO: 33146914 NR Description: putative ES43 protein [Oryza sativa (japonica
  misc_feature (54)..(280): Homolog of NCBI NO: 629783 NR Description: ES43 protein - barley
QSHRAREKIKGARRARAGSREKKKRESSLIPIPIPSPPLVGAAPPPANPPPPPMSKTPGKTPRTPRRILESYTIKGSDGVIRPGDSVLMKAPDTSKPPYVAKIEEIEAAGPRGANVKVKVRWYYRPEESIGGRRPFHGEKEVFLSDHQDVQSADTIECKCNVYSFRDYTKLSAVNPEDYFCRFEYKSITGSFVPDRIAVFCKCEMPYNPDDLMIQCEECSDWFHPACIGKTIKEAKKLENFTCEGCVAENGNGNGVKNENSHESTGESDEKQVQSKRRRR

SEQ ID NO: 69177 - protein, 227 aa, Triticum aestivum
  peptide (1)..(227): Ceres Seq. ID no. 15222985
  misc_feature (26)..(143): Pfam Name: BAH domain Pfam Description: BAH domain
  misc_feature (36)..(218): Homolog of NCBI NO: 15234729 NR Description: receptor like protein (fragment) [Arabidopsis
  misc_feature (31)..(218): Homolog of NCBI NO: 11292613 NR Description: receptor like protein - Arabidopsis thaliana
  misc_feature (13)..(198): Homolog of NCBI NO: 34904940 NR Description: OSJNBa0077M12.13 [Oryza sativa (japonica
  misc_feature (10)..(208): Homolog of NCBI NO: 7484948 NR Description: ES43 protein homolog F19H22.200 - Arabidopsis
  misc_feature (10)..(224): Homolog of NCBI NO: 21595796 NR Description: ES43 like protein [Arabidopsis thaliana]
  misc_feature (10)..(224): Homolog of NCBI NO: 18420377 NR Description: ES43 like protein [Arabidopsis thaliana]
  misc_feature (13)..(227): Homolog of NCBI NO: 37573088 NR Description: receptor like protein [Oryza sativa (japonica
  misc_feature (7)..(227): Homolog of NCBI NO: 34897170 NR Description: putative DNA-binding protein
  misc_feature (10)..(227): Homolog of NCBI NO: 33146914 NR Description: putative ES43 protein [Oryza sativa (japonica
  misc_feature (1)..(227): Homolog of NCBI NO: 629783 NR Description: ES43 protein - barley
MSKTPGKTPRTPRRILESYTIKGSDGVIRPGDSVLMKAPDTSKPPYVAKIEEIEAAGPRGANVKVKVRWYYRPEESIGGRRPFHGEKEVFLSDHQDVQSADTIECKCNVYSFRDYTKLSAVNPEDYFCRFEYKSITGSFVPDRIAVFCKCEMPYNPDDLMIQCEECSDWFHPACIGKTIKEAKKLENFTCEGCVAENGNGNGVKNENSHESTGESDEKQVQSKRRRR

SEQ ID NO: 69178 - protein, 192 aa, Triticum aestivum
  peptide (1)..(192): Ceres Seq. ID no. 15222986
  misc_feature (1)..(108): Pfam Name: BAH domain Pfam Description: BAH domain
  misc_feature (1)..(183): Homolog of NCBI NO: 15234729 NR Description: receptor like protein (fragment) [Arabidopsis
  misc_feature (1)..(183): Homolog of NCBI NO: 11292613 NR Description: receptor like protein - Arabidopsis thaliana
  misc_feature (1)..(163): Homolog of NCBI NO: 34904940 NR Description: OSJNBa0077M12.13 [Oryza sativa (japonica
  misc_feature (1)..(173): Homolog of NCBI NO: 7484948 NR Description: ES43 protein homolog F19H22.200 - Arabidopsis
  misc_feature (1)..(189): Homolog of NCBI NO: 21595796 NR Description: ES43 like protein [Arabidopsis thaliana]
  misc_feature (1)..(189): Homolog of NCBI NO: 18420377 NR Description: ES43 like protein [Arabidopsis thaliana]
  misc_feature (1)..(192): Homolog of NCBI NO: 37573088 NR Description: receptor like protein [Oryza sativa (japonica
  misc_feature (1)..(192): Homolog of NCBI NO: 34897170 NR Description: putative DNA-binding protein
  misc_feature (1)..(192): Homolog of NCBI NO: 33146914 NR Description: putative ES43 protein [Oryza sativa (japonica
  misc_feature (1)..(192): Homolog of NCBI NO: 629783 NR Description: ES43 protein - barley
MKAPDTSKPPYVAKIEEIEAAGPRGANVKVKVRWYYRPEESIGGRRPFHGEKEVFLSDHQDVQSADTIECKCNVYSFRDYTKLSAVNPEDYFCRFEYKSITGSFVPDRIAVFCKCEMPYNPDDLMIQCEECSDWFHPACIGKTIKEAKKLENFTCEGCVAENGNGNGVKNENSHESTGESDEKQVQSKRRRR

SEQ ID NO: 69179 - DNA, 1282 bp, Triticum aestivum
  misc_feature (1)..(1282): Ceres Seq. ID no. 14301595
actctctgcaaagaaagttcacgtatgtcacgcgttgatgatattctgagaaactgcatgcagctggtggatttgaggctgaaagatttaagttgtcgccaacctgcttttcatatctttggtcctaactcaaagttaaagagtctgcaattggacaactacaacactgtgggtgtctacctgggtttggtgccttatcttgaaacatttgcttgtcgtggtcagccaactatactacactatggcttggtgcctcggcttaggcatgtgagtttgaacttcttgcaaactggagatgacggcaagaatgattcctctggtagcaacaggacatatcgactaagcaaattctttttaggggcgccgccaccgctagagtgccttgttctgcagttaagagggcgtcaggtaagtagcttttcctgaaatgatctctttcatattggtcatgacattgcatcagtaagacagtactaaattatcacttcatttatgcagatgtggatggaactaaccgccattcccgaccagctcagtcatctcaagaaactattcattgcaaacgtgccaatgaactgggatacattctggattctccacctacttgctgccgcacctgccttggagtcgctccatgttcattttgacaacaactcagagaaggcgggtgccacaggatcaccagatgtgcaagtggaacaccatcagcgctactatcacctgaaagaactcgtggtcatcggcttcggcggggcggcgtggcagacaggctttgtgaagcagatcatccaggcatcgccgatcctggagcgcgtccgcctgctggacgggcacgtcgtggaggacgaagatcgggagctcgtcggcctggacattgtgcgccgccgccgggagtggcacgagtgcgagagatcggaggtgctcgacgaactgacggacgggatcagttcgccgcatctcgagatagttctggaatgactttcggcagaagtgttgctgtgccggcggtggccttccgttctgtagggcttgcagctgtatgccatggcctaatgattatgtgttatgctggctctcaagatagatcaacatgtgtttgtatcgggtatcttgcgctttacttttgctcgattatccaaaggacggatgtagctagctgttgagatgattgattccgtggtgctcatggtgtggcttgactaggcaaaattaccacttgcacgcgcctaaaagatattttcctttcctttctgatagaagcaaaaagatctgcggcatcccc

SEQ ID NO: 69180 - protein, 161 aa, Triticum aestivum
  peptide (1)..(161): Ceres Seq. ID no. 14301596
  misc_feature (1)..(104): Homolog of NCBI NO: 21743054 NR Description: OSJNBa0083D01.4 [Oryza sativa (japonica
  misc_feature (1)..(115): Homolog of NCBI NO: 32526680 NR Description: plant disease resistance polyprotein -like
  misc_feature (4)..(161): Homolog of NCBI NO: 38346115 NR Description: OSJNBb0006N15.10 [Oryza sativa (japonica
  misc_feature (4)..(116): Homolog of NCBI NO: 21743052 NR Description: OSJNBa0083D01.2 [Oryza sativa (japonica
  misc_feature (1)..(121): Homolog of NCBI NO: 15451608 NR Description: Putative retroelement [Oryza sativa]
  misc_feature (2)..(161): Homolog of NCBI NO: 21397271 NR Description: Putative plant disease resistance polyprotein
  misc_feature (2)..(160): Homolog of NCBI NO: 15451608 NR Description: Putative retroelement [Oryza sativa]
MQMWMELTAIPDQLSHLKKLFIANVPMNWDTFWILHLLAAAPALESLHVHFDNNSEKAGATGSPDVQVEHHQRYYHLKELVVIGFGGAAWQTGFVKQIIQASPILERVRLLDGHVVEDEDRELVGLDIVRRRREWHECERSEVLDELTDGISSPHLEIVLE

SEQ ID NO: 69181 - protein, 159 aa, Triticum aestivum
  peptide (1)..(159): Ceres Seq. ID no. 14301597
  misc_feature (1)..(102): Homolog of NCBI NO: 21743054 NR Description: OSJNBa0083D01.4 [Oryza sativa (japonica
  misc_feature (1)..(113): Homolog of NCBI NO: 32526680 NR Description: plant disease resistance polyprotein -like
  misc_feature (2)..(159): Homolog of NCBI NO: 38346115 NR Description: OSJNBb0006N15.10 [Oryza sativa (japonica
  misc_feature (2)..(114): Homolog of NCBI NO: 21743052 NR Description: OSJNBa0083D01.2 [Oryza sativa (japonica
  misc_feature (1)..(119): Homolog of NCBI NO: 15451608 NR Description: Putative retroelement [Oryza sativa]
  misc_feature (1)..(159): Homolog of NCBI NO: 21397271 NR Description: Putative plant disease resistance polyprotein
  misc_feature (1)..(158): Homolog of NCBI NO: 15451608 NR Description: Putative retroelement [Oryza sativa]
MWMELTAIPDQLSHLKKLFIANVPMNWDTFWILHLLAAAPALESLHVHFDNNSEKAGATGSPDVQVEHHQRYYHLKELVVIGFGGAAWQTGFVKQIIQASPILERVRLLDGHVVEDEDRELVGLDIVRRRREWHECERSEVLDELTDGISSPHLEIVLE

SEQ ID NO: 69182 - protein, 157 aa, Triticum aestivum
  peptide (1)..(157): Ceres Seq. ID no. 14301598
  misc_feature (1)..(100): Homolog of NCBI NO: 21743054 NR Description: OSJNBa0083D01.4 [Oryza sativa (japonica
  misc_feature (1)..(111): Homolog of NCBI NO: 32526680 NR Description: plant disease resistance polyprotein -like
  misc_feature (1)..(157): Homolog of NCBI NO: 38346115 NR Description: OSJNBb0006N15.10 [Oryza sativa (japonica
  misc_feature (1)..(112): Homolog of NCBI NO: 21743052 NR Description: OSJNBa0083D01.2 [Oryza sativa (japonica
  misc_feature (1)..(117): Homolog of NCBI NO: 15451608 NR Description: Putative retroelement [Oryza sativa]
  misc_feature (1)..(157): Homolog of NCBI NO: 21397271 NR Description: Putative plant disease resistance polyprotein
  misc_feature (1)..(156): Homolog of NCBI NO: 15451608 NR Description: Putative retroelement [Oryza sativa]
MELTAIPDQLSHLKKLFIANVPMNWDTFWILHLLAAAPALESLHVHFDNNSEKAGATGSPDVQVEHHQRYYHLKELVVIGFGGAAWQTGFVKQIIQASPILERVRLLDGHVVEDEDRELVGLDIVRRRREWHECERSEVLDELTDGISSPHLEIVLE

SEQ ID NO: 69183 - DNA, 992 bp, Triticum aestivum
  misc_feature (1)..(992): Ceres Seq. ID no. 13656581
atcgttccctcctcctcccgttcgtttcctcagcgcctccaccacacactcagcgcccgatacccatcaccagccccgagtcgctgctttgcctccccgccatggccacctctgcttcctcccctccgtcgccggccggtcaccagcaagggcccgcaaccgcaaccgcgcccatggtcgctgttgcctcgtgcctcctcgcgcgcacccatagagcttcgccgcgccacctcgctcatgtcttgccggcttcctccgcctctgaactcgtcggccgtcgcgcctccagccgccagcacccctctgccgcaggccccgtgctccctccgctcgtctattcctcgccctcgccgcacttcgcgggtagccgcaccgcactggaccagcgcgccaccaggtgcagccatgggcaccgttttcctcaagcaacagccgccgttcggcctcgggccggtaagatcctgcaaccccacgtcgaggtcgccgttcccggccttcccctcacccgtcatcgccgcatccgacgggagctggccagaggccgccctttctcgcgtcagcctcctctgcattgagcgccgctgcctccgccccgtgccgttgacctcctatagcctcttgtttgttgtgtgcatcgctgcccacgactccggtagcaccttcgggtcctccttcgtcgaagggcactccccaacatcgtttcttcgttttggatcatgccaagtccgactacgacctgaacgactacacgatgaccccgaagaacatggattcgtcaagttctctttgacatgagtaccactaccgccgcccgaacaactacaaaccgaaatgccatgttcctctccgaacgtgtacgactaccgatgagtacctctaccgatgtcgtgtagcactactttcgtctgcactgcatcaaactcgtccgccccgaattgcacgcttcgaaggtataaacccgagacaacgccgaacaaatacatatgtgttgt

SEQ ID NO: 69184 - protein, 264 aa, Triticum aestivum
  peptide (1)..(264): Ceres Seq. ID no. 13656582
  misc_feature (3)..(185): Homolog of NCBI NO: 81286 NR Description: extensin - Volvox carteri (fragment)
IVPSSSRSFPQRLHHTLSARYPSPAPSRCFASPPWPPLLPPLRRRPVTSKGPQPQPRPWSLLPRASSRAPIELRRATSLMSCRLPPPLNSSAVAPPAASTPLPQAPCSLRSSIPRPRRTSRVAAPHWTSAPPGAAMGTVFLKQQPPFGLGPVRSCNPTSRSPFPAFPSPVIAASDGSWPEAALSRVSLLCIERRCLRPVPLTSYSLLFVVCIAAHDSGSTFGSSFVEGHSPTSFLRFGSCQVRLRPERLHDDPEEHGFVKFSLT

SEQ ID NO: 69185 - protein, 190 aa, Triticum aestivum
  peptide (1)..(190): Ceres Seq. ID no. 13656583
RSLLLPFVSSAPPPHTQRPIPITSPESLLCLPAMATSASSPPSPAGHQQGPATATAPMVAVASCLLARTHRASPRHLAHVLPASSASELVGRRASSRQHPSAAGPVLPPLVYSSPSPHFAGSRTALDQRATRCSHGHRFPQATAAVRPRAGKILQPHVEVAVPGLPLTRHRRIRRELARGRPFSRQPPLH

SEQ ID NO: 69186 - protein, 185 aa, Triticum aestivum
  peptide (1)..(185): Ceres Seq. ID no. 13656584
  misc_feature (1)..(106): Homolog of NCBI NO: 81286 NR Description: extensin - Volvox carteri (fragment)
MSCRLPPPLNSSAVAPPAASTPLPQAPCSLRSSIPRPRRTSRVAAPHWTSAPPGAAMGTVFLKQQPPFGLGPVRSCNPTSRSPFPAFPSPVIAASDGSWPEAALSRVSLLCIERRCLRPVPLTSYSLLFVVCIAAHDSGSTFGSSFVEGHSPTSFLRFGSCQVRLRPERLHDDPEEHGFVKFSLT

SEQ ID NO: 69187 - protein, 157 aa, Triticum aestivum
  peptide (1)..(157): Ceres Seq. ID no. 13656585
MATSASSPPSPAGHQQGPATATAPMVAVASCLLARTHRASPRHLAHVLPASSASELVGRRASSRQHPSAAGPVLPPLVYSSPSPHFAGSRTALDQRATRCSHGHRFPQATAAVRPRAGKILQPHVEVAVPGLPLTRHRRIRRELARGRPFSRQPPLH

SEQ ID NO: 69188 - DNA, 1416 bp, Triticum aestivum
  misc_feature (1)..(1416): Ceres Seq. ID no. 14303528
gaaaaaaaaaaagactagacggtggcggaaaatggcgtgcggtctcctgccgctgctccacggccccctctcctctccgcctcgtcccctcgtcccctcccgctccccctccctcctcgcgcccgggaccctgcccctagcccctcgccggagcagggtttcgcgtcacctgtcccctgcccctccgcgcgcgctcccggacattgccgcggcggcggcgggcctccgggacgcggtcgccggcgccttccaggcgtccccgcctacgtggagctcggctgccacaaccaacgtcgccatcttcgtcgcgggcacgccgctgctcctctccggcctctccgcctccggcatcgcggccgcctacgtcctcggcaccctcacgtggcgcgcatttggggcccgggcttacctcctcgtcgccgcctacttcgtggtgggcacagcagtgaccaagttaaagataaaacaaaaagaagctttgggagtggctgagaaaaaaggaggaaggagaggtcctggtagtgttattggttctagtgctgctggttgtgtctgtgctctcctatcagtatataatgtgggcaggggagcattcgcggaactctggacacttggctttgttgcaagtttctgtactaaactcagtgatacagtttccagtgaaatagggaaggcatatggaagaacaacttacctagtgacaacatttaagattgttccaagaggtacagaaggtgcagtcagtgttgagggcactcttgctggaattgtagcatcaacgtttctggcagggattggttatattttggggcaggtaaatctaccacagggtgtgctatgtgttcttgcatcccagattgcaaattttggcgagagtttgattggcgcaacgctgcaggataaggaaggttttgaatggctgaacaatgatgttgtcaacgtggtcaatatctcggccggcgccgttttggctgctctaatgcagcagctgctagtgagctggcgctcatgatctttgtttcctgacttttctccagtgcatccgctctcgtagtttcttagcggtataagcagctggcatttgcttgtggaactctcaagtcgcaattgagtggatgcacgtgcttctcctttgtgacacatcttcctgtacttctaattctagcttaaggcctgttcccgttcgctccactccgcggagctccaggagctcggtttgagctgctccgtggaaataagctgcagtttcctccgctccgggggcgcagtccagggatcggagaggaaccgaacaggcctttagtaacattgatttgtggaagtaaaacactctctgccagagcatcatatgttcaagaaatactgagctggctggcgtgctactagctactactccaaacaatgatcattctacac

SEQ ID NO: 69189 - protein, 336 aa, Triticum aestivum
  peptide (1)..(336): Ceres Seq. ID no. 14303529
  misc_feature (79)..(305): Pfam Name: Integral membrane protein DUF92 Pfam Description: Integral membrane protein DUF92
  misc_feature (90)..(325): Homolog of NCBI NO: 37520469 NR Description: hypothetical protein gll0900 [Gloeobacter
  misc_feature (112)..(194): Homolog of NCBI NO: 23125371 NR Description: hypothetical protein [Nostoc punctiforme]
  misc_feature (201)..(327): Homolog of NCBI NO: 23125371 NR Description: hypothetical protein [Nostoc punctiforme]
  misc_feature (90)..(334): Homolog of NCBI NO: 23043616 NR Description: hypothetical protein [Trichodesmium erythraeum
  misc_feature (112)..(327): Homolog of NCBI NO: 17229104 NR Description: hypothetical protein [Nostoc sp. PCC 7120]
  misc_feature (90)..(324): Homolog of NCBI NO: 16330187 NR Description: hypothetical protein [Synechocystis sp. PCC 6803]
  misc_feature (112)..(324): Homolog of NCBI NO: 22299927 NR Description: ORF_ID:tlr2384~hypothetical protein
  misc_feature (70)..(334): Homolog of NCBI NO: 18412044 NR Description: expressed protein [Arabidopsis thaliana]
  misc_feature (23)..(334): Homolog of NCBI NO: 21592713 NR Description: unknown [Arabidopsis thaliana]
  misc_feature (11)..(307): Homolog of NCBI NO: 34910822 NR Description: P0456A01.17 [Oryza sativa (japonica
KKKKTRRWRKMACGLLPLLHGPLSSPPRPLVPSRSPSLLAPGTLPLAPRRSRVSRHLSPAPPRALPDIAAAAAGLRDAVAGAFQASPPTWSSAATTNVAIFVAGTPLLLSGLSASGIAAAYVLGTLTWRAFGARAYLLVAAYFVVGTAVTKLKIKQKEALGVAEKKGGRRGPGSVIGSSAAGCVCALLSVYNVGRGAFAELWTLGFVASFCTKLSDTVSSEIGKAYGRTTYLVTTFKIVPRGTEGAVSVEGTLAGIVASTFLAGIGYILGQVNLPQGVLCVLASQIANFGESLIGATLQDKEGFEWLNNDVVNVVNISAGAVLAALMQQLLVSWRS

SEQ ID NO: 69190 - protein, 326 aa, Triticum aestivum
  peptide (1)..(326): Ceres Seq. ID no. 14303530
  misc_feature (69)..(295): Pfam Name: Integral membrane protein DUF92 Pfam Description: Integral membrane protein DUF92
  misc_feature (80)..(315): Homolog of NCBI NO: 37520469 NR Description: hypothetical protein gll0900 [Gloeobacter
  misc_feature (102)..(184): Homolog of NCBI NO: 23125371 NR Description: hypothetical protein [Nostoc punctiforme]
  misc_feature (191)..(317): Homolog of NCBI NO: 23125371 NR Description: hypothetical protein [Nostoc punctiforme]
  misc_feature (80)..(324): Homolog of NCBI NO: 23043616 NR Description: hypothetical protein [Trichodesmium erythraeum
  misc_feature (102)..(317): Homolog of NCBI NO: 17229104 NR Description: hypothetical protein [Nostoc sp. PCC 7120]
  misc_feature (80)..(314): Homolog of NCBI NO: 16330187 NR Description: hypothetical protein [Synechocystis sp. PCC 6803]
  misc_feature (102)..(314): Homolog of NCBI NO: 22299927 NR Description: ORF_ID:tlr2384~hypothetical protein
  misc_feature (60)..(324): Homolog of NCBI NO: 18412044 NR Description: expressed protein [Arabidopsis thaliana]
  misc_feature (13)..(324): Homolog of NCBI NO: 21592713 NR Description: unknown [Arabidopsis thaliana]
  misc_feature (1)..(297): Homolog of NCBI NO: 34910822 NR Description: P0456A01.17 [Oryza sativa (japonica
MACGLLPLLHGPLSSPPRPLVPSRSPSLLAPGTLPLAPRRSRVSRHLSPAPPRALPDIAAAAAGLRDAVAGAFQASPPTWSSAATTNVAIFVAGTPLLLSGLSASGIAAAYVLGTLTWRAFGARAYLLVAAYFVVGTAVTKLKIKQKEALGVAEKKGGRRGPGSVIGSSAAGCVCALLSVYNVGRGAFAELWTLGFVASFCTKLSDTVSSEIGKAYGRTTYLVTTFKIVPRGTEGAVSVEGTLAGIVASTFLAGIGYILGQVNLPQGVLCVLASQIANFGESLIGATLQDKEGFEWLNNDVVNVVNISAGAVLAALMQQLLVSWRS

SEQ ID NO: 69191 - DNA, 1273 bp, Triticum aestivum
  misc_feature (1)..(1273): Ceres Seq. ID no. 13663074
attctcctccccgctcgctcctatcctcccccatgccgccgcccccttccccccgctcgcctctgccgcctcctctccttccccgcacgtccggcctaccccctcctccctcctcctccatcctccctcattcgtcatcacggcagaccatctcccgtcacttgggccccatgctggcggccgggtcggggtggaggcgcagcagggctgcaggggccctacgtgtactacctctacagccagtacgggttcgacaagggcgacatcggccgcctcttcatcgccggctttggctcctccatgctcttcggcaccatcgtcgggtcgctcgccgacaagcagggaaggaagagggcgtgcatcacctacatcctcagctgcatcacgaagcactcgccgcagtacaggattctgatgataggccgtgtgcttggaggcattgcaacatcgctgctcttctcggcattcgagtcgtggctcgtggcggagcacaacaagggagagttgactgatgtacatgagacccaggcgaaaatgagtgtgctagcggaggctccagggatgcagggtgatagggcccagtctatgctccggttgtgttgttggggaagcttcggacgggatttagataaggaaaaggagtcccgtgcgaaatcgagcgtcctggtgttgggactgatgatccgcacttgttgtctaaatgcagaacatgcgcattgcagtgctttctatcagtaccgacgaccacaaatgggatggatcgagcaaccaagactcagagtgtggttgacagtgcggcctgctcccaaccctgcagataactctgggtttgaactggaaccttgtgtcatttggtgcaatgggtaattttgttcacagtacttgcttatgaagttaaagttggcatatatgcctgcccatgaacaagtctattgatacatgttttttaaagcacacatgttagtgggtctccgtgtcatttgcgtacatgatttcaaatggatccatttgcgtacatgatttcaaatggatccatttgcgtacatgatttcaaatggatctttgcgaatatggtagcaagtattttgtgctatgaaattaaaatgtgtacatacatctcatcgtagacaacaatccaacatgtttcttannaaaaaaaaaaaaaaaaaaaaaaaaaaaaaaaaaaaaaaaaaaaaaaaaaaaaaaaaaaaaaaaaaagaaaaaaaaaaaaaaaaaggtttatcgataccgccaacctcaagggggggcccgg

SEQ ID NO: 69192 - protein, 288 aa, Triticum aestivum
  peptide (1)..(288): Ceres Seq. ID no. 13663075
  misc_feature (70)..(166): Pfam Name: Protein of unknown function (DUF791) Pfam Description: Protein of unknown function (DUF791)
  misc_feature (70)..(171): Homolog of NCBI NO: 39587911 NR Description: Hypothetical protein CBG13530 [Caenorhabditis
  misc_feature (70)..(171): Homolog of NCBI NO: 25148676 NR Description: Transporter (48.1 kD) [Caenorhabditis elegans]
  misc_feature (70)..(166): Homolog of NCBI NO: 15217708 NR Description: expressed protein [Arabidopsis thaliana]
  misc_feature (70)..(166): Homolog of NCBI NO: 6633826 NR Description: F1N19.22 [Arabidopsis thaliana]
  misc_feature (70)..(166): Homolog of NCBI NO: 30693172 NR Description: expressed protein [Arabidopsis thaliana]
  misc_feature (70)..(166): Homolog of NCBI NO: 18417054 NR Description: expressed protein [Arabidopsis thaliana]
  misc_feature (70)..(166): Homolog of NCBI NO: 11292198 NR Description: hypothetical protein F2K15.170 - Arabidopsis
  misc_feature (70)..(166): Homolog of NCBI NO: 7487513 NR Description: hypothetical protein T29A15.210 - Arabidopsis
  misc_feature (70)..(166): Homolog of NCBI NO: 37536124 NR Description: putative transporter [Oryza sativa (japonica
  misc_feature (70)..(166): Homolog of NCBI NO: 34902182 NR Description: Putative transporter [Oryza sativa (japonica
ILLPARSYPPPCRRPLPPARLCRLLSFPARPAYPLLPPPPSSLIRHHGRPSPVTWAPCWRPGRGGGAAGLQGPYVYYLYSQYGFDKGDIGRLFIAGFGSSMLFGTIVGSLADKQGRKRACITYILSCITKHSPQYRILMIGRVLGGIATSLLFSAFESWLVAEHNKGELTDVHETQAKMSVLAEAPGMQGDRAQSMLRLCCWGSFGRDLDKEKESRAKSSVLVLGLMIRTCCLNAEHAHCSAFYQYRRPQMGWIEQPRLRVWLTVRPAPNPADNSGFELEPCVIWCNG

SEQ ID NO: 69193 - protein, 188 aa, Triticum aestivum
  peptide (1)..(188): Ceres Seq. ID no. 13663076
  misc_feature (1)..(66): Pfam Name: Protein of unknown function (DUF791) Pfam Description: Protein of unknown function (DUF791)
  misc_feature (1)..(71): Homolog of NCBI NO: 39587911 NR Description: Hypothetical protein CBG13530 [Caenorhabditis
  misc_feature (1)..(71): Homolog of NCBI NO: 25148676 NR Description: Transporter (48.1 kD) [Caenorhabditis elegans]
  misc_feature (1)..(66): Homolog of NCBI NO: 15217708 NR Description: expressed protein [Arabidopsis thaliana]
  misc_feature (1)..(66): Homolog of NCBI NO: 6633826 NR Description: F1N19.22 [Arabidopsis thaliana]
  misc_feature (1)..(66): Homolog of NCBI NO: 11292198 NR Description: hypothetical protein F2K15.170 - Arabidopsis
  misc_feature (1)..(66): Homolog of NCBI NO: 18417054 NR Description: expressed protein [Arabidopsis thaliana]
  misc_feature (1)..(66): Homolog of NCBI NO: 30693172 NR Description: expressed protein [Arabidopsis thaliana]
  misc_feature (1)..(66): Homolog of NCBI NO: 7487513 NR Description: hypothetical protein T29A15.210 - Arabidopsis
  misc_feature (1)..(66): Homolog of NCBI NO: 37536124 NR Description: putative transporter [Oryza sativa (japonica
  misc_feature (1)..(66): Homolog of NCBI NO: 34902182 NR Description: Putative transporter [Oryza sativa (japonica
MLFGTIVGSLADKQGRKRACITYILSCITKHSPQYRILMIGRVLGGIATSLLFSAFESWLVAEHNKGELTDVHETQAKMSVLAEAPGMQGDRAQSMLRLCCWGSFGRDLDKEKESRAKSSVLVLGLMIRTCCLNAEHAHCSAFYQYRRPQMGWIEQPRLRVWLTVRPAPNPADNSGFELEPCVIWCNG

SEQ ID NO: 69194 - protein, 169 aa, Triticum aestivum
  peptide (1)..(169): Ceres Seq. ID no. 13663077
SPPRSLLSSPMPPPPSPRSPLPPPLLPRTSGLPPPPSSSILPHSSSRQTISRHLGPMLAAGSGWRRSRAAGALRVLPLQPVRVRQGRHRPPLHRRLWLLHALRHHRRVARRQAGKEEGVHHLHPQLHHEALAAVQDSDDRPCAWRHCNIAALLGIRVVARGGAQQGRVD

SEQ ID NO: 69195 - DNA, 1219 bp, Triticum aestivum
  misc_feature (1)..(1219): Ceres Seq. ID no. 13656382
gaaaacccgttcgttccgcagaaattcaaaatccaaatcccacccccacccccacctcccctcgccggcggcgaccgaccgaccgaccgatcgatccatggcgccggccgacgtcaaggacgcgtcccctcctccccgccccccgcctccccccgccgggccggcgctccccggcggcgcggaggagtacgtgcgcggctccatcgaggccgccctcggcctccccgtgccggaccgctctatccgcgccaagctcgcggcctacgaggacctgcgccgccgcctccaggaccgcgtcttcgcgctcgaggaggacctccacgccgccgcccgccgcatcgacctcctcaagaacgagtcggcgatgaacgcggaggggatccggcgctgcgtggaggagaaggaggccgtggcggccgcgcgcgatcagctcgccgcccacgccgccaggctcgagaaggagtgcgggctctacgagcgcgacctcgagcgcgccatggagtcctgcgacgagctcgccagggagagcgacgacctgcgcaaccgcctccgtgacgcccccgaccttactgaacaagtccaagcgctgcagagggacaaggagatactcaagaccaacctgaacaaagcagaggaggaggttaagttgctgtttgaggagaacagagccctcgacgaagcaaacaagaggctgctgtgcttgctggagaaggagcagaagcatcggtccgaaagaaagcactccgccagtaattccaccaagaaacgcaagtcgtcgagcctgaaggacacgagcccggtcagcctggccatcgatttcaacagtgcggacgcgtcgaggcagcccctgttgcccttgcagccaaactctccggactgcagggtgcataagaagtgaagctggccgtcccggcattctcctctggatggcttaaactgaagtgaactgaacaactaccccttagctaggcatcgtcgcttgctgcttgcctgatcgatctgactaacttgctgggttaatttggttggttcttgtcggtagaacctcctcggtcatatgtagttcttcttccgcttgtgttggcagctgcctgtgtctatcatatcatgatcctttcatgacaaaattagtagtattatcttagtagttttgtgtctggtgatgggcgtgtaaggctctgattcgacgcttattgtggccagttcgtcgtgcctctgc

SEQ ID NO: 69196 - protein, 298 aa, Triticum aestivum
  peptide (1)..(298): Ceres Seq. ID no. 13656383
  misc_feature (89)..(263): Pfam Name: Myosin tail Pfam Description: Myosin tail
  misc_feature (88)..(277): Homolog of NCBI NO: 15223854 NR Description: hypothetical protein [Arabidopsis thaliana]
  misc_feature (78)..(296): Homolog of NCBI NO: 15233676 NR Description: expressed protein [Arabidopsis thaliana]
  misc_feature (61)..(198): Homolog of NCBI NO: 15233676 NR Description: expressed protein [Arabidopsis thaliana]
  misc_feature (61)..(256): Homolog of NCBI NO: 15223854 NR Description: hypothetical protein [Arabidopsis thaliana]
KTRSFRRNSKSKSHPHPHLPSPAATDRPTDRSMAPADVKDASPPPRPPPPPAGPALPGGAEEYVRGSIEAALGLPVPDRSIRAKLAAYEDLRRRLQDRVFALEEDLHAAARRIDLLKNESAMNAEGIRRCVEEKEAVAAARDQLAAHAARLEKECGLYERDLERAMESCDELARESDDLRNRLRDAPDLTEQVQALQRDKEILKTNLNKAEEEVKLLFEENRALDEANKRLLCLLEKEQKHRSERKHSASNSTKKRKSSSLKDTSPVSLAIDFNSADASRQPLLPLQPNSPDCRVHKK

SEQ ID NO: 69197 - protein, 266 aa, Triticum aestivum
  peptide (1)..(266): Ceres Seq. ID no. 13656384
  misc_feature (57)..(231): Pfam Name: Myosin tail Pfam Description: Myosin tail
  misc_feature (56)..(245): Homolog of NCBI NO: 15223854 NR Description: hypothetical protein [Arabidopsis thaliana]
  misc_feature (46)..(264): Homolog of NCBI NO: 15233676 NR Description: expressed protein [Arabidopsis thaliana]
  misc_feature (29)..(166): Homolog of NCBI NO: 15233676 NR Description: expressed protein [Arabidopsis thaliana]
  misc_feature (29)..(224): Homolog of NCBI NO: 15223854 NR Description: hypothetical protein [Arabidopsis thaliana]
MAPADVKDASPPPRPPPPPAGPALPGGAEEYVRGSIEAALGLPVPDRSIRAKLAAYEDLRRRLQDRVFALEEDLHAAARRIDLLKNESAMNAEGIRRCVEEKEAVAAARDQLAAHAARLEKECGLYERDLERAMESCDELARESDDLRNRLRDAPDLTEQVQALQRDKEILKTNLNKAEEEVKLLFEENRALDEANKRLLCLLEKEQKHRSERKHSASNSTKKRKSSSLKDTSPVSLAIDFNSADASRQPLLPLQPNSPDCRVHKK

SEQ ID NO: 69198 - protein, 184 aa, Triticum aestivum
  peptide (1)..(184): Ceres Seq. ID no. 13656385
  misc_feature (12)..(184): Homolog of NCBI NO: 18025526 NR Description: LF3 [cercopithicine herpesvirus 15]
  misc_feature (12)..(184): Homolog of NCBI NO: 18025526 NR Description: LF3 [cercopithicine herpesvirus 15]
  misc_feature (12)..(184): Homolog of NCBI NO: 18025526 NR Description: LF3 [cercopithicine herpesvirus 15]
  misc_feature (12)..(184): Homolog of NCBI NO: 18025526 NR Description: LF3 [cercopithicine herpesvirus 15]
  misc_feature (12)..(184): Homolog of NCBI NO: 18025526 NR Description: LF3 [cercopithicine herpesvirus 15]
  misc_feature (12)..(184): Homolog of NCBI NO: 18025526 NR Description: LF3 [cercopithicine herpesvirus 15]
  misc_feature (12)..(184): Homolog of NCBI NO: 18025526 NR Description: LF3 [cercopithicine herpesvirus 15]
  misc_feature (12)..(184): Homolog of NCBI NO: 18025526 NR Description: LF3 [cercopithicine herpesvirus 15]
  misc_feature (12)..(184): Homolog of NCBI NO: 18025526 NR Description: LF3 [cercopithicine herpesvirus 15]
  misc_feature (15)..(184): Homolog of NCBI NO: 25453418 NR Description: proline-rich proteoglycan 2 [Rattus norvegicus]
ENPFVPQKFKIQIPPPPPPPLAGGDRPTDRSIHGAGRRQGRVPSSPPPASPRRAGAPRRRGGVRARLHRGRPRPPRAGPLYPRQARGLRGPAPPPPGPRLRARGGPPRRRPPHRPPQERVGDERGGDPALRGGEGGRGGRARSARRPRRQAREGVRALRARPRARHGVLRRARQGERRPAQPPP

SEQ ID NO: 69199 - DNA, 790 bp, Triticum aestivum
  misc_feature (1)..(790): Ceres Seq. ID no. 12619917
acccagcaacaacacagagcacttggttcccagcttgcctaggttgaagttgacagagcgagcgaaagtagaggagagactcgcagcctcgcaccagcaagctagcttcgcccgccatggccttccgcgacgcggcccgcaagccgctcctgtggctcctcccggccacgctcatcctggcgaccggcggcggcgagcgcgacgccgcccggcggcggctctacgcccccaccctgctggccgcgtggctggtcctcggcgtcgtcacggcggtgctggccgccaacggagggaggatcatgcgcttcgcccgctggaagaggctgctgctccgcggggggctgctgctcgccctcggcctcaacgccttctgcatcttcctcgccctcgacgccgtcgccgaccggctcctgggcgagcagggccccgtctccttcgccgtggctcgcgtcgtgtgcgccctcaccgccgccgccgcgcacctcgacttcggatgggtcgccgtccacggggagtagagcagcgagtcgttacttgttagccgaccggccggcggagactgattagtagtatgtggtcgagtgacttatttttgatgcgtattgttctagtagcaggcattgtgcgcaaattgttaggctgtgtcttcaaagttgatgtccggccttctgccggacacagatcaacatgcatgtagtgtgagaagtgagtatttatgtgtttaagctagtatttttacactgtgtttaagttaagctaaggatttggttaacccccggttggtggcctg

SEQ ID NO: 69200 - protein, 179 aa, Triticum aestivum
  peptide (1)..(179): Ceres Seq. ID no. 12619918
  misc_feature (37)..(174): Pfam Name: HlyD family secretion protein Pfam Description: HlyD family secretion protein
PSNNTEHLVPSLPRLKLTERAKVEERLAASHQQASFARHGLPRRGPQAAPVAPPGHAHPGDRRRRARRRPAAALRPHPAGRVAGPRRRHGGAGRQRREDHALRPLEEAAAPRGAAARPRPQRLLHLPRPRRRRRPAPGRAGPRLLRRGSRRVRPHRRRRAPRLRMGRRPRGVEQRVVTC

SEQ ID NO: 69201 - protein, 133 aa, Triticum aestivum
  peptide (1)..(133): Ceres Seq. ID no. 12619919
MAFRDAARKPLLWLLPATLILATGGGERDAARRRLYAPTLLAAWLVLGVVTAVLAANGGRIMRFARWKRLLLRGGLLLALGLNAFCIFLALDAVADRLLGEQGPVSFAVARVVCALTAAAAHLDFGWVAVHGE

SEQ ID NO: 69202 - DNA, 1198 bp, Triticum aestivum
  misc_feature (1)..(1198): Ceres Seq. ID no. 13656486
aaaaaaaaaaaccaaaggccagacccagaccagaccgctcacgccgcaccgcacgcgctgcacgggcacccaacacaagcccttctccgatcgtgctcgctcgccgccggtactagtctagtagagcagcggggaggagctccgagatgagggcgccgcggaggccgatggcggtggtgctcagctgggtgcggaggcagccgcccaaggtcaaggccttcctcgccgtcgtcgcgggcatgaccgcgctcgtcttcatccgcttcatcgtccacgaccacgacaacctcttcgtcgccgccgaggccgcgcacgcgctcggcatcgccgtgctcatctacaagctcaccaaggagaagacctgcgctggactttcactcaagtctcaggatttgacagcattgttcctggccgttaggttgtattgcagctttgttatggagtatgacatccatacaatactggattcagctacactagtagctactctttttgtcatttacatgattcggttcagactgaggtcaacttatatgctggacaaggacaattttgcattgtactacgtggttgtaccatgttgtgtgctggcatttattgctcatccttcaacatcacatatcatgatcaataggatctgctgggccttctgtgtttacttggaagctgtttcagtgctgccccagttgcgcttgatgcagaatacaaagattgttgaaccattcacagctcattatgtgtttgcgttgggtgtggcaaggttccttagctgtgcacactgggtccttcaggtcttggatactcgtggcagattattgactgctctgggctatggcttttggccatcgatggtgctcctctctgaaatcgtccagacgttcatccttgcagatttctgctactactatgtgaagagtcttgctggcggacaactagtgctgcgacttccttctggggtggtgtaaaatctggtgcacaactcatttgttcggtgctgtgtcttactgttgaacagtggctctgcttctggcgcccaaccttctctcttctcatgtgggatggattcaagagtcttgtttgccttttctttttccagttataaactgtttggtgaaaattgtaccggagactgttggtcgtgaagcttaggctgttgagaatactatctatagctgactatttatccagactagttttc

SEQ ID NO: 69203 - protein, 272 aa, Triticum aestivum
  peptide (1)..(272): Ceres Seq. ID no. 13656487
  misc_feature (47)..(258): Pfam Name: ER lumen protein retaining receptor Pfam Description: ER lumen protein retaining receptor
  misc_feature (10)..(268): Homolog of NCBI NO: 15230808 NR Description: ER lumen protein retaining receptor -related
  misc_feature (5)..(256): Homolog of NCBI NO: 25412019 NR Description: probable ER lumen protein retaining receptor
  misc_feature (1)..(257): Homolog of NCBI NO: 25518365 NR Description: hypothetical protein T20H2.24 - Arabidopsis
  misc_feature (5)..(272): Homolog of NCBI NO: 21537286 NR Description: putative ER lumen protein retaining receptor
  misc_feature (5)..(272): Homolog of NCBI NO: 18399619 NR Description: ER lumen protein retaining receptor -related
  misc_feature (5)..(272): Homolog of NCBI NO: 13430654 NR Description: putative ER lumen protein retaining receptor
  misc_feature (1)..(272): Homolog of NCBI NO: 18420309 NR Description: expressed protein [Arabidopsis thaliana]
  misc_feature (1)..(272): Homolog of NCBI NO: 15223724 NR Description: ER lumen protein-retaining receptor [Arabidopsis
  misc_feature (1)..(272): Homolog of NCBI NO: 9369358 NR Description: F10A5.5 [Arabidopsis thaliana]
  misc_feature (1)..(272): Homolog of NCBI NO: 15222871 NR Description: ER lumen protein retaining receptor -related
MRAPRRPMAVVLSWVRRQPPKVKAFLAVVAGMTALVFIRFIVHDHDNLFVAAEAAHALGIAVLIYKLTKEKTCAGLSLKSQDLTALFLAVRLYCSFVMEYDIHTILDSATLVATLFVIYMIRFRLRSTYMLDKDNFALYYVVVPCCVLAFIAHPSTSHIMINRICWAFCVYLEAVSVLPQLRLMQNTKIVEPFTAHYVFALGVARFLSCAHWVLQVLDTRGRLLTALGYGFWPSMVLLSEIVQTFILADFCYYYVKSLAGGQLVLRLPSGVV

SEQ ID NO: 69204 - protein, 265 aa, Triticum aestivum
  peptide (1)..(265): Ceres Seq. ID no. 13656488
  misc_feature (40)..(251): Pfam Name: ER lumen protein retaining receptor Pfam Description: ER lumen protein retaining receptor
  misc_feature (3)..(261): Homolog of NCBI NO: 15230808 NR Description: ER lumen protein retaining receptor -related
  misc_feature (1)..(249): Homolog of NCBI NO: 25412019 NR Description: probable ER lumen protein retaining receptor
  misc_feature (1)..(250): Homolog of NCBI NO: 25518365 NR Description: hypothetical protein T20H2.24 - Arabidopsis
  misc_feature (1)..(265): Homolog of NCBI NO: 21537286 NR Description: putative ER lumen protein retaining receptor
  misc_feature (1)..(265): Homolog of NCBI NO: 18399619 NR Description: ER lumen protein retaining receptor -related
  misc_feature (1)..(265): Homolog of NCBI NO: 13430654 NR Description: putative ER lumen protein retaining receptor
  misc_feature (1)..(265): Homolog of NCBI NO: 18420309 NR Description: expressed protein [Arabidopsis thaliana]
  misc_feature (1)..(265): Homolog of NCBI NO: 15223724 NR Description: ER lumen protein-retaining receptor [Arabidopsis
  misc_feature (1)..(265): Homolog of NCBI NO: 9369358 NR Description: F10A5.5 [Arabidopsis thaliana]
  misc_feature (1)..(265): Homolog of NCBI NO: 15222871 NR Description: ER lumen protein retaining receptor -related
MAVVLSWVRRQPPKVKAFLAVVAGMTALVFIRFIVHDHDNLFVAAEAAHALGIAVLIYKLTKEKTCAGLSLKSQDLTALFLAVRLYCSFVMEYDIHTILDSATLVATLFVIYMIRFRLRSTYMLDKDNFALYYVVVPCCVLAFIAHPSTSHIMINRICWAFCVYLEAVSVLPQLRLMQNTKIVEPFTAHYVFALGVARFLSCAHWVLQVLDTRGRLLTALGYGFWPSMVLLSEIVQTFILADFCYYYVKSLAGGQLVLRLPSGVV

SEQ ID NO: 69205 - protein, 241 aa, Triticum aestivum
  peptide (1)..(241): Ceres Seq. ID no. 13656489
  misc_feature (16)..(227): Pfam Name: ER lumen protein retaining receptor Pfam Description: ER lumen protein retaining receptor
  misc_feature (1)..(237): Homolog of NCBI NO: 15230808 NR Description: ER lumen protein retaining receptor -related
  misc_feature (1)..(225): Homolog of NCBI NO: 25412019 NR Description: probable ER lumen protein retaining receptor
  misc_feature (1)..(226): Homolog of NCBI NO: 25518365 NR Description: hypothetical protein T20H2.24 - Arabidopsis
  misc_feature (1)..(241): Homolog of NCBI NO: 21537286 NR Description: putative ER lumen protein retaining receptor
  misc_feature (1)..(241): Homolog of NCBI NO: 18399619 NR Description: ER lumen protein retaining receptor -related
  misc_feature (1)..(241): Homolog of NCBI NO: 13430654 NR Description: putative ER lumen protein retaining receptor
  misc_feature (1)..(241): Homolog of NCBI NO: 18420309 NR Description: expressed protein [Arabidopsis thaliana]
  misc_feature (1)..(241): Homolog of NCBI NO: 15223724 NR Description: ER lumen protein-retaining receptor [Arabidopsis
  misc_feature (1)..(241): Homolog of NCBI NO: 9369358 NR Description: F10A5.5 [Arabidopsis thaliana]
  misc_feature (1)..(241): Homolog of NCBI NO: 15222871 NR Description: ER lumen protein retaining receptor -related
MTALVFIRFIVHDHDNLFVAAEAAHALGIAVLIYKLTKEKTCAGLSLKSQDLTALFLAVRLYCSFVMEYDIHTILDSATLVATLFVIYMIRFRLRSTYMLDKDNFALYYVVVPCCVLAFIAHPSTSHIMINRICWAFCVYLEAVSVLPQLRLMQNTKIVEPFTAHYVFALGVARFLSCAHWVLQVLDTRGRLLTALGYGFWPSMVLLSEIVQTFILADFCYYYVKSLAGGQLVLRLPSGVV

SEQ ID NO: 69206 - DNA, 1497 bp, Triticum aestivum
  misc_feature (1)..(1497): Ceres Seq. ID no. 13656501
cacccccacccgcatcctcctccctccccccaagctgcaattcacctccgaattcggtcgcccatggcaccgcggctgctctgatcctacccacctaccccctccccctcccctcccctcccctcccagctgctctcccttcccctctcgtttgaaaatggcaatgctggtggatcctccgaatggcatgggaaaccaagggaagcactattactcaatgtggcaaaccttgtttgagattgacaccaagtatgtgcctatcaaacccataggccgaggagcttatggaatagtttgctcatccataaaccgtgagacaaacgagaaagtagcgataaagaagatacataatgtattcgacaaccgtgtggatgcactaaggaccttgcgggagctgaaactcctccggcatctccgccatgagaatgttatttctttgaaggatataatgatgcctgtacaaaggaggagctttaaggatgtgtacttggtttatgagctcatggatacagacctgcatcagataatcaaatcgcctcaggggctttccaacgaccactgccaatattttctttttcagttgcttcgaggactgaaatacctccattcagcagagatactccacagagacctaaaacctgggaacctactggtgaatgcaaactgtgatctgaagatatgcgattttggtcttgcacgtacaaacagtagtaaaggccagtttatgactgaatatgtcgtcacccgctggtatagggctcctgagttgctgctttgctgcgacaactacggcacttccattgatgtttggtctgttggctgcatctttgctgagctacttggccgcaagcctattttccccgggacagagtgcctaaatcagctaaaactgatagtcaatgttcttggcacgatgagcgagtctgacctggagttcatcgacaacccaaaggcccgcagatatatcaagaccctcccctacactcctggtgttccacttgcaagtatgtacccacatgcacaccctctggccatcgatctattacagaagatgctcatcttcgaccctaccaaaagggtcagtgttacccaggcccttgagcacccttacatgtctcctctgtatgacccaagtgcaaaccctcccgcgcaagtgcccatcgatctcgacatagatgagaacatcagctcagagatgatcagggaaatgatgtggcaggagatgcttcactaccaccctgaagccgccacggcagtaaacatgtgacgacgatcttgcagtgccctgggaagaacccggcaggctcactccttttttcctcgaaaagactactgcgattatcgcacctattaagtaaccacgacgtgcagtgtggagaggtatctccgtgtaaatatgcagtgcgataagaaccgcatatggatagttcttgttatggaccactttggtgtatgtatactgttgtgttgttgtataagctcatgaaagaactgttg

SEQ ID NO: 69207 - protein, 421 aa, Triticum aestivum
  peptide (1)..(421): Ceres Seq. ID no. 13656502
  misc_feature (84)..(371): Pfam Name: Protein kinase domain Pfam Description: Protein kinase domain
  misc_feature (53)..(417): Homolog of NCBI NO: 533280 NR Description: ATMPK1 [Arabidopsis thaliana]
  misc_feature (53)..(420): Homolog of NCBI NO: 533281 NR Description: ATMPK2 [Arabidopsis thaliana]
  misc_feature (53)..(420): Homolog of NCBI NO: 18406388 NR Description: mitogen-activated protein kinase (MAPK), putative
  misc_feature (53)..(419): Homolog of NCBI NO: 2499612 NR Description: MITOGEN-ACTIVATED PROTEIN KINASE HOMOLOG 1
  misc_feature (53)..(417): Homolog of NCBI NO: 15218451 NR Description: mitogen-activated protein kinase (MAPK), putative
  misc_feature (53)..(418): Homolog of NCBI NO: 2499614 NR Description: MITOGEN-ACTIVATED PROTEIN KINASE HOMOLOG NTF3
  misc_feature (53)..(421): Homolog of NCBI NO: 6491800 NR Description: MAPK4 protein [Oryza sativa]
  misc_feature (53)..(421): Homolog of NCBI NO: 24412848 NR Description: putative mitogen-activated protein kinase, msrmk3
  misc_feature (53)..(421): Homolog of NCBI NO: 11869994 NR Description: MAP kinase 2 [Oryza sativa]
  misc_feature (53)..(420): Homolog of NCBI NO: 7341300 NR Description: MAP kinase MAPK2 [Oryza sativa]
TPTRILLPPPKLQFTSEFGRPWHRGCSDPTHLPPPPPLPSPPSCSPFPSRLKMAMLVDPPNGMGNQGKHYYSMWQTLFEIDTKYVPIKPIGRGAYGIVCSSINRETNEKVAIKKIHNVFDNRVDALRTLRELKLLRHLRHENVISLKDIMMPVQRRSFKDVYLVYELMDTDLHQIIKSPQGLSNDHCQYFLFQLLRGLKYLHSAEILHRDLKPGNLLVNANCDLKICDFGLARTNSSKGQFMTEYVVTRWYRAPELLLCCDNYGTSIDVWSVGCIFAELLGRKPIFPGTECLNQLKLIVNVLGTMSESDLEFIDNPKARRYIKTLPYTPGVPLASMYPHAHPLAIDLLQKMLIFDPTKRVSVTQALEHPYMSPLYDPSANPPAQVPIDLDIDENISSEMIREMMWQEMLHYHPEAATAVNM

SEQ ID NO: 69208 - protein, 369 aa, Triticum aestivum
  peptide (1)..(369): Ceres Seq. ID no. 13656503
  misc_feature (32)..(319): Pfam Name: Protein kinase domain Pfam Description: Protein kinase domain
  misc_feature (1)..(365): Homolog of NCBI NO: 533280 NR Description: ATMPK1 [Arabidopsis thaliana]
  misc_feature (1)..(368): Homolog of NCBI NO: 533281 NR Description: ATMPK2 [Arabidopsis thaliana]
  misc_feature (1)..(368): Homolog of NCBI NO: 18406388 NR Description: mitogen-activated protein kinase (MAPK), putative
  misc_feature (1)..(367): Homolog of NCBI NO: 2499612 NR Description: MITOGEN-ACTIVATED PROTEIN KINASE HOMOLOG 1
  misc_feature (1)..(365): Homolog of NCBI NO: 15218451 NR Description: mitogen-activated protein kinase (MAPK), putative
  misc_feature (1)..(366): Homolog of NCBI NO: 2499614 NR Description: MITOGEN-ACTIVATED PROTEIN KINASE HOMOLOG NTF3
  misc_feature (1)..(369): Homolog of NCBI NO: 6491800 NR Description: MAPK4 protein [Oryza sativa]
  misc_feature (1)..(369): Homolog of NCBI NO: 24412848 NR Description: putative mitogen-activated protein kinase, msrmk3
  misc_feature (1)..(369): Homolog of NCBI NO: 11869994 NR Description: MAP kinase 2 [Oryza sativa]
  misc_feature (1)..(368): Homolog of NCBI NO: 7341300 NR Description: MAP kinase MAPK2 [Oryza sativa]
MAMLVDPPNGMGNQGKHYYSMWQTLFEIDTKYVPIKPIGRGAYGIVCSSINRETNEKVAIKKIHNVFDNRVDALRTLRELKLLRHLRHENVISLKDIMMPVQRRSFKDVYLVYELMDTDLHQIIKSPQGLSNDHCQYFLFQLLRGLKYLHSAEILHRDLKPGNLLVNANCDLKICDFGLARTNSSKGQFMTEYVVTRWYRAPELLLCCDNYGTSIDVWSVGCIFAELLGRKPIFPGTECLNQLKLIVNVLGTMSESDLEFIDNPKARRYIKTLPYTPGVPLASMYPHAHPLAIDLLQKMLIFDPTKRVSVTQALEHPYMSPLYDPSANPPAQVPIDLDIDENISSEMIREMMWQEMLHYHPEAATAVNM

SEQ ID NO: 69209 - protein, 367 aa, Triticum aestivum
  peptide (1)..(367): Ceres Seq. ID no. 13656504
  misc_feature (30)..(317): Pfam Name: Protein kinase domain Pfam Description: Protein kinase domain
  misc_feature (1)..(363): Homolog of NCBI NO: 533280 NR Description: ATMPK1 [Arabidopsis thaliana]
  misc_feature (1)..(366): Homolog of NCBI NO: 533281 NR Description: ATMPK2 [Arabidopsis thaliana]
  misc_feature (1)..(366): Homolog of NCBI NO: 18406388 NR Description: mitogen-activated protein kinase (MAPK), putative
  misc_feature (1)..(365): Homolog of NCBI NO: 2499612 NR Description: MITOGEN-ACTIVATED PROTEIN KINASE HOMOLOG 1
  misc_feature (1)..(363): Homolog of NCBI NO: 15218451 NR Description: mitogen-activated protein kinase (MAPK), putative
  misc_feature (1)..(364): Homolog of NCBI NO: 2499614 NR Description: MITOGEN-ACTIVATED PROTEIN KINASE HOMOLOG NTF3
  misc_feature (1)..(367): Homolog of NCBI NO: 6491800 NR Description: MAPK4 protein [Oryza sativa]
  misc_feature (1)..(367): Homolog of NCBI NO: 24412848 NR Description: putative mitogen-activated protein kinase, msrmk3
  misc_feature (1)..(367): Homolog of NCBI NO: 11869994 NR Description: MAP kinase 2 [Oryza sativa]
  misc_feature (1)..(366): Homolog of NCBI NO: 7341300 NR Description: MAP kinase MAPK2 [Oryza sativa]
MLVDPPNGMGNQGKHYYSMWQTLFEIDTKYVPIKPIGRGAYGIVCSSINRETNEKVAIKKIHNVFDNRVDALRTLRELKLLRHLRHENVISLKDIMMPVQRRSFKDVYLVYELMDTDLHQIIKSPQGLSNDHCQYFLFQLLRGLKYLHSAEILHRDLKPGNLLVNANCDLKICDFGLARTNSSKGQFMTEYVVTRWYRAPELLLCCDNYGTSIDVWSVGCIFAELLGRKPIFPGTECLNQLKLIVNVLGTMSESDLEFIDNPKARRYIKTLPYTPGVPLASMYPHAHPLAIDLLQKMLIFDPTKRVSVTQALEHPYMSPLYDPSANPPAQVPIDLDIDENISSEMIREMMWQEMLHYHPEAATAVNM

SEQ ID NO: 69210 - DNA, 781 bp, Triticum aestivum
  misc_feature (1)..(781): Ceres Seq. ID no. 12619783
ccattcacactcctcctcccgcaccataccatcaatcaaggtgctcgagggacataggatcagaagaaagacgggaggatggatcggtacgaggtggtgagggacatcgggtccgggaacttcggggtggcgaagctggtgcgggacacgcccacggtatacgcacgtacagctcgatcgcaatggcgtcgctcgtcgccgtccagccggtcgccgtgcggggcctggccggcagctccatctccggccgcaagctcgccgtccggcccgcctccgccgccgtctcccgctccacccgcagggctcgcggggcggcggtggtggccaagtacggggagaagagcgtctacttcgacctggacgacatcgccaacacgacggggcagtgggacctgtacggcagcgacgcggcgtcgccctacaacggcctgcagagcaagttcttcaacaccttcgccgcgcccttcaccaagcgagggctgctgctcaaggtcctgctgctcggcggcggctccctgctcgcctacgtcagcgccaccgcctcccccgacctgctccccatcaagaaggggccccagctgccccccaccccggggccacgtggcaagatctaagtagatctgcaatcaaggccttcttcctcctctcgcctcgtgcttgtgtaccatggatctgatggattcccccctatggccctatctatgtcctctgttgatacttgatctttgtactacttcgtatcagtaattggaaagatgctgcttgcatgatgcatgcaatt

SEQ ID NO: 69211 - protein, 203 aa, Triticum aestivum
  peptide (1)..(203): Ceres Seq. ID no. 12619784
  misc_feature (63)..(203): Pfam Name: Photosystem I reaction centre subunit VI Pfam Description: Photosystem I reaction centre subunit VI
  misc_feature (60)..(203): Homolog of NCBI NO: 7443140 NR Description: photosystem I psaH precursor - wood tobacco
  misc_feature (60)..(203): Homolog of NCBI NO: 33520419 NR Description: photosystem I psaH protein [Trifolium pratense]
  misc_feature (60)..(203): Homolog of NCBI NO: 131199 NR Description: Photosystem I reaction center subunit VI,
  misc_feature (60)..(203): Homolog of NCBI NO: 7443138 NR Description: photosystem I protein psaH precursor - wood
  misc_feature (60)..(203): Homolog of NCBI NO: 7443139 NR Description: photosystem I protein psaH precursor - wood
  misc_feature (61)..(203): Homolog of NCBI NO: 3914465 NR Description: Photosystem I reaction center subunit VI,
  misc_feature (61)..(203): Homolog of NCBI NO: 72679 NR Description: photosystem I protein psaH precursor - rice
  misc_feature (61)..(203): Homolog of NCBI NO: 17380533 NR Description: Photosystem I reaction center subunit VI, precursor (PSI-H) (Light-harvesting complex I 11 kDa protein)
  misc_feature (61)..(203): Homolog of NCBI NO: 3885894 NR Description: photosystem-1 H subunit GOS5 [Oryza sativa]
  misc_feature (61)..(203): Homolog of NCBI NO: 131196 NR Description: Photosystem I reaction center subunit VI,
IHTPPPAPYHQSRCSRDIGSEERREDGSVRGGEGHRVRELRGGEAGAGHAHGIRTYSSIAMASLVAVQPVAVRGLAGSSISGRKLAVRPASAAVSRSTRRARGAAVVAKYGEKSVYFDLDDIANTTGQWDLYGSDAASPYNGLQSKFFNTFAAPFTKRGLLLKVLLLGGGSLLAYVSATASPDLLPIKKGPQLPPTPGPRGKI

SEQ ID NO: 69212 - protein, 179 aa, Triticum aestivum
  peptide (1)..(179): Ceres Seq. ID no. 12619785
  misc_feature (123)..(174): Pfam Name: Extensin-like region Pfam Description: Extensin-like region
  misc_feature (24)..(171): Homolog of NCBI NO: 2429362 NR Description: proline rich protein [Santalum album]
  misc_feature (40)..(171): Homolog of NCBI NO: 20138131 NR Description: Vegetative cell wall protein gp1 precursor
  misc_feature (41)..(170): Homolog of NCBI NO: 20138131 NR Description: Vegetative cell wall protein gp1 precursor
  misc_feature (40)..(171): Homolog of NCBI NO: 20138131 NR Description: Vegetative cell wall protein gp1 precursor
  misc_feature (40)..(179): Homolog of NCBI NO: 12018149 NR Description: gamete-specific hydroxyproline-rich glycoprotein
  misc_feature (25)..(179): Homolog of NCBI NO: 11359723 NR Description: proteophosphoglycan, membrane-associated
  misc_feature (29)..(168): Homolog of NCBI NO: 7248459 NR Description: arabinogalactan protein [Zea mays]
  misc_feature (40)..(170): Homolog of NCBI NO: 20138131 NR Description: Vegetative cell wall protein gp1 precursor
  misc_feature (1)..(179): Homolog of NCBI NO: 39580893 NR Description: Hypothetical protein CBG21491 [Caenorhabditis
  misc_feature (22)..(179): Homolog of NCBI NO: 23017082 NR Description: hypothetical protein [Thermobifida fusca]
MDRYEVVRDIGSGNFGVAKLVRDTPTVYARTARSQWRRSSPSSRSPCGAWPAAPSPAASSPSGPPPPPSPAPPAGLAGRRWWPSTGRRASTSTWTTSPTRRGSGTCTAATRRRPTTACRASSSTPSPRPSPSEGCCSRSCCSAAAPCSPTSAPPPPPTCSPSRRGPSCPPPRGHVARSK

SEQ ID NO: 69213 - protein, 143 aa, Triticum aestivum
  peptide (1)..(143): Ceres Seq. ID no. 12619786
  misc_feature (3)..(143): Pfam Name: Photosystem I reaction centre subunit VI Pfam Description: Photosystem I reaction centre subunit VI
  misc_feature (1)..(143): Homolog of NCBI NO: 7443140 NR Description: photosystem I psaH precursor - wood tobacco
  misc_feature (1)..(143): Homolog of NCBI NO: 33520419 NR Description: photosystem I psaH protein [Trifolium pratense]
  misc_feature (1)..(143): Homolog of NCBI NO: 131199 NR Description: Photosystem I reaction center subunit VI,
  misc_feature (1)..(143): Homolog of NCBI NO: 7443138 NR Description: photosystem I protein psaH precursor - wood
  misc_feature (1)..(143): Homolog of NCBI NO: 7443139 NR Description: photosystem I protein psaH precursor - wood
  misc_feature (1)..(143): Homolog of NCBI NO: 3914465 NR Description: Photosystem I reaction center subunit VI,
  misc_feature (1)..(143): Homolog of NCBI NO: 72679 NR Description: photosystem I protein psaH precursor - rice
  misc_feature (1)..(143): Homolog of NCBI NO: 17380533 NR Description: Photosystem I reaction center subunit VI, precursor (PSI-H) (Light-harvesting complex I 11 kDa protein)
  misc_feature (1)..(143): Homolog of NCBI NO: 3885894 NR Description: photosystem-1 H subunit GOS5 [Oryza sativa]
  misc_feature (1)..(143): Homolog of NCBI NO: 131196 NR Description: Photosystem I reaction center subunit VI,
MASLVAVQPVAVRGLAGSSISGRKLAVRPASAAVSRSTRRARGAAVVAKYGEKSVYFDLDDIANTTGQWDLYGSDAASPYNGLQSKFFNTFAAPFTKRGLLLKVLLLGGGSLLAYVSATASPDLLPIKKGPQLPPTPGPRGKI

SEQ ID NO: 69214 - DNA, 1775 bp, Triticum aestivum
  misc_feature (1)..(1775): Ceres Seq. ID no. 14307980
atatcgaacgcaacaatgcacctcgtcgccatggatatccctctcccgttgctcctctccaccttggccgttgccgtgaccatatgctatgtcctcttcttccgtgctgacaaggggcgcgcgccgctgccgcccgggccgaggggctggccggtgctggggaacctcccgcagctcggcggcaagacgcaccagaccatgcacgagatgtccaaggtgtacgggcccgtgctccggctccggttcggcagctccgtcgtggtggtggccgggtcggccgccgtggccgagcagttcctccgcacccacgacgccaagttcagcagccggccgcccaactccggcggcgagcacatggcgtacaactaccaggacgtggtgttcgcgccctacggcccccggtggcgcgcgatgaggaaggtgtgcgccgtgaacctcttctcggcccgcgcgctcgacgacctccgcgggttccgcgagcgggaggccgcgctcatggtgaggtccctcgctgatgccgctgctaccggcggggtggtggcggtcggcaaggcggcgaacgtgtgcacgaccaacgctctctcgcgggcggcggtggggctccgggtgttcgccgcggccggcgccgagcttggcgccaaggagttcaaggagatcgtgctggaggtgatggaggtgggcggcgtgctcaacgtcggggacttcgtgccggctctccggtggctcgacccgcagggtgttgttgccaggttgaagaaactgcaccgccggttcgacgacatgatgaacgggatcatcgccgagagaagggccggaggtagcacggccggcgaggagaaggaaggtaaggacctgctcggcttgctgctcgccatggtgcaggaagacaagtccctcaccggcggcgaggaggacaggatcacggacacggacgtcaaggcgctcatactgaacttgttcgtggcgggcacggagacgacgtcgacgatagtggagtgggcggtggcggagctgatccggcacccggacatgctgaagcgggcgcaggaggagatggacgccgtcgtgggccgggacaggctcgtctcggagtccgacctgccgcgcctcacgttcctgaacgcggtcatcaaggagaccttccggctgcacccgtcgacgccgctctcgctgccgcggatggcctccgaggagtgcgaggtcgccggctaccgcatccccaagggcacggagctgctggtcaacgtgtggggcatcgcccgcgacccggccctgtggcccgacccgctcgagttccggcccgcccggttcctcccgggagggacccacgccgacgtcgacgtcaaggggggcgacttcgggctgatcccgttcggggccggccggcggatctgcgcgggcctcagctggggcctgcgggtggtcaccgtgacggcggccacgctcgtgcactcgttcgactgggagctgccggcgggccagacgcccgacaagctcaacatggaggaggccttctctctgctgctgcagcgggccgtgccgctgatggcccacccggtgcccaggctgctcccgtcggcgtacgaaattgcataaacaaagacagagggaagcgcgccactgatttgtcgtgatgatctatggaggagaagctccagttgtgctatgtattgttgtcgatgggggtgtgcctcatcgttttcaactaaaatagttccacatgtaacttctgtactgtttttagatatagcatggaaaataacattttatgtatc

SEQ ID NO: 69215 - protein, 531 aa, Triticum aestivum
  peptide (1)..(531): Ceres Seq. ID no. 14307981
  misc_feature (17)..(529): Homolog of NCBI NO: 14278925 NR Description: flavonoid 3'-hydroxylase [Perilla frutescens]
  misc_feature (11)..(528): Homolog of NCBI NO: 27151498 NR Description: Flavonoid 3'-monooxygenase (Flavonoid
  misc_feature (15)..(529): Homolog of NCBI NO: 12231880 NR Description: putative flavonoid 3'-hydroxylase [Callistephus
  misc_feature (11)..(530): Homolog of NCBI NO: 37532650 NR Description: putative flavonoid 3'-hydroxylase
  misc_feature (6)..(531): Homolog of NCBI NO: 37532594 NR Description: putative cytochrome 450 [Oryza sativa (japonica
ISNATMHLVAMDIPLPLLLSTLAVAVTICYVLFFRADKGRAPLPPGPRGWPVLGNLPQLGGKTHQTMHEMSKVYGPVLRLRFGSSVVVVAGSAAVAEQFLRTHDAKFSSRPPNSGGEHMAYNYQDVVFAPYGPRWRAMRKVCAVNLFSARALDDLRGFREREAALMVRSLADAAATGGVVAVGKAANVCTTNALSRAAVGLRVFAAAGAELGAKEFKEIVLEVMEVGGVLNVGDFVPALRWLDPQGVVARLKKLHRRFDDMMNGIIAERRAGGSTAGEEKEGKDLLGLLLAMVQEDKSLTGGEEDRITDTDVKALILNLFVAGTETTSTIVEWAVAELIRHPDMLKRAQEEMDAVVGRDRLVSESDLPRLTFLNAVIKETFRLHPSTPLSLPRMASEECEVAGYRIPKGTELLVNVWGIARDPALWPDPLEFRPARFLPGGTHADVDVKGGDFGLIPFGAGRRICAGLSWGLRVVTVTAATLVHSFDWELPAGQTPDKLNMEEAFSLLLQRAVPLMAHPVPRLLPSAYEIA

SEQ ID NO: 69216 - protein, 526 aa, Triticum aestivum
  peptide (1)..(526): Ceres Seq. ID no. 14307982
  misc_feature (12)..(524): Homolog of NCBI NO: 14278925 NR Description: flavonoid 3'-hydroxylase [Perilla frutescens]
  misc_feature (6)..(523): Homolog of NCBI NO: 27151498 NR Description: Flavonoid 3'-monooxygenase (Flavonoid
  misc_feature (10)..(524): Homolog of NCBI NO: 12231880 NR Description: putative flavonoid 3'-hydroxylase [Callistephus
  misc_feature (6)..(525): Homolog of NCBI NO: 37532650 NR Description: putative flavonoid 3'-hydroxylase
  misc_feature (1)..(526): Homolog of NCBI NO: 37532594 NR Description: putative cytochrome 450 [Oryza sativa (japonica
MHLVAMDIPLPLLLSTLAVAVTICYVLFFRADKGRAPLPPGPRGWPVLGNLPQLGGKTHQTMHEMSKVYGPVLRLRFGSSVVVVAGSAAVAEQFLRTHDAKFSSRPPNSGGEHMAYNYQDVVFAPYGPRWRAMRKVCAVNLFSARALDDLRGFREREAALMVRSLADAAATGGVVAVGKAANVCTTNALSRAAVGLRVFAAAGAELGAKEFKEIVLEVMEVGGVLNVGDFVPALRWLDPQGVVARLKKLHRRFDDMMNGIIAERRAGGSTAGEEKEGKDLLGLLLAMVQEDKSLTGGEEDRITDTDVKALILNLFVAGTETTSTIVEWAVAELIRHPDMLKRAQEEMDAVVGRDRLVSESDLPRLTFLNAVIKETFRLHPSTPLSLPRMASEECEVAGYRIPKGTELLVNVWGIARDPALWPDPLEFRPARFLPGGTHADVDVKGGDFGLIPFGAGRRICAGLSWGLRVVTVTAATLVHSFDWELPAGQTPDKLNMEEAFSLLLQRAVPLMAHPVPRLLPSAYEIA

SEQ ID NO: 69217 - protein, 521 aa, Triticum aestivum
  peptide (1)..(521): Ceres Seq. ID no. 14307983
  misc_feature (7)..(519): Homolog of NCBI NO: 14278925 NR Description: flavonoid 3'-hydroxylase [Perilla frutescens]
  misc_feature (1)..(518): Homolog of NCBI NO: 27151498 NR Description: Flavonoid 3'-monooxygenase (Flavonoid
  misc_feature (5)..(519): Homolog of NCBI NO: 12231880 NR Description: putative flavonoid 3'-hydroxylase [Callistephus
  misc_feature (1)..(520): Homolog of NCBI NO: 37532650 NR Description: putative flavonoid 3'-hydroxylase
  misc_feature (1)..(521): Homolog of NCBI NO: 37532594 NR Description: putative cytochrome 450 [Oryza sativa (japonica
MDIPLPLLLSTLAVAVTICYVLFFRADKGRAPLPPGPRGWPVLGNLPQLGGKTHQTMHEMSKVYGPVLRLRFGSSVVVVAGSAAVAEQFLRTHDAKFSSRPPNSGGEHMAYNYQDVVFAPYGPRWRAMRKVCAVNLFSARALDDLRGFREREAALMVRSLADAAATGGVVAVGKAANVCTTNALSRAAVGLRVFAAAGAELGAKEFKEIVLEVMEVGGVLNVGDFVPALRWLDPQGVVARLKKLHRRFDDMMNGIIAERRAGGSTAGEEKEGKDLLGLLLAMVQEDKSLTGGEEDRITDTDVKALILNLFVAGTETTSTIVEWAVAELIRHPDMLKRAQEEMDAVVGRDRLVSESDLPRLTFLNAVIKETFRLHPSTPLSLPRMASEECEVAGYRIPKGTELLVNVWGIARDPALWPDPLEFRPARFLPGGTHADVDVKGGDFGLIPFGAGRRICAGLSWGLRVVTVTAATLVHSFDWELPAGQTPDKLNMEEAFSLLLQRAVPLMAHPVPRLLPSAYEIA

SEQ ID NO: 69218 - DNA, 1395 bp, Triticum aestivum
  misc_feature (1)..(1395): Ceres Seq. ID no. 13656783
gtcactctcctccctcccccgcccacagcccccacaccagaccagcgcggcagccgccatggatccaccaaccagcgctgcccaccacagccccgacgacgaggcggccgccttcttccgcgcggcgccgcccctccgcgaccgcgacgccgtcgccgccagcctcgccgccttcgtcgcccgccaccgcgcacgctccgccgccggcgccggcgcaggaggaggaggagggcccccggcggtggcgggggtggtctgcgtcacctccggcggcaccacggtgcccctggagcagcgctgcgtgcgctacatcgacaacttcagctccggccagcgcggggccgcgtccaccgagtatttcctaaaggccggttacgccgtcatcttcgtccaccgccgcgggagcaagcagccttactgcaggtttcttccggaggactcttttctcgaccttttcgagctcggcgaaggatcagagatccaagtcccagagtctcacaccacggtggtcaagacagcgatcagcagttatcgcaaggcaatcgatgaaggtctacttctgaaacttcctttcaccacaatttttgagtaccttcagttactgcagcttgtatccactgctatgaattgcttggagcgccatggaatgttttattgtgcagctgcagtgtctgacttctatgttccatgggagagtatggctaaacataaaatccagtcagcaggtggccctttgaacatgcagctcagtcaagttcctaagatgcttttcatcctcagaaaccattgggccccttctgcattttgtgtatccttcaagctcgagacggatccagacatccttatacagaaggcagaggcggctttgagaaagtatggtatgaatgtggtggtggcgaatgagctagcgaactacaaagacgtggttgtcatggtcacaagcagcgggaagacgaccgtgagcaggcggagcaaggaagatgacctggaagagcagctcattggtctcctggttaagatgcattcagatcacactaagcagtccaatccggaccaagagaaatgagctgttgtcttgatgaataaggagttgctacaagttattgtgctcattggtctcctggtttaattcacgtaccagtaagtggagtagcattctctcttgagaatcgcacgcgcgatcatctcccttatcccttatgttgtgctacaccgtctgtgatgcctgtctttatcgacgtcggcggtggtttggattggacaagtctcaccaattcaaaccccaaatctgaaatgtgtatattttgagagattcaaatttgattaatgggaatctaggctccttcgcctggactgcataatctaccataggtaggttacagcagcttcaaatgg

SEQ ID NO: 69219 - protein, 354 aa, Triticum aestivum
  peptide (1)..(354): Ceres Seq. ID no. 13656784
  misc_feature (84)..(324): Pfam Name: DNA / pantothenate metabolism flavoprotein Pfam Description: DNA / pantothenate metabolism flavoprotein
  misc_feature (164)..(341): Homolog of NCBI NO: 40556035 NR Description: CNPV097 conserved hypothetical protein [Canarypox
  misc_feature (84)..(326): Homolog of NCBI NO: 13385982 NR Description: RIKEN cDNA 6330579B17 [Mus musculus]
  misc_feature (84)..(342): Homolog of NCBI NO: 18255582 NR Description: RIKEN cDNA 6330579B17 gene [Mus musculus]
  misc_feature (84)..(345): Homolog of NCBI NO: 34870890 NR Description: similar to RIKEN cDNA 6330579B17 gene [Rattus
  misc_feature (32)..(136): Homolog of NCBI NO: 8778623 NR Description: F5O11.7 [Arabidopsis thaliana]
  misc_feature (165)..(348): Homolog of NCBI NO: 8778623 NR Description: F5O11.7 [Arabidopsis thaliana]
  misc_feature (84)..(161): Homolog of NCBI NO: 15241677 NR Description: hypothetical protein [Arabidopsis thaliana]
  misc_feature (183)..(349): Homolog of NCBI NO: 15241677 NR Description: hypothetical protein [Arabidopsis thaliana]
  misc_feature (32)..(348): Homolog of NCBI NO: 30682728 NR Description: expressed protein [Arabidopsis thaliana]
  misc_feature (19)..(354): Homolog of NCBI NO: 40253297 NR Description: putative Chain A, Crystal Structure Of
SLSSLPRPQPPHQTSAAAAMDPPTSAAHHSPDDEAAAFFRAAPPLRDRDAVAASLAAFVARHRARSAAGAGAGGGGGPPAVAGVVCVTSGGTTVPLEQRCVRYIDNFSSGQRGAASTEYFLKAGYAVIFVHRRGSKQPYCRFLPEDSFLDLFELGEGSEIQVPESHTTVVKTAISSYRKAIDEGLLLKLPFTTIFEYLQLLQLVSTAMNCLERHGMFYCAAAVSDFYVPWESMAKHKIQSAGGPLNMQLSQVPKMLFILRNHWAPSAFCVSFKLETDPDILIQKAEAALRKYGMNVVVANELANYKDVVVMVTSSGKTTVSRRSKEDDLEEQLIGLLVKMHSDHTKQSNPDQEK

SEQ ID NO: 69220 - protein, 335 aa, Triticum aestivum
  peptide (1)..(335): Ceres Seq. ID no. 13656785
  misc_feature (65)..(305): Pfam Name: DNA / pantothenate metabolism flavoprotein Pfam Description: DNA / pantothenate metabolism flavoprotein
  misc_feature (145)..(322): Homolog of NCBI NO: 40556035 NR Description: CNPV097 conserved hypothetical protein [Canarypox
  misc_feature (65)..(307): Homolog of NCBI NO: 13385982 NR Description: RIKEN cDNA 6330579B17 [Mus musculus]
  misc_feature (65)..(323): Homolog of NCBI NO: 18255582 NR Description: RIKEN cDNA 6330579B17 gene [Mus musculus]
  misc_feature (65)..(326): Homolog of NCBI NO: 34870890 NR Description: similar to RIKEN cDNA 6330579B17 gene [Rattus
  misc_feature (13)..(117): Homolog of NCBI NO: 8778623 NR Description: F5O11.7 [Arabidopsis thaliana]
  misc_feature (146)..(329): Homolog of NCBI NO: 8778623 NR Description: F5O11.7 [Arabidopsis thaliana]
  misc_feature (65)..(142): Homolog of NCBI NO: 15241677 NR Description: hypothetical protein [Arabidopsis thaliana]
  misc_feature (164)..(330): Homolog of NCBI NO: 15241677 NR Description: hypothetical protein [Arabidopsis thaliana]
  misc_feature (13)..(329): Homolog of NCBI NO: 30682728 NR Description: expressed protein [Arabidopsis thaliana]
  misc_feature (1)..(335): Homolog of NCBI NO: 40253297 NR Description: putative Chain A, Crystal Structure Of
MDPPTSAAHHSPDDEAAAFFRAAPPLRDRDAVAASLAAFVARHRARSAAGAGAGGGGGPPAVAGVVCVTSGGTTVPLEQRCVRYIDNFSSGQRGAASTEYFLKAGYAVIFVHRRGSKQPYCRFLPEDSFLDLFELGEGSEIQVPESHTTVVKTAISSYRKAIDEGLLLKLPFTTIFEYLQLLQLVSTAMNCLERHGMFYCAAAVSDFYVPWESMAKHKIQSAGGPLNMQLSQVPKMLFILRNHWAPSAFCVSFKLETDPDILIQKAEAALRKYGMNVVVANELANYKDVVVMVTSSGKTTVSRRSKEDDLEEQLIGLLVKMHSDHTKQSNPDQEK

SEQ ID NO: 69221 - protein, 182 aa, Triticum aestivum
  peptide (1)..(182): Ceres Seq. ID no. 13656786
  misc_feature (6)..(164): Homolog of NCBI NO: 29247944 NR Description: GLP_26_54603_52153 [Giardia lamblia ATCC 50803]
VTLLPPPPTAPTPDQRGSRHGSTNQRCPPQPRRRGGRLLPRGAAPPRPRRRRRQPRRLRRPPPRTLRRRRRRRRRRRAPGGGGGGLRHLRRHHGAPGAALRALHRQLQLRPARGRVHRVFPKGRLRRHLRPPPREQAALLQVSSGGLFSRPFRARRRIRDPSPRVSHHGGQDSDQQLSQGNR

SEQ ID NO: 69222 - DNA, 2050 bp, Triticum aestivum
  misc_feature (1)..(2050): Ceres Seq. ID no. 14301486
aatttccaaggagaatgcaggagcatgttctttccttcggcgatctcagagttgcatttcccagcaggcatcctgacatagtttgaaactccatcacctctcggcaagcaacaacggatacgatccagcacgggagctggtgctgttcaccgcccccagctacctacctgctgccgacctttatctctgcagaagatcgatggaaacccaggaaggcgatgcgcataggtccgaatccgatgctcacaaagtgaaagggagaggtggattcgtagccctgccgttcatcatagcaaatgaaatgttggagaaagttgcggggttcgggctcaacaccaacatgatcatgtacctcaccaagcagtaccacctgagcaacgtcaccgccggagcgacgctcttcgtgtgggctgcggcggcaaatttcgcgcccattcccggcgcgctcatagccgacatgtacacaggccgattcatggccatctcgctaggctccatcgcgtgcctaacaggggtcgttttcctatggctgagcgccatgatacccggagcacggccaccgccgtgcggcgtcggccttgccggggagcagtgcgcgcccccggggccgaggcaccttgcgtggctgatcgccggcttcacgttcctgtccatcggcgccggcggcatccggccgtgctccatggccttcggcgcggaccagttctcccggcaccccaaggagaggaggtcgaggatcctgcaggcctacttcaacgcctactacgcgtccatcggggtggccttcacggtcgccgtcaccgtgatcgtctacgtgcaggacaacgtcgggtggaaggccgggttcgccgttccgatgggcctcatgatgctctccgcggtgagcttcctcctgggctcccgcctctacgtcaaggagaaggggtccaagcaaatgttcgccgggataggcgccgccctcgtggcggcgatcaggaactacagggtgcagctgccggcgaagacggaggacggcgtgtaccatcatctcaaggactgcaagctcactgtccccacagacaggttgaggttcctgaacaaggcctgcatcatcagcaacaacgggggcgtggacttacccggcactggcgcggcggcctcagagcgtgatggcaacgttggcggcaggaggctgtgcacggtggaccaggtggagcagctcaagtcggccgtccggatcctgccgatctggtcgtccaccgtgttcctggcgcaggccatgagccagaactacgccgtgctgcaggccaacgagatggaccggcgcatcggcgtgggccagttccgcgtgccgggctgctccctcaccatgttcaacatggtgaccatgtcgctgtggtcgggcagctacgacaggtggatcgcgccggcgctgcgacgggtgacgggcgacccgcgggggctcaccatgaagcagcgcgtcggcgtgggcctgctgctggccaccgcggcgatggccgtgtccggcgcggtggagggcgcgcggcgcaggctggagctggccggcggcggcggcgccggcatgtcggcgttctggctggtgccgcagttcgcgctcatggggctggcggaggcgttcggcgtgatcggggagctcgagttcttctacacggagctgcccaagagcatggccagcttcagcatggcgctgctctacatggccatgggggtgggcaacctggtcaacagcctgatcgtcaaggtggtggacgacgcgagcaggcgcggggggaggacgagctggctctccagcgatctcaacgcgggccactacgactactactactggctgctcgccggtttgggcgccgtcaacttcgtgtacttcctctggtgcgcctggaagtacggcgaggaggggaagaacgtggagtgggaggagggtgaaggtgagagggaacggccgatggcctagttttgtaatgctgagctcgggtgtcacaatgaggccatttttaacgtgagtctgaactcagagggcaaaaaccgcaggttgcggggttggttctcc

SEQ ID NO: 69223 - protein, 584 aa, Triticum aestivum
  peptide (1)..(584): Ceres Seq. ID no. 14301487
  misc_feature (92)..(502): Pfam Name: POT family Pfam Description: POT family
  misc_feature (105)..(583): Homolog of NCBI NO: 25404847 NR Description: probable peptide transporter T17F3.10
  misc_feature (12)..(581): Homolog of NCBI NO: 18408546 NR Description: peptide transporter -related [Arabidopsis
  misc_feature (12)..(581): Homolog of NCBI NO: 7488141 NR Description: probable peptide transport protein T17F15.170 -
  misc_feature (14)..(583): Homolog of NCBI NO: 18409391 NR Description: peptide transporter -related [Arabidopsis
  misc_feature (48)..(580): Homolog of NCBI NO: 9294465 NR Description: peptide/amino acid transporter-like protein
  misc_feature (12)..(574): Homolog of NCBI NO: 34909754 NR Description: putative peptide transporter
  misc_feature (21)..(564): Homolog of NCBI NO: 20466248 NR Description: putative transport protein [Arabidopsis thaliana]
  misc_feature (21)..(580): Homolog of NCBI NO: 15233307 NR Description: transport protein -related [Arabidopsis thaliana]
  misc_feature (5)..(580): Homolog of NCBI NO: 15218183 NR Description: peptide transporter -related [Arabidopsis
  misc_feature (17)..(578): Homolog of NCBI NO: 34909752 NR Description: putative peptide transporter
METQEGDAHRSESDAHKVKGRGGFVALPFIIANEMLEKVAGFGLNTNMIMYLTKQYHLSNVTAGATLFVWAAAANFAPIPGALIADMYTGRFMAISLGSIACLTGVVFLWLSAMIPGARPPPCGVGLAGEQCAPPGPRHLAWLIAGFTFLSIGAGGIRPCSMAFGADQFSRHPKERRSRILQAYFNAYYASIGVAFTVAVTVIVYVQDNVGWKAGFAVPMGLMMLSAVSFLLGSRLYVKEKGSKQMFAGIGAALVAAIRNYRVQLPAKTEDGVYHHLKDCKLTVPTDRLRFLNKACIISNNGGVDLPGTGAAASERDGNVGGRRLCTVDQVEQLKSAVRILPIWSSTVFLAQAMSQNYAVLQANEMDRRIGVGQFRVPGCSLTMFNMVTMSLWSGSYDRWIAPALRRVTGDPRGLTMKQRVGVGLLLATAAMAVSGAVEGARRRLELAGGGGAGMSAFWLVPQFALMGLAEAFGVIGELEFFYTELPKSMASFSMALLYMAMGVGNLVNSLIVKVVDDASRRGGRTSWLSSDLNAGHYDYYYWLLAGLGAVNFVYFLWCAWKYGEEGKNVEWEEGEGERERPMA

SEQ ID NO: 69224 - protein, 550 aa, Triticum aestivum
  peptide (1)..(550): Ceres Seq. ID no. 14301488
  misc_feature (58)..(468): Pfam Name: POT family Pfam Description: POT family
  misc_feature (71)..(549): Homolog of NCBI NO: 25404847 NR Description: probable peptide transporter T17F3.10
  misc_feature (1)..(547): Homolog of NCBI NO: 18408546 NR Description: peptide transporter -related [Arabidopsis
  misc_feature (1)..(547): Homolog of NCBI NO: 7488141 NR Description: probable peptide transport protein T17F15.170 -
  misc_feature (1)..(549): Homolog of NCBI NO: 18409391 NR Description: peptide transporter -related [Arabidopsis
  misc_feature (14)..(546): Homolog of NCBI NO: 9294465 NR Description: peptide/amino acid transporter-like protein
  misc_feature (1)..(540): Homolog of NCBI NO: 34909754 NR Description: putative peptide transporter
  misc_feature (1)..(530): Homolog of NCBI NO: 20466248 NR Description: putative transport protein [Arabidopsis thaliana]
  misc_feature (1)..(546): Homolog of NCBI NO: 15233307 NR Description: transport protein -related [Arabidopsis thaliana]
  misc_feature (1)..(546): Homolog of NCBI NO: 15218183 NR Description: peptide transporter -related [Arabidopsis
  misc_feature (1)..(544): Homolog of NCBI NO: 34909752 NR Description: putative peptide transporter
MLEKVAGFGLNTNMIMYLTKQYHLSNVTAGATLFVWAAAANFAPIPGALIADMYTGRFMAISLGSIACLTGVVFLWLSAMIPGARPPPCGVGLAGEQCAPPGPRHLAWLIAGFTFLSIGAGGIRPCSMAFGADQFSRHPKERRSRILQAYFNAYYASIGVAFTVAVTVIVYVQDNVGWKAGFAVPMGLMMLSAVSFLLGSRLYVKEKGSKQMFAGIGAALVAAIRNYRVQLPAKTEDGVYHHLKDCKLTVPTDRLRFLNKACIISNNGGVDLPGTGAAASERDGNVGGRRLCTVDQVEQLKSAVRILPIWSSTVFLAQAMSQNYAVLQANEMDRRIGVGQFRVPGCSLTMFNMVTMSLWSGSYDRWIAPALRRVTGDPRGLTMKQRVGVGLLLATAAMAVSGAVEGARRRLELAGGGGAGMSAFWLVPQFALMGLAEAFGVIGELEFFYTELPKSMASFSMALLYMAMGVGNLVNSLIVKVVDDASRRGGRTSWLSSDLNAGHYDYYYWLLAGLGAVNFVYFLWCAWKYGEEGKNVEWEEGEGERERPMA

SEQ ID NO: 69225 - protein, 537 aa, Triticum aestivum
  peptide (1)..(537): Ceres Seq. ID no. 14301489
  misc_feature (45)..(455): Pfam Name: POT family Pfam Description: POT family
  misc_feature (58)..(536): Homolog of NCBI NO: 25404847 NR Description: probable peptide transporter T17F3.10
  misc_feature (1)..(534): Homolog of NCBI NO: 18408546 NR Description: peptide transporter -related [Arabidopsis
  misc_feature (1)..(534): Homolog of NCBI NO: 7488141 NR Description: probable peptide transport protein T17F15.170 -
  misc_feature (1)..(536): Homolog of NCBI NO: 18409391 NR Description: peptide transporter -related [Arabidopsis
  misc_feature (1)..(533): Homolog of NCBI NO: 9294465 NR Description: peptide/amino acid transporter-like protein
  misc_feature (1)..(527): Homolog of NCBI NO: 34909754 NR Description: putative peptide transporter
  misc_feature (1)..(517): Homolog of NCBI NO: 20466248 NR Description: putative transport protein [Arabidopsis thaliana]
  misc_feature (1)..(533): Homolog of NCBI NO: 15233307 NR Description: transport protein -related [Arabidopsis thaliana]
  misc_feature (1)..(533): Homolog of NCBI NO: 15218183 NR Description: peptide transporter -related [Arabidopsis
  misc_feature (1)..(531): Homolog of NCBI NO: 34909752 NR Description: putative peptide transporter
MIMYLTKQYHLSNVTAGATLFVWAAAANFAPIPGALIADMYTGRFMAISLGSIACLTGVVFLWLSAMIPGARPPPCGVGLAGEQCAPPGPRHLAWLIAGFTFLSIGAGGIRPCSMAFGADQFSRHPKERRSRILQAYFNAYYASIGVAFTVAVTVIVYVQDNVGWKAGFAVPMGLMMLSAVSFLLGSRLYVKEKGSKQMFAGIGAALVAAIRNYRVQLPAKTEDGVYHHLKDCKLTVPTDRLRFLNKACIISNNGGVDLPGTGAAASERDGNVGGRRLCTVDQVEQLKSAVRILPIWSSTVFLAQAMSQNYAVLQANEMDRRIGVGQFRVPGCSLTMFNMVTMSLWSGSYDRWIAPALRRVTGDPRGLTMKQRVGVGLLLATAAMAVSGAVEGARRRLELAGGGGAGMSAFWLVPQFALMGLAEAFGVIGELEFFYTELPKSMASFSMALLYMAMGVGNLVNSLIVKVVDDASRRGGRTSWLSSDLNAGHYDYYYWLLAGLGAVNFVYFLWCAWKYGEEGKNVEWEEGEGERERPMA

SEQ ID NO: 69226 - DNA, 1599 bp, Triticum aestivum
  misc_feature (1)..(1599): Ceres Seq. ID no. 13656519
acgatcacacgacaccgcttccgtcctcttcgatctccagaagccccgcgagtaaaggattcaatcccctccccaccctccacctcgccgccgccgccgccgccccctccgtctccgctcgagcttgtcagtccgcctcgtcctcctccttcggttctgcccgcccgtcgaccagattgattctctcttcttcttcgtcgtcgtcttcttggtctgccgctgccgcttggaatcccaaggccttggttgatcaatcctgtgaccctggaagaagatcgaagggcgtcgcgtggtgacatggtgatggtgagcgtgcagcagagccccatggtgcggtcggaggaggacctgggcccgccgtggctgcggccgctgctgggcacgagcttcttcgtgccatgcccggcgcacccggacctgagcaagaacgagtgcaacttcttctgcctcggctgcaaccacgccgccggcgcgctctgctcctactgcgtccccgcgcaccgcgaccaccacgtcgtccagatacggcgttcgtcgtaccacaacgtgatccgggtgtcggaggtggggaagctgatcgacatcgcgcacgtgcagacgtacgtgatcaacagcgccaagatcgtgttcctcaacggccggccgcaggccaggcccggcaagggcgtcaccaacacctgtgagatttgctgccgcagcctcccggactcgttccgcttctgctccctcggatgcaagctcggggggatgcagtgggacccgaccctgacatttgccatccggcccaagcgtagccaggactccggcggagaagggtacggctccgaggacgactcgttcagcccgaggaagcagctccggagggccgggttcgagctgggacggttcgaccggagcgtccggtggtctgacgacgagggcagcaagtccaacacccggccgatgacaccaaccacgccgccgatcagccggtgccggccgtccaggaggaagggcatcccccaccgtgccccgttctacggttagactaccggtggaaaccactctcaaaagtgacaatgctactactagtattgcaatgcaatgtgtgtcggttgggacttgggcctgagtagtgaagtgatccagttagtagatcactagctaggtattagctatagcatgcatggtatatatacttgtatatatatacatatacatacacacaataatgtaggtggagtgtgtgtaaatatgatatgttggcaaaggttgccaattcgcataagggcatgcatgggggcatggcgcggtgccctagtatttcatgcagaaaataaggtgaagaacgacgaagaaaggggtggtaagaaacacagctaatagaaacatagctagggtttttagcttgggtagggtcgagattgatatgtgaaaagtgataaatcatcatgtatatgtctcggtttgtagtggttaatttggctgtctaccccacccaatgtgtttattagcgttgcggtgtgtagttaattcaaggttcggcaacttacaggaacataataatttgtatatacagttatattggtattggcagaagaaagataaggactttgcctc

SEQ ID NO: 69227 - protein, 242 aa, Triticum aestivum
  peptide (1)..(242): Ceres Seq. ID no. 15220588
  misc_feature (20)..(234): Pfam Name: Protein of unknown function, DUF597 Pfam Description: Protein of unknown function, DUF597
  misc_feature (217)..(242): Homolog of NCBI NO: 18398555 NR Description: expressed protein [Arabidopsis thaliana]
  misc_feature (217)..(242): Homolog of NCBI NO: 6714272 NR Description: F6N18.8 [Arabidopsis thaliana]
  misc_feature (20)..(151): Homolog of NCBI NO: 18398555 NR Description: expressed protein [Arabidopsis thaliana]
  misc_feature (20)..(151): Homolog of NCBI NO: 6714272 NR Description: F6N18.8 [Arabidopsis thaliana]
  misc_feature (11)..(240): Homolog of NCBI NO: 25337904 NR Description: unknown protein F14G6.19 [imported] - Arabidopsis
  misc_feature (11)..(240): Homolog of NCBI NO: 18411153 NR Description: expressed protein [Arabidopsis thaliana]
  misc_feature (11)..(240): Homolog of NCBI NO: 21536890 NR Description: unknown [Arabidopsis thaliana]
  misc_feature (11)..(240): Homolog of NCBI NO: 25337907 NR Description: hypothetical protein F9H16.1 - Arabidopsis
  misc_feature (10)..(240): Homolog of NCBI NO: 21537073 NR Description: unknown [Arabidopsis thaliana]
  misc_feature (10)..(240): Homolog of NCBI NO: 18394936 NR Description: expressed protein [Arabidopsis thaliana]
MVMVSVQQSPMVRSEEDLGPPWLRPLLGTSFFVPCPAHPDLSKNECNFFCLGCNHAAGALCSYCVPAHRDHHVVQIRRSSYHNVIRVSEVGKLIDIAHVQTYVINSAKIVFLNGRPQARPGKGVTNTCEICCRSLPDSFRFCSLGCKLGGMQWDPTLTFAIRPKRSQDSGGEGYGSEDDSFSPRKQLRRAGFELGRFDRSVRWSDDEGSKSNTRPMTPTTPPISRCRPSRRKGIPHRAPFYG

SEQ ID NO: 69228 - protein, 240 aa, Triticum aestivum
  peptide (1)..(240): Ceres Seq. ID no. 15220589
  misc_feature (18)..(232): Pfam Name: Protein of unknown function, DUF597 Pfam Description: Protein of unknown function, DUF597
  misc_feature (215)..(240): Homolog of NCBI NO: 18398555 NR Description: expressed protein [Arabidopsis thaliana]
  misc_feature (215)..(240): Homolog of NCBI NO: 6714272 NR Description: F6N18.8 [Arabidopsis thaliana]
  misc_feature (18)..(149): Homolog of NCBI NO: 18398555 NR Description: expressed protein [Arabidopsis thaliana]
  misc_feature (18)..(149): Homolog of NCBI NO: 6714272 NR Description: F6N18.8 [Arabidopsis thaliana]
  misc_feature (9)..(238): Homolog of NCBI NO: 25337904 NR Description: unknown protein F14G6.19 [imported] - Arabidopsis
  misc_feature (9)..(238): Homolog of NCBI NO: 18411153 NR Description: expressed protein [Arabidopsis thaliana]
  misc_feature (9)..(238): Homolog of NCBI NO: 21536890 NR Description: unknown [Arabidopsis thaliana]
  misc_feature (9)..(238): Homolog of NCBI NO: 25337907 NR Description: hypothetical protein F9H16.1 - Arabidopsis
  misc_feature (8)..(238): Homolog of NCBI NO: 21537073 NR Description: unknown [Arabidopsis thaliana]
  misc_feature (8)..(238): Homolog of NCBI NO: 18394936 NR Description: expressed protein [Arabidopsis thaliana]
MVSVQQSPMVRSEEDLGPPWLRPLLGTSFFVPCPAHPDLSKNECNFFCLGCNHAAGALCSYCVPAHRDHHVVQIRRSSYHNVIRVSEVGKLIDIAHVQTYVINSAKIVFLNGRPQARPGKGVTNTCEICCRSLPDSFRFCSLGCKLGGMQWDPTLTFAIRPKRSQDSGGEGYGSEDDSFSPRKQLRRAGFELGRFDRSVRWSDDEGSKSNTRPMTPTTPPISRCRPSRRKGIPHRAPFYG

SEQ ID NO: 69229 - protein, 232 aa, Triticum aestivum
  peptide (1)..(232): Ceres Seq. ID no. 15220590
  misc_feature (10)..(224): Pfam Name: Protein of unknown function, DUF597 Pfam Description: Protein of unknown function, DUF597
  misc_feature (207)..(232): Homolog of NCBI NO: 18398555 NR Description: expressed protein [Arabidopsis thaliana]
  misc_feature (207)..(232): Homolog of NCBI NO: 6714272 NR Description: F6N18.8 [Arabidopsis thaliana]
  misc_feature (10)..(141): Homolog of NCBI NO: 18398555 NR Description: expressed protein [Arabidopsis thaliana]
  misc_feature (10)..(141): Homolog of NCBI NO: 6714272 NR Description: F6N18.8 [Arabidopsis thaliana]
  misc_feature (1)..(230): Homolog of NCBI NO: 25337904 NR Description: unknown protein F14G6.19 [imported] - Arabidopsis
  misc_feature (1)..(230): Homolog of NCBI NO: 18411153 NR Description: expressed protein [Arabidopsis thaliana]
  misc_feature (1)..(230): Homolog of NCBI NO: 21536890 NR Description: unknown [Arabidopsis thaliana]
  misc_feature (1)..(230): Homolog of NCBI NO: 25337907 NR Description: hypothetical protein F9H16.1 - Arabidopsis
  misc_feature (1)..(230): Homolog of NCBI NO: 21537073 NR Description: unknown [Arabidopsis thaliana]
  misc_feature (1)..(230): Homolog of NCBI NO: 18394936 NR Description: expressed protein [Arabidopsis thaliana]
MVRSEEDLGPPWLRPLLGTSFFVPCPAHPDLSKNECNFFCLGCNHAAGALCSYCVPAHRDHHVVQIRRSSYHNVIRVSEVGKLIDIAHVQTYVINSAKIVFLNGRPQARPGKGVTNTCEICCRSLPDSFRFCSLGCKLGGMQWDPTLTFAIRPKRSQDSGGEGYGSEDDSFSPRKQLRRAGFELGRFDRSVRWSDDEGSKSNTRPMTPTTPPISRCRPSRRKGIPHRAPFYG

SEQ ID NO: 69230 - DNA, 963 bp, Triticum aestivum
  misc_feature (1)..(963): Ceres Seq. ID no. 14303660
accaaatatctctctgattgcattgcctccctgcctggctacatttgacttgcttccatccattcgatccactcaactcaaggaagatctactgcactcccgcccatactagccgaggttcgttgggtaggataagatcatcgatggaggatgtgtggaaggacatgtcgctgtgctccaccccgctcgcgctacagtcctaccacctccactccccggccgccgctccctaccgcggcgccgctgtctacccccaggactacctggccggcgcggttccgcaaccgccccgcacgccgccgccggctcacacggcgctcaccctggagttcacctgccccggggggaccagcgctgccaacacggccaccagctccggcgacgacccagccggctgccactttggcttctccgcgtccggaggcggcagcaggagggccgtggtccagccggcggtgggcggcgaccggcggcagcgccggatggtcaagaaccgggagtcggcggcgcggtcgcgggcgcggaagcaggcccacaccaacgagatggagctggagctggagcagctgcgccgggagaacaggatgcttatccagcgcgagcaggacttcatcaacgatcgcttggcgaaggcggcgcaggtagccgtcccggactgcagcagcagcagcagcagctggaggaggaacactagtagcagtaccctccagcagccgcagaggtgccgctccgcccctgcaccatgatcgtcgcggcggccatcgactctagcagcggcagcttcattccacttactagtacaacggattgattgtccaagctagctagatgacttgattagcattgtactacgcgttaaccaagtactatgtatgtaatctagcagtagcctacttccttgcaaaattaagcaagcatgtagctcgacgatggatggaagttaagctaagctagtactcaacc

SEQ ID NO: 69231 - protein, 200 aa, Triticum aestivum
  peptide (1)..(200): Ceres Seq. ID no. 14303661
  misc_feature (108)..(157): Pfam Name: bZIP transcription factor Pfam Description: bZIP transcription factor
  misc_feature (91)..(166): Homolog of NCBI NO: 29027735 NR Description: bZIP transcription factor [Arabidopsis thaliana]
  misc_feature (91)..(166): Homolog of NCBI NO: 29027737 NR Description: bZIP transcription factor [Arabidopsis thaliana]
  misc_feature (91)..(166): Homolog of NCBI NO: 28317381 NR Description: TPA: putative basic leucine zipper transcription
  misc_feature (108)..(157): Homolog of NCBI NO: 19347609 NR Description: Raba1 [Oryza sativa]
  misc_feature (32)..(157): Homolog of NCBI NO: 21693585 NR Description: ABA response element binding factor [Triticum
  misc_feature (26)..(194): Homolog of NCBI NO: 34908468 NR Description: putative abscisic acid insensitive 5
  misc_feature (1)..(185): Homolog of NCBI NO: 29367541 NR Description: OSE2-like protein [Oryza sativa (japonica
  misc_feature (87)..(163): Homolog of NCBI NO: 32526659 NR Description: hypothetical protein [Oryza sativa (japonica
  misc_feature (41)..(178): Homolog of NCBI NO: 28317383 NR Description: TPA: putative basic leucine zipper transcription
  misc_feature (1)..(159): Homolog of NCBI NO: 33146493 NR Description: putative bZIP protein DPBF3
MEDVWKDMSLCSTPLALQSYHLHSPAAAPYRGAAVYPQDYLAGAVPQPPRTPPPAHTALTLEFTCPGGTSAANTATSSGDDPAGCHFGFSASGGGSRRAVVQPAVGGDRRQRRMVKNRESAARSRARKQAHTNEMELELEQLRRENRMLIQREQDFINDRLAKAAQVAVPDCSSSSSSWRRNTSSSTLQQPQRCRSAPAP

SEQ ID NO: 69232 - protein, 193 aa, Triticum aestivum
  peptide (1)..(193): Ceres Seq. ID no. 14303662
  misc_feature (101)..(150): Pfam Name: bZIP transcription factor Pfam Description: bZIP transcription factor
  misc_feature (84)..(159): Homolog of NCBI NO: 29027737 NR Description: bZIP transcription factor [Arabidopsis thaliana]
  misc_feature (84)..(159): Homolog of NCBI NO: 29027735 NR Description: bZIP transcription factor [Arabidopsis thaliana]
  misc_feature (84)..(159): Homolog of NCBI NO: 28317381 NR Description: TPA: putative basic leucine zipper transcription
  misc_feature (101)..(150): Homolog of NCBI NO: 19347609 NR Description: Raba1 [Oryza sativa]
  misc_feature (25)..(150): Homolog of NCBI NO: 21693585 NR Description: ABA response element binding factor [Triticum
  misc_feature (19)..(187): Homolog of NCBI NO: 34908468 NR Description: putative abscisic acid insensitive 5
  misc_feature (1)..(178): Homolog of NCBI NO: 29367541 NR Description: OSE2-like protein [Oryza sativa (japonica
  misc_feature (80)..(156): Homolog of NCBI NO: 32526659 NR Description: hypothetical protein [Oryza sativa (japonica
  misc_feature (34)..(171): Homolog of NCBI NO: 28317383 NR Description: TPA: putative basic leucine zipper transcription
  misc_feature (1)..(152): Homolog of NCBI NO: 33146493 NR Description: putative bZIP protein DPBF3
MSLCSTPLALQSYHLHSPAAAPYRGAAVYPQDYLAGAVPQPPRTPPPAHTALTLEFTCPGGTSAANTATSSGDDPAGCHFGFSASGGGSRRAVVQPAVGGDRRQRRMVKNRESAARSRARKQAHTNEMELELEQLRRENRMLIQREQDFINDRLAKAAQVAVPDCSSSSSSWRRNTSSSTLQQPQRCRSAPAP

SEQ ID NO: 69233 - protein, 164 aa, Triticum aestivum
  peptide (1)..(164): Ceres Seq. ID no. 14303663
MCGRTCRCAPPRSRYSPTTSTPRPPLPTAAPLSTPRTTWPARFRNRPARRRRLTRRSPWSSPAPGGPALPTRPPAPATTQPAATLASPRPEAAAGGPWSSRRWAATGGSAGWSRTGSRRRGRGRGSRPTPTRWSWSWSSCAGRTGCLSSASRTSSTIAWRRRRR

SEQ ID NO: 69234 - DNA, 1885 bp, Triticum aestivum
  misc_feature (1)..(1885): Ceres Seq. ID no. 14308011
agggacagaccagaacaacccaaccgcacccgttccagagcgcgatcacacaacagagcggtaacagtttcccgggcagttcccgccccggccggcgccatggacttcgtcttcgtggagaagctcctcgcgggcctcctcgcggccgtggtgggcgccatcgtggtgtccaagatccggggccgcaagctgaggctgccgccgggccccttcccggtccccatcttcggcaactggctgcaggtcggcgacgacctgaaccaccgcaacctggcggcgatggcccgcaagttcggcgaggtcttcctcctccgcatgggccagcgcaacctggtggtggtctcctctccgccgctcgcccgcgaggtgctccacacgcagggcgtggagttcgggtcccgcacccgcaacgtggtgttcgacatcttcacgggcgagggccaagacatggtgttcaccgtgtacggtgaccactggcgcaagatgcggcgcatcatgacggtgcccttcttcaccaacaaggtggtgcagcagtaccggcccgggtgggaggccgaggcggccttcgtcatcgacaacgtccgcgccgaccccagggccgccacagagggcgtcgtgctccgccgccacctgcagctcatgatgtacaacaacatgtaccgcatcatgttcgaccggcggttcgagagcatggacgacccgctgttcctccggctccgggcgctcaacggcgagcgcagccgcctcgcgcaaagcttcgagtacaactacggcgacttcatccccatcctccgccccttcctccgcggctacctcaggctctgcaaggaggtcaaggagacccgcctcaagctcttcaaggattacttcctggacgagaggaagaagctggtgagcaccaaggccatggacaacaacggtgggctcaagtgcgccattgatcacatcctggaggctgagcagaagggggagatcaacgaggacaacgtcctctacatcatcgagaacatcaacgtcgcagcgatcgagacgacgctgtggtcgatcgagtgggggctggcagagctggtgaaccacccggagatccagcagaagcttcgcgacgaaatggacgcggtgctgggcgcggggcaccagatcacggagccggagacgcacaagctcccctacctgcaggcggtgatcaaggagacgctccggctgcgcatggccatcccgctgctggtgccccacatgaacctccacgacgccaagctcgccggctacaacatccccgccgagagcaagatcctcgtcaacgcctggttcctcgccaacaacccggagcagtggaagcggcccgacgagttccggccggagcgcttcctggaggaggagaagcacgtggaggccaacggcaacgacttcaggtacctgcccttcggcgtcggccgccggagctgccccggcatcatcctcgcgctgcccatcctcggcatcaccatcggccgcctcgtccagaacttcgtgctcacgccgccgcccggccaggacaagctcgacaccacggagaagggcggccagttcagcctccacatcctcaagcactccaccatcgtcgccaagcccagagtgttctagagcagcgacgtacgtgctctggagtttggacttccagcattttggtttggtggtgttgtactttcacgattgttcgctcgtcctaagtatacttgattatagtatccgtcacagagtagacacacgtttcgttaatgttatccgcaagaaaacagaggagctgaagaaatgtcgaacggggaggaaaagactggacgatttccgtcagatgtactcctgatgctgccataaattaaatcctcaaaatattgatgattttttcacg

SEQ ID NO: 69235 - protein, 539 aa, Triticum aestivum
  peptide (1)..(539): Ceres Seq. ID no. 14308012
  misc_feature (67)..(533): Pfam Name: Cytochrome P450 Pfam Description: Cytochrome P450
  misc_feature (34)..(539): Homolog of NCBI NO: 9965897 NR Description: cinnamate-4-hydroxylase [Gossypium arboreum]
  misc_feature (34)..(539): Homolog of NCBI NO: 1351206 NR Description: Trans-cinnamate 4-monooxygenase (Cinnamic acid
  misc_feature (34)..(539): Homolog of NCBI NO: 586082 NR Description: Trans-cinnamate 4-monooxygenase (Cinnamic acid
RDRPEQPNRTRSRARSHNRAVTVSRAVPAPAGAMDFVFVEKLLAGLLAAVVGAIVVSKIRGRKLRLPPGPFPVPIFGNWLQVGDDLNHRNLAAMARKFGEVFLLRMGQRNLVVVSSPPLAREVLHTQGVEFGSRTRNVVFDIFTGEGQDMVFTVYGDHWRKMRRIMTVPFFTNKVVQQYRPGWEAEAAFVIDNVRADPRAATEGVVLRRHLQLMMYNNMYRIMFDRRFESMDDPLFLRLRALNGERSRLAQSFEYNYGDFIPILRPFLRGYLRLCKEVKETRLKLFKDYFLDERKKLVSTKAMDNNGGLKCAIDHILEAEQKGEINEDNVLYIIENINVAAIETTLWSIEWGLAELVNHPEIQQKLRDEMDAVLGAGHQITEPETHKLPYLQAVIKETLRLRMAIPLLVPHMNLHDAKLAGYNIPAESKILVNAWFLANNPEQWKRPDEFRPERFLEEEKHVEANGNDFRYLPFGVGRRSCPGIILALPILGITIGRLVQNFVLTPPPGQDKLDTTEKGGQFSLHILKHSTIVAKPRVF

SEQ ID NO: 69236 - protein, 506 aa, Triticum aestivum
  peptide (1)..(506): Ceres Seq. ID no. 14308013
  misc_feature (34)..(500): Pfam Name: Cytochrome P450 Pfam Description: Cytochrome P450
  misc_feature (1)..(506): Homolog of NCBI NO: 9965897 NR Description: cinnamate-4-hydroxylase [Gossypium arboreum]
  misc_feature (1)..(506): Homolog of NCBI NO: 1351206 NR Description: Trans-cinnamate 4-monooxygenase (Cinnamic acid
  misc_feature (1)..(506): Homolog of NCBI NO: 586082 NR Description: Trans-cinnamate 4-monooxygenase (Cinnamic acid
MDFVFVEKLLAGLLAAVVGAIVVSKIRGRKLRLPPGPFPVPIFGNWLQVGDDLNHRNLAAMARKFGEVFLLRMGQRNLVVVSSPPLAREVLHTQGVEFGSRTRNVVFDIFTGEGQDMVFTVYGDHWRKMRRIMTVPFFTNKVVQQYRPGWEAEAAFVIDNVRADPRAATEGVVLRRHLQLMMYNNMYRIMFDRRFESMDDPLFLRLRALNGERSRLAQSFEYNYGDFIPILRPFLRGYLRLCKEVKETRLKLFKDYFLDERKKLVSTKAMDNNGGLKCAIDHILEAEQKGEINEDNVLYIIENINVAAIETTLWSIEWGLAELVNHPEIQQKLRDEMDAVLGAGHQITEPETHKLPYLQAVIKETLRLRMAIPLLVPHMNLHDAKLAGYNIPAESKILVNAWFLANNPEQWKRPDEFRPERFLEEEKHVEANGNDFRYLPFGVGRRSCPGIILALPILGITIGRLVQNFVLTPPPGQDKLDTTEKGGQFSLHILKHSTIVAKPRVF

SEQ ID NO: 69237 - protein, 446 aa, Triticum aestivum
  peptide (1)..(446): Ceres Seq. ID no. 14308014
  misc_feature (1)..(440): Pfam Name: Cytochrome P450 Pfam Description: Cytochrome P450
  misc_feature (1)..(446): Homolog of NCBI NO: 9965897 NR Description: cinnamate-4-hydroxylase [Gossypium arboreum]
  misc_feature (1)..(446): Homolog of NCBI NO: 1351206 NR Description: Trans-cinnamate 4-monooxygenase (Cinnamic acid
  misc_feature (1)..(446): Homolog of NCBI NO: 586082 NR Description: Trans-cinnamate 4-monooxygenase (Cinnamic acid
MARKFGEVFLLRMGQRNLVVVSSPPLAREVLHTQGVEFGSRTRNVVFDIFTGEGQDMVFTVYGDHWRKMRRIMTVPFFTNKVVQQYRPGWEAEAAFVIDNVRADPRAATEGVVLRRHLQLMMYNNMYRIMFDRRFESMDDPLFLRLRALNGERSRLAQSFEYNYGDFIPILRPFLRGYLRLCKEVKETRLKLFKDYFLDERKKLVSTKAMDNNGGLKCAIDHILEAEQKGEINEDNVLYIIENINVAAIETTLWSIEWGLAELVNHPEIQQKLRDEMDAVLGAGHQITEPETHKLPYLQAVIKETLRLRMAIPLLVPHMNLHDAKLAGYNIPAESKILVNAWFLANNPEQWKRPDEFRPERFLEEEKHVEANGNDFRYLPFGVGRRSCPGIILALPILGITIGRLVQNFVLTPPPGQDKLDTTEKGGQFSLHILKHSTIVAKPRVF

SEQ ID NO: 69238 - DNA, 498 bp, Triticum aestivum
  misc_feature (1)..(498): Ceres Seq. ID no. 13656369
tccccccacactccccggccgccgccgccggcctcgtcagtcgcagatcccccaaccaccagcgaagccgccgctcaccgccgactggcccacatggccgcctctatcgccgccgccgcgtccgtctcccacctcctcctcgggccgaaacccaagcccacaaccccgccccgcctctccctcctcccccgcaggcgctccggagccgccggggccatctccgcctccgcgtccgcggcctccgacttcctcgccccggtcccgtccctcaagtcccgcctcgccgccggcgacaccctctacggcctcttcctcctctccttctcccccacgctcgccgagatcgccgcgctcgccggctacgactacgtggtcgtcgacatggagcacgggccgggcggcatcacggaggccctcgcctgcctccgcgccctcgacgccgcccgcacccccgccgtcctccgcctcccggtgttaaacacaataaagtgggaacgg

SEQ ID NO: 69239 - protein, 166 aa, Triticum aestivum
  peptide (1)..(166): Ceres Seq. ID no. 13656370
  misc_feature (89)..(165): Pfam Name: HpcH/HpaI aldolase family Pfam Description: HpcH/HpaI aldolase family
  misc_feature (84)..(160): Homolog of NCBI NO: 2262108 NR Description: 2,4-dihydroxyhept-2-ene-1,7-dioic acid aldolase
  misc_feature (52)..(165): Homolog of NCBI NO: 21593014 NR Description: putative aldolase [Arabidopsis thaliana]
  misc_feature (52)..(165): Homolog of NCBI NO: 15236908 NR Description: aldolase -related [Arabidopsis thaliana]
SPHTPRPPPPASSVADPPTTSEAAAHRRLAHMAASIAAAASVSHLLLGPKPKPTTPPRLSLLPRRRSGAAGAISASASAASDFLAPVPSLKSRLAAGDTLYGLFLLSFSPTLAEIAALAGYDYVVVDMEHGPGGITEALACLRALDAARTPAVLRLPVLNTIKWER

SEQ ID NO: 69240 - protein, 165 aa, Triticum aestivum
  peptide (1)..(165): Ceres Seq. ID no. 13656371
PPHSPAAAAGLVSRRSPNHQRSRRSPPTGPHGRLYRRRRVRLPPPPRAETQAHNPAPPLPPPPQALRSRRGHLRLRVRGLRLPRPGPVPQVPPRRRRHPLRPLPPLLLPHARRDRRARRLRLRGRRHGARAGRHHGGPRLPPRPRRRPHPRRPPPPGVKHNKVGT

SEQ ID NO: 69241 - protein, 158 aa, Triticum aestivum
  peptide (1)..(158): Ceres Seq. ID no. 13656372
  misc_feature (1)..(157): Pfam Name: Formin Homology 2 Domain Pfam Description: Formin Homology 2 Domain
  misc_feature (1)..(152): Homolog of NCBI NO: 6523547 NR Description: hydroxyproline-rich glycoprotein DZ-HRGP
  misc_feature (1)..(152): Homolog of NCBI NO: 6523547 NR Description: hydroxyproline-rich glycoprotein DZ-HRGP
  misc_feature (19)..(153): Homolog of NCBI NO: 6523547 NR Description: hydroxyproline-rich glycoprotein DZ-HRGP
  misc_feature (1)..(154): Homolog of NCBI NO: 81286 NR Description: extensin - Volvox carteri (fragment)
  misc_feature (2)..(156): Homolog of NCBI NO: 9630030 NR Description: unknown [Orgyia pseudotsugata multicapsid
  misc_feature (23)..(152): Homolog of NCBI NO: 30387315 NR Description: unknown [Choristoneura fumiferana MNPV]
  misc_feature (1)..(152): Homolog of NCBI NO: 6523547 NR Description: hydroxyproline-rich glycoprotein DZ-HRGP
  misc_feature (1)..(153): Homolog of NCBI NO: 6523547 NR Description: hydroxyproline-rich glycoprotein DZ-HRGP
  misc_feature (1)..(152): Homolog of NCBI NO: 6523547 NR Description: hydroxyproline-rich glycoprotein DZ-HRGP
  misc_feature (1)..(157): Homolog of NCBI NO: 6523547 NR Description: hydroxyproline-rich glycoprotein DZ-HRGP
PPTLPGRRRRPRQSQIPQPPAKPPLTADWPTWPPLSPPPRPSPTSSSGRNPSPQPRPASPSSPAGAPEPPGPSPPPRPRPPTSSPRSRPSSPASPPATPSTASSSSPSPPRSPRSPRSPATTTWSSTWSTGRAASRRPSPASAPSTPPAPPPSSASRC

SEQ ID NO: 69242 - protein, 135 aa, Triticum aestivum
  peptide (1)..(135): Ceres Seq. ID no. 13656373
  misc_feature (58)..(134): Pfam Name: HpcH/HpaI aldolase family Pfam Description: HpcH/HpaI aldolase family
  misc_feature (53)..(129): Homolog of NCBI NO: 2262108 NR Description: 2,4-dihydroxyhept-2-ene-1,7-dioic acid aldolase
  misc_feature (21)..(134): Homolog of NCBI NO: 21593014 NR Description: putative aldolase [Arabidopsis thaliana]
  misc_feature (21)..(134): Homolog of NCBI NO: 15236908 NR Description: aldolase -related [Arabidopsis thaliana]
MAASIAAAASVSHLLLGPKPKPTTPPRLSLLPRRRSGAAGAISASASAASDFLAPVPSLKSRLAAGDTLYGLFLLSFSPTLAEIAALAGYDYVVVDMEHGPGGITEALACLRALDAARTPAVLRLPVLNTIKWER

SEQ ID NO: 69243 - DNA, 1266 bp, Triticum aestivum
  misc_feature (1)..(1266): Ceres Seq. ID no. 14301898
cactccacatcccactccaaagctttgcttggctctcccgtacctgacctctccttccatcgaggcaatcccagtgctcctcctcccctctatcgtccatggactgctctagttccaaagagacgccaccgcacaaggcgtggtggaccggcgagacggtggcggtggtgacgggggccaaccgtggcattgggcacgcgctggccgcgcgcctggcggagcaggggctgtccgtggtgctcacggcgcgggacgaggcccgcggggaggccgccgccgccgagctccgcgccaggggtctcccgtccgtgcggttccgccgcctcgacgtcaccgactccgcctctgtcgccgccttcgcctcctggatccgcgacgatgtcggcggcctcgacattctggtgaacaatgccggggtatcgttcaacgagatcgacaccaactcggtggagcatgctgagacggtcctcaagaccaacttttacggagccaagatgctcatcgaggcgctcctgccccttttccgtcgatcctctgggaccagccggatcctgaacctcagctcccagcttggccttctcaataaggtgagggacccgtcgttgaggagcatgctgctggacgagggcaggctgacggagcagcaggtcgaggccatggcgtcgcggttcctggcgcaggtgaaggacgggacgtggcaggaccacgggtggccggccgtgtggacggactacgcggtctccaagctggccctcaacgcctactcccgcctcctcgccgcgcggctgcggggggccgtagctgtcaactgcttctgccccgggttcacgcggacagacatgacgcgggggtggggcaagcgcaccgccgaggaggccggccgcgtcgccgcggggctcgcgctgctgccccccgccgacctccccacaggcaagttcttcaagtggtccacgccgcagctctactccaagctctgacgacgacaccgcgcgctgcatggcggagctgtgcgtagctgcacgcttacgatttggcaagaaaaagatggccgtttgtcccaaaatgcaactccatctcctcaccaagcttgatgcctccgaactatcacgcccgtacagttctcgaagattcgtgctcgtcttttgacaggatagcctatcaccctccactttgtagaacagagcatgtagaaacaaaaaagctctcctcccttcctgctgtaacagagcatgtaccacaaataattcttaattgtgtttacaaagt

SEQ ID NO: 69244 - protein, 292 aa, Triticum aestivum
  peptide (1)..(292): Ceres Seq. ID no. 14301899
  misc_feature (21)..(280): Homolog of NCBI NO: 485271 NR Description: NADPH:secondary-alcohol oxidoreductase
  misc_feature (21)..(282): Homolog of NCBI NO: 27413160 NR Description: carbonyl reductase 3 [Mus musculus]
  misc_feature (22)..(108): Homolog of NCBI NO: 34559416 NR Description: (-)-isopiperitenone reductase [Mentha x piperita]
  misc_feature (118)..(281): Homolog of NCBI NO: 34559416 NR Description: (-)-isopiperitenone reductase [Mentha x piperita]
  misc_feature (12)..(281): Homolog of NCBI NO: 10176876 NR Description: carbonyl reductase-like protein [Arabidopsis
  misc_feature (12)..(281): Homolog of NCBI NO: 15240361 NR Description: short-chain dehydrogenase/reductase family
  misc_feature (12)..(281): Homolog of NCBI NO: 15241346 NR Description: short-chain dehydrogenase/reductase family
  misc_feature (11)..(281): Homolog of NCBI NO: 34907100 NR Description: putative carbonyl reductase-like protein
  misc_feature (15)..(292): Homolog of NCBI NO: 15231739 NR Description: short-chain dehydrogenase/reductase family
  misc_feature (1)..(292): Homolog of NCBI NO: 21740778 NR Description: OSJNBa0067K08.7 [Oryza sativa (japonica
MDCSSSKETPPHKAWWTGETVAVVTGANRGIGHALAARLAEQGLSVVLTARDEARGEAAAAELRARGLPSVRFRRLDVTDSASVAAFASWIRDDVGGLDILVNNAGVSFNEIDTNSVEHAETVLKTNFYGAKMLIEALLPLFRRSSGTSRILNLSSQLGLLNKVRDPSLRSMLLDEGRLTEQQVEAMASRFLAQVKDGTWQDHGWPAVWTDYAVSKLALNAYSRLLAARLRGAVAVNCFCPGFTRTDMTRGWGKRTAEEAGRVAAGLALLPPADLPTGKFFKWSTPQLYSKL

SEQ ID NO: 69245 - protein, 160 aa, Triticum aestivum
  peptide (1)..(160): Ceres Seq. ID no. 14301900
  misc_feature (1)..(150): Homolog of NCBI NO: 34867654 NR Description: similar to carbonyl reductase 3 [Rattus
  misc_feature (1)..(148): Homolog of NCBI NO: 485271 NR Description: NADPH:secondary-alcohol oxidoreductase
  misc_feature (1)..(150): Homolog of NCBI NO: 27413160 NR Description: carbonyl reductase 3 [Mus musculus]
  misc_feature (1)..(149): Homolog of NCBI NO: 34559416 NR Description: (-)-isopiperitenone reductase [Mentha x piperita]
  misc_feature (1)..(149): Homolog of NCBI NO: 10176876 NR Description: carbonyl reductase-like protein [Arabidopsis
  misc_feature (1)..(149): Homolog of NCBI NO: 15240361 NR Description: short-chain dehydrogenase/reductase family
  misc_feature (1)..(149): Homolog of NCBI NO: 15241346 NR Description: short-chain dehydrogenase/reductase family
  misc_feature (1)..(149): Homolog of NCBI NO: 34907100 NR Description: putative carbonyl reductase-like protein
  misc_feature (1)..(160): Homolog of NCBI NO: 15231739 NR Description: short-chain dehydrogenase/reductase family
  misc_feature (1)..(160): Homolog of NCBI NO: 21740778 NR Description: OSJNBa0067K08.7 [Oryza sativa (japonica
MLIEALLPLFRRSSGTSRILNLSSQLGLLNKVRDPSLRSMLLDEGRLTEQQVEAMASRFLAQVKDGTWQDHGWPAVWTDYAVSKLALNAYSRLLAARLRGAVAVNCFCPGFTRTDMTRGWGKRTAEEAGRVAAGLALLPPADLPTGKFFKWSTPQLYSKL

SEQ ID NO: 69246 - DNA, 1297 bp, Triticum aestivum
  misc_feature (1)..(1297): Ceres Seq. ID no. 14301693
attaatttctttcctccagtcttctctgacctccctctcccccccaccctgcgcaagtgcacagtgggtcagtgccgcggcgagctccctcccccagcctcggcctccccgcccgatctggtcgccccccgcccgcggacgcgccccccgccaaaccctagggcctcgccgcgccgccgcgcgaaggggcgcctcgctgcgccgctcgcccgcgatggaccccgccccgcagctcaaggccgagccctggcgcccgccgccccgcgccggcgcggccggcgggcgcgcggcgggggaggcctcctccgccgtcacgggccagagcagcggcagccgcccgcggaggaggcagcgggagcctcccgcgtccgaggacgactcggcctccgccaggcctgtctccacctccggcggcggcggcggcggccaggatttgactgatgcagaagcaaagcgtttcaaggcaaataaatccagtgatgataatggtagtgtcagaaaagatgctgaagctgattcaagaaatgctagtaaggctgttgaccaaaatcccccgccaccaaagcaagatttcatccatgtgagggcaagaaggggtcaagcaactgacagccatagccttgcagaaagggcacggcgtgagaaaataaccgagcggatgaaaattctccaagatcttgtccctggatgtaataaggttattgggaaagcatcagtccttgatgagataatcaattatgtccaagctttggaacgccaaattgagttcctgtccatgaagctcgaggcggttaacgcccatgcccatgctcacaacggagttgaaacatttccaactaaagacttcgctgcgccggcatacaacacagctccagggttaacatttgacccgcaaacaccaagggagtacgcccagggctcgccggctgcagaatggcttcacatgcagattggtggcacctacgaaagagtgacgtgagcagaacaaaagtccagggtggcgcccaacaaagcgtgccatgaatcctcggccaagcaacccccactttcataccgtagatcatttttttttgcgccaccatctcgttccaaatgcggttttattcatagtttttggagctgtaattgccggtagagacgtcagacatgtatttagagagaaccgccgagcacggtgcctttttgttttgaccttcggattcaggactgttcctcatgtattcgcaaccttcatgtattccatggatttctgtagctggtaatcattcttaagatgaaaggaagcgacttttttttt

SEQ ID NO: 69247 - protein, 325 aa, Triticum aestivum
  peptide (1)..(325): Ceres Seq. ID no. 14301694
  misc_feature (201)..(251): Pfam Name: Helix-loop-helix DNA-binding domain Pfam Description: Helix-loop-helix DNA-binding domain
  misc_feature (111)..(288): Homolog of NCBI NO: 15239013 NR Description: bHLH protein family [Arabidopsis thaliana]
  misc_feature (87)..(272): Homolog of NCBI NO: 34906952 NR Description: DNA-binding protein-like protein
  misc_feature (124)..(281): Homolog of NCBI NO: 25453562 NR Description: helix-loop-helix protein homolog
  misc_feature (124)..(281): Homolog of NCBI NO: 30696324 NR Description: bHLH protein [Arabidopsis thaliana]
  misc_feature (124)..(281): Homolog of NCBI NO: 25404871 NR Description: protein T30E16.21 [imported] - Arabidopsis
  misc_feature (88)..(325): Homolog of NCBI NO: 15241896 NR Description: bHLH protein family [Arabidopsis thaliana]
  misc_feature (124)..(325): Homolog of NCBI NO: 21592490 NR Description: unknown [Arabidopsis thaliana]
  misc_feature (124)..(325): Homolog of NCBI NO: 18406408 NR Description: bHLH protein [Arabidopsis thaliana]
  misc_feature (124)..(325): Homolog of NCBI NO: 33339703 NR Description: MYC1 [Catharanthus roseus]
  misc_feature (72)..(325): Homolog of NCBI NO: 29150361 NR Description: hypothetical protein [Oryza sativa (japonica
LISFLQSSLTSLSPPPCASAQWVSAAASSLPQPRPPRPIWSPPARGRAPRQTLGPRRAAARRGASLRRSPAMDPAPQLKAEPWRPPPRAGAAGGRAAGEASSAVTGQSSGSRPRRRQREPPASEDDSASARPVSTSGGGGGGQDLTDAEAKRFKANKSSDDNGSVRKDAEADSRNASKAVDQNPPPPKQDFIHVRARRGQATDSHSLAERARREKITERMKILQDLVPGCNKVIGKASVLDEIINYVQALERQIEFLSMKLEAVNAHAHAHNGVETFPTKDFAAPAYNTAPGLTFDPQTPREYAQGSPAAEWLHMQIGGTYERVT

SEQ ID NO: 69248 - protein, 254 aa, Triticum aestivum
  peptide (1)..(254): Ceres Seq. ID no. 14301695
  misc_feature (130)..(180): Pfam Name: Helix-loop-helix DNA-binding domain Pfam Description: Helix-loop-helix DNA-binding domain
  misc_feature (40)..(217): Homolog of NCBI NO: 15239013 NR Description: bHLH protein family [Arabidopsis thaliana]
  misc_feature (16)..(201): Homolog of NCBI NO: 34906952 NR Description: DNA-binding protein-like protein
  misc_feature (53)..(210): Homolog of NCBI NO: 30696324 NR Description: bHLH protein [Arabidopsis thaliana]
  misc_feature (53)..(210): Homolog of NCBI NO: 25453562 NR Description: helix-loop-helix protein homolog
  misc_feature (53)..(210): Homolog of NCBI NO: 25404871 NR Description: protein T30E16.21 [imported] - Arabidopsis
  misc_feature (17)..(254): Homolog of NCBI NO: 15241896 NR Description: bHLH protein family [Arabidopsis thaliana]
  misc_feature (53)..(254): Homolog of NCBI NO: 21592490 NR Description: unknown [Arabidopsis thaliana]
  misc_feature (53)..(254): Homolog of NCBI NO: 18406408 NR Description: bHLH protein [Arabidopsis thaliana]
  misc_feature (53)..(254): Homolog of NCBI NO: 33339703 NR Description: MYC1 [Catharanthus roseus]
  misc_feature (1)..(254): Homolog of NCBI NO: 29150361 NR Description: hypothetical protein [Oryza sativa (japonica
MDPAPQLKAEPWRPPPRAGAAGGRAAGEASSAVTGQSSGSRPRRRQREPPASEDDSASARPVSTSGGGGGGQDLTDAEAKRFKANKSSDDNGSVRKDAEADSRNASKAVDQNPPPPKQDFIHVRARRGQATDSHSLAERARREKITERMKILQDLVPGCNKVIGKASVLDEIINYVQALERQIEFLSMKLEAVNAHAHAHNGVETFPTKDFAAPAYNTAPGLTFDPQTPREYAQGSPAAEWLHMQIGGTYERVT

SEQ ID NO: 69249 - DNA, 1762 bp, Triticum aestivum
  misc_feature (1)..(1762): Ceres Seq. ID no. 13664123
cgtattgaggtgatgcgttccctctgcaaggttttggactcaaacttcgaagataagttaaaagaactgggtcaatggaggagcttgacgagggaacgatagaatggaaaacggtcgagagcagattagagcggacgatacagacgctacttgaggtcagagatgagagatataagcagctgaaagagtgtgggactaaggtcatacaacagtggaaatcaaacgatgcaccagcatcaagaatcgttgatttttcagaagccttagcattttatgatgctgcatcggcaacagagtcatccacacagctcactggaagcaaagctctcaacatcgattcaattaagaatataaataaggaaattcttttgcaaaactcactagagctgaagaaattgaaaggaaagtttgacaggctcaagaataagttgttttctctgattcacaagaaccatcttcagttgagtctggcggattttgtttttgaaatgaaagttgagtcgaataaagattatttttctgcatgcaagaagttgaaagaggcgatctcaaatgtcaaagctcaggttgttaagaggaaggaaataattatgagaacagagatgctgaaattggctatagatcaatcaatgcccctggcaaatatcgaagggttcatccaagtgatcaaaagacaggtggatgtgttggttcaggatgaagggaaaccttacatttatgattgtgaagatataaattcaattctcgataagctccaatctattgcttctgagaagaaggctccgcaaaattcaggttccaagctgagaataaaagaacttgttccggaaaagggaatgcaggagaaagcttcaggaacctcaagagcaagttttagtctgtctgctgctaatgcgggtaaggaatctcgagagaagcccgcagcatgtctgagatcaagctcaaggctcaaggagaagcgaactcaaccggaactgcgaggaacaatgagtctgtctgtccaagtccttccacagcaggaatcatcaagctcccaaagtggagaagaagatcactcaggggaaacctcaagagcgagttccagtctgtctgctgctaatgcgttcaaggaatctggtgctgctgctcaaaagaagcccgcagctggtctgagatcaagttcgaggctcaaggagaagcaagctcaaccaaaactgcaaagaaagacgagagtgtctgtccaagtctttccacagcaggaatcatcaagctcccaaagtggagaagaagatcactcaggggaaagctcgctgcctgttgaaccgcaattgatagcttcattgccaccacatccaaggcagcccaggactcgaagagtggaaataccacctggtgaaggatgacaaaagctgacaaggtccgcaacttgatggaagtgaacatccaaaataaggggccagggctaggcgtaaggaattaaaaagcaacaaaaaacagagtgaatccaccagagtgagtgaatcggtagaagagggggcaataacatgaataacatacaagatccagaagcaagtctgttgtaggaatcttttgccaacaaacagaagattttgcgctgtaggaatcatgtagcgatcagatcagatgcagtagtcaaaattttgccaacagtagccaaaaattttctacttttttttgttgctcgcctgatttttcmcatatatggtcagatgcagtggggatttttttcgaaagtttttgccctgcagttgatttactgccc

SEQ ID NO: 69250 - protein, 435 aa, Triticum aestivum
  peptide (1)..(435): Ceres Seq. ID no. 15220727
  misc_feature (13)..(184): Pfam Name: Microtubule associated protein (MAP65/ASE1 family) Pfam Description: Microtubule associated protein (MAP65/ASE1
MEELDEGTIEWKTVESRLERTIQTLLEVRDERYKQLKECGTKVIQQWKSNDAPASRIVDFSEALAFYDAASATESSTQLTGSKALNIDSIKNINKEILLQNSLELKKLKGKFDRLKNKLFSLIHKNHLQLSLADFVFEMKVESNKDYFSACKKLKEAISNVKAQVVKRKEIIMRTEMLKLAIDQSMPLANIEGFIQVIKRQVDVLVQDEGKPYIYDCEDINSILDKLQSIASEKKAPQNSGSKLRIKELVPEKGMQEKASGTSRASFSLSAANAGKESREKPAACLRSSSRLKEKRTQPELRGTMSLSVQVLPQQESSSSQSGEEDHSGETSRASSSLSAANAFKESGAAAQKKPAAGLRSSSRLKEKQAQPKLQRKTRVSVQVFPQQESSSSQSGEEDHSGESSLPVEPQLIASLPPHPRQPRTRRVEIPPGEG

SEQ ID NO: 69251 - protein, 297 aa, Triticum aestivum
  peptide (1)..(297): Ceres Seq. ID no. 15220728
MKVESNKDYFSACKKLKEAISNVKAQVVKRKEIIMRTEMLKLAIDQSMPLANIEGFIQVIKRQVDVLVQDEGKPYIYDCEDINSILDKLQSIASEKKAPQNSGSKLRIKELVPEKGMQEKASGTSRASFSLSAANAGKESREKPAACLRSSSRLKEKRTQPELRGTMSLSVQVLPQQESSSSQSGEEDHSGETSRASSSLSAANAFKESGAAAQKKPAAGLRSSSRLKEKQAQPKLQRKTRVSVQVFPQQESSSSQSGEEDHSGESSLPVEPQLIASLPPHPRQPRTRRVEIPPGEG

SEQ ID NO: 69252 - protein, 263 aa, Triticum aestivum
  peptide (1)..(263): Ceres Seq. ID no. 15220729
MRTEMLKLAIDQSMPLANIEGFIQVIKRQVDVLVQDEGKPYIYDCEDINSILDKLQSIASEKKAPQNSGSKLRIKELVPEKGMQEKASGTSRASFSLSAANAGKESREKPAACLRSSSRLKEKRTQPELRGTMSLSVQVLPQQESSSSQSGEEDHSGETSRASSSLSAANAFKESGAAAQKKPAAGLRSSSRLKEKQAQPKLQRKTRVSVQVFPQQESSSSQSGEEDHSGESSLPVEPQLIASLPPHPRQPRTRRVEIPPGEG

SEQ ID NO: 69253 - DNA, 1623 bp, Triticum aestivum
  misc_feature (1)..(1623): Ceres Seq. ID no. 13653980
acacattacatgttccattccagtgcacgtaccgcccactgcagtttctgcaaacgtttaaaaaacaaggtagtactagtaggagtatgaccagggggggacgaatctgtacgggatcgcggcgagattcacccggcgccaccctcccctccctgtaacgtcgttatacaagtgtacttatctcgggggaccctataagggaggcggctcgggcagctccaagcgccagcgaaccaaccacgaggacacggcgagatgcagcgcgccgcggcctccctcgcctcctcccgctccgcggctgcctgggcgtgctcctccacctcgcgccatgccatcgcctcctgctcggccaccgcccgccgcgacgccgtcgtgcctctccggattcgcgggcagcagcaggttcccctccactccatgtccctgtcgctgctctcgcggagacggcctgcgcggacggcaaaagcggcggctgctgcggcggaactggcaccggcgtcggacgaggtggccgcgggcggcggcattgccggcacggtgcagctcggcgccatgatcgtcgcctggtacctcctcaacatctacttcaacatctacaacaagcaggttctccaggtgctgccattgccgctcccctacaccatcaccgccttccagctcgccttcggctcgctcgtcatcttcttcatgtgggccacaaagctccaccccgtgcccaagctctccgccgcacagctggccaagatcgcgccgctggccgccgggcacatgctgggcacggtgttcaccaacatgagcctgggcaaggtagccgtctccttcacgcacaccgtcaaggcgtccgagcccttcttcaccgtgctgctctccgccttcttcctcggtgaggtgccgtcgccgctggtgctgggctcgctggtgccgatcgtcggcggcgtcgccctggcatcgctgaccgaggtctccttcaactgggtcggattctggagcgccatggcgtcgaatctgctcaaccagaccaggaatgtgctcagcaagcgcctcctcggcggcgaagaggaggagttcatggacgacataaacctcttctcggtgatcaccgtgctgtccttcctcctatccttgcctctgatgatctttgcagaaggggtcagcttctccccagcgttcctccagagcaccggcctgaacctgcaggagctgtgcgtgagggcggccctggccggcctctgcttccatggctaccagaagctgtcgtacatgatcctggcgagggtgtcgcccgtgacccactccgtggccaactgcgtcaagcgtgtggtggtcatcgtctcctccgtcctcttcttccggacgcccatctcgcctgtcaacgcactggggactggtgcggcacttgcgggagtttacctgtactccaggctcaagaaaacaaagccaaagagctcatgaagacattctgatacaggtttttgtggtacaagattaaatcgatatagttattcagagagaaaatgtattgagataggttgtacagaacttgccacggccagtagtacacttgtactacaggccacagcagcttctttcagtagtaacaggaccaaactgctggtcttgaag

SEQ ID NO: 69254 - protein, 398 aa, Triticum aestivum
  peptide (1)..(398): Ceres Seq. ID no. 13653981
  misc_feature (106)..(233): Pfam Name: Integral membrane protein DUF6 Pfam Description: Integral membrane protein DUF6
  misc_feature (26)..(396): Homolog of NCBI NO: 21554233 NR Description: phosphate/phosphoenolpyruvate translocator
  misc_feature (68)..(396): Homolog of NCBI NO: 7489170 NR Description: phosphate/phosphoenolpyruvate translocator
  misc_feature (23)..(396): Homolog of NCBI NO: 29647427 NR Description: putative phosphoenolpyruvate/phosphate
  misc_feature (51)..(396): Homolog of NCBI NO: 1706110 NR Description: Triose phosphate/phosphate translocator,
  misc_feature (1)..(396): Homolog of NCBI NO: 7489743 NR Description: glucose-6-phosphate/phosphate-translocator
  misc_feature (62)..(396): Homolog of NCBI NO: 13991929 NR Description: phosphoenolpyruvate/phosphate translocator [Oryza
  misc_feature (1)..(396): Homolog of NCBI NO: 7489742 NR Description: glucose-6-phosphate/phosphate-translocator
  misc_feature (117)..(212): Homolog of NCBI NO: 15528718 NR Description: putative phosphoenolpyruvate/phosphate
  misc_feature (1)..(127): Homolog of NCBI NO: 15528718 NR Description: putative phosphoenolpyruvate/phosphate
  misc_feature (211)..(375): Homolog of NCBI NO: 15528718 NR Description: putative phosphoenolpyruvate/phosphate
MQRAAASLASSRSAAAWACSSTSRHAIASCSATARRDAVVPLRIRGQQQVPLHSMSLSLLSRRRPARTAKAAAAAAELAPASDEVAAGGGIAGTVQLGAMIVAWYLLNIYFNIYNKQVLQVLPLPLPYTITAFQLAFGSLVIFFMWATKLHPVPKLSAAQLAKIAPLAAGHMLGTVFTNMSLGKVAVSFTHTVKASEPFFTVLLSAFFLGEVPSPLVLGSLVPIVGGVALASLTEVSFNWVGFWSAMASNLLNQTRNVLSKRLLGGEEEEFMDDINLFSVITVLSFLLSLPLMIFAEGVSFSPAFLQSTGLNLQELCVRAALAGLCFHGYQKLSYMILARVSPVTHSVANCVKRVVVIVSSVLFFRTPISPVNALGTGAALAGVYLYSRLKKTKPKSS

SEQ ID NO: 69255 - protein, 344 aa, Triticum aestivum
  peptide (1)..(344): Ceres Seq. ID no. 13653982
  misc_feature (52)..(179): Pfam Name: Integral membrane protein DUF6 Pfam Description: Integral membrane protein DUF6
  misc_feature (1)..(342): Homolog of NCBI NO: 21554233 NR Description: phosphate/phosphoenolpyruvate translocator
  misc_feature (14)..(342): Homolog of NCBI NO: 7489170 NR Description: phosphate/phosphoenolpyruvate translocator
  misc_feature (1)..(342): Homolog of NCBI NO: 29647427 NR Description: putative phosphoenolpyruvate/phosphate
  misc_feature (1)..(342): Homolog of NCBI NO: 1706110 NR Description: Triose phosphate/phosphate translocator,
  misc_feature (1)..(342): Homolog of NCBI NO: 7489743 NR Description: glucose-6-phosphate/phosphate-translocator
  misc_feature (8)..(342): Homolog of NCBI NO: 13991929 NR Description: phosphoenolpyruvate/phosphate translocator [Oryza
  misc_feature (1)..(342): Homolog of NCBI NO: 7489742 NR Description: glucose-6-phosphate/phosphate-translocator
  misc_feature (63)..(158): Homolog of NCBI NO: 15528718 NR Description: putative phosphoenolpyruvate/phosphate
  misc_feature (1)..(73): Homolog of NCBI NO: 15528718 NR Description: putative phosphoenolpyruvate/phosphate
  misc_feature (157)..(321): Homolog of NCBI NO: 15528718 NR Description: putative phosphoenolpyruvate/phosphate
MSLSLLSRRRPARTAKAAAAAAELAPASDEVAAGGGIAGTVQLGAMIVAWYLLNIYFNIYNKQVLQVLPLPLPYTITAFQLAFGSLVIFFMWATKLHPVPKLSAAQLAKIAPLAAGHMLGTVFTNMSLGKVAVSFTHTVKASEPFFTVLLSAFFLGEVPSPLVLGSLVPIVGGVALASLTEVSFNWVGFWSAMASNLLNQTRNVLSKRLLGGEEEEFMDDINLFSVITVLSFLLSLPLMIFAEGVSFSPAFLQSTGLNLQELCVRAALAGLCFHGYQKLSYMILARVSPVTHSVANCVKRVVVIVSSVLFFRTPISPVNALGTGAALAGVYLYSRLKKTKPKSS

SEQ ID NO: 69256 - protein, 299 aa, Triticum aestivum
  peptide (1)..(299): Ceres Seq. ID no. 13653983
  misc_feature (7)..(134): Pfam Name: Integral membrane protein DUF6 Pfam Description: Integral membrane protein DUF6
  misc_feature (1)..(297): Homolog of NCBI NO: 21554233 NR Description: phosphate/phosphoenolpyruvate translocator
  misc_feature (1)..(297): Homolog of NCBI NO: 7489170 NR Description: phosphate/phosphoenolpyruvate translocator
  misc_feature (1)..(297): Homolog of NCBI NO: 29647427 NR Description: putative phosphoenolpyruvate/phosphate
  misc_feature (1)..(297): Homolog of NCBI NO: 1706110 NR Description: Triose phosphate/phosphate translocator,
  misc_feature (1)..(297): Homolog of NCBI NO: 7489743 NR Description: glucose-6-phosphate/phosphate-translocator
  misc_feature (1)..(297): Homolog of NCBI NO: 13991929 NR Description: phosphoenolpyruvate/phosphate translocator [Oryza
  misc_feature (1)..(297): Homolog of NCBI NO: 7489742 NR Description: glucose-6-phosphate/phosphate-translocator
  misc_feature (18)..(113): Homolog of NCBI NO: 15528718 NR Description: putative phosphoenolpyruvate/phosphate
  misc_feature (1)..(28): Homolog of NCBI NO: 15528718 NR Description: putative phosphoenolpyruvate/phosphate
  misc_feature (112)..(276): Homolog of NCBI NO: 15528718 NR Description: putative phosphoenolpyruvate/phosphate
MIVAWYLLNIYFNIYNKQVLQVLPLPLPYTITAFQLAFGSLVIFFMWATKLHPVPKLSAAQLAKIAPLAAGHMLGTVFTNMSLGKVAVSFTHTVKASEPFFTVLLSAFFLGEVPSPLVLGSLVPIVGGVALASLTEVSFNWVGFWSAMASNLLNQTRNVLSKRLLGGEEEEFMDDINLFSVITVLSFLLSLPLMIFAEGVSFSPAFLQSTGLNLQELCVRAALAGLCFHGYQKLSYMILARVSPVTHSVANCVKRVVVIVSSVLFFRTPISPVNALGTGAALAGVYLYSRLKKTKPKSS

SEQ ID NO: 69257 - DNA, 1864 bp, Triticum aestivum
  misc_feature (1)..(1864): Ceres Seq. ID no. 13502947
accaccaccaccaattcgcaacctctcctcccccgttctcctcattgtcctcgcgccccgctccgctccgacggccaaccgctccacacaccactagcctgcctgcctgcctgccgccaaggcaagatggtgaagatctgctgccttggggctggctatgtgggtggcccaacaatggcggtcattgccctcaagtgtcctgacattcaggtggttgtggtagatatcaccaagtcccggattgatgcctggaacagtgacacactgccaatctatgagcctggccttgatgaagtcgtgaagcagtgccgtggaaagaacctcttcttcagcaatgacattgagaagcatgttagtgaagctgacatcatctttgtgtcggtaaacaccccaaccaagacccgtggtcttggagctggtaaggctgctgatctcacttactgggaaagtgcagctcgcatgattgctgatgtggccaaatcagacaagatcgtggtggagaagtccactgttccagtcaagactgctgaggcaattgagaagatcttgacccacaacagcaatggcatcaacttccagatcctctccaacccggagttccttgctgagggtactgctatccaagacctatttaaccctgaccgtgttcttattggaggacgtgagacccctgaaggtcagaaggctgttcagacgctgaaggctgtgtatgcgcattgggttcctgaggatcagattctgacaaccaacttatggtctgcggagctgtcgaagcttgcagccaatgcgttcttggcccagaggatctcctctgtgaatgccatgtcagccctctgcgaggccactggtgcaaatgtttctgaggtgtcctatgccgtgggcaaggactctaggattggcccaaagtttttgaatgccagtgttggatttggaggctcttgcttccagaaggatatcctcaacctggtttacatctgtgagtgcaatggcctcccagaggtcgccaactactggaagcaggtgatcaagatcaatgactaccagaagagccggttcgtgaaccgtgttgtttcctctatgttcaacacggttgcgaacaagaagattgcggtgcttggttttgcattcaagaaggatactggtgacactagggagactccagctattgatgtctgcaagggtctgcttggtgacaaggctaagatcagcatttatgatcctcaggtgactgaagaccaaatccagcgtgaccttgcgatgaacaaatttgactgggaccaccctgttcatctccagccaatgagccccaccactacaaagcaagtctcggttacctgggatgcatatgaggcgaccaaggatgcccatggcatctgcatcatgactgagtgggatgagttcaagactctggactacaaaaagatctacaacagcatgcagaagcccgcctttgtttttgatggccgcaacgttgttgactctgagaagctgagggagattggcttcattgtctactccattggcaagccactcgacggttggctcaaggacatgcctgctgtggcttaaataaactctgataaagggaggagatccgcctcgggtgaatccatgagcagctatcgatagggattcagcttgttatttctctttatagtcgctgtttatcttgtgccagaaaatcagatgtcatttatttttcttccttgagtgtttcttcggggtttacagtgttagaatggtatagtcactgggatgtgccattcctttggtccattgtcacagctttgtagctaatgtctgttgttgcatctttatcatgttactggtgttcatcctgctggttatacatgtggcttcagat

SEQ ID NO: 69258 - protein, 522 aa, Triticum aestivum
  peptide (1)..(522): Ceres Seq. ID no. 15223206
  misc_feature (44)..(242): Pfam Name: UDP-glucose/GDP-mannose dehydrogenase family, Pfam Description: UDP-glucose/GDP-mannose dehydrogenase family,
  misc_feature (43)..(522): Homolog of NCBI NO: 13236672 NR Description: putative UDP-glucose dehydrogenase [Oryza sativa]
TTTTNSQPLLPRSPHCPRAPLRSDGQPLHTPLACLPACRQGKMVKICCLGAGYVGGPTMAVIALKCPDIQVVVVDITKSRIDAWNSDTLPIYEPGLDEVVKQCRGKNLFFSNDIEKHVSEADIIFVSVNTPTKTRGLGAGKAADLTYWESAARMIADVAKSDKIVVEKSTVPVKTAEAIEKILTHNSNGINFQILSNPEFLAEGTAIQDLFNPDRVLIGGRETPEGQKAVQTLKAVYAHWVPEDQILTTNLWSAELSKLAANAFLAQRISSVNAMSALCEATGANVSEVSYAVGKDSRIGPKFLNASVGFGGSCFQKDILNLVYICECNGLPEVANYWKQVIKINDYQKSRFVNRVVSSMFNTVANKKIAVLGFAFKKDTGDTRETPAIDVCKGLLGDKAKISIYDPQVTEDQIQRDLAMNKFDWDHPVHLQPMSPTTTKQVSVTWDAYEATKDAHGICIMTEWDEFKTLDYKKIYNSMQKPAFVFDGRNVVDSEKLREIGFIVYSIGKPLDGWLKDMPAVA

SEQ ID NO: 69259 - protein, 480 aa, Triticum aestivum
  peptide (1)..(480): Ceres Seq. ID no. 15223207
  misc_feature (2)..(200): Pfam Name: UDP-glucose/GDP-mannose dehydrogenase family, Pfam Description: UDP-glucose/GDP-mannose dehydrogenase family,
  misc_feature (1)..(480): Homolog of NCBI NO: 13236672 NR Description: putative UDP-glucose dehydrogenase [Oryza sativa]
MVKICCLGAGYVGGPTMAVIALKCPDIQVVVVDITKSRIDAWNSDTLPIYEPGLDEVVKQCRGKNLFFSNDIEKHVSEADIIFVSVNTPTKTRGLGAGKAADLTYWESAARMIADVAKSDKIVVEKSTVPVKTAEAIEKILTHNSNGINFQILSNPEFLAEGTAIQDLFNPDRVLIGGRETPEGQKAVQTLKAVYAHWVPEDQILTTNLWSAELSKLAANAFLAQRISSVNAMSALCEATGANVSEVSYAVGKDSRIGPKFLNASVGFGGSCFQKDILNLVYICECNGLPEVANYWKQVIKINDYQKSRFVNRVVSSMFNTVANKKIAVLGFAFKKDTGDTRETPAIDVCKGLLGDKAKISIYDPQVTEDQIQRDLAMNKFDWDHPVHLQPMSPTTTKQVSVTWDAYEATKDAHGICIMTEWDEFKTLDYKKIYNSMQKPAFVFDGRNVVDSEKLREIGFIVYSIGKPLDGWLKDMPAVA

SEQ ID NO: 69260 - protein, 464 aa, Triticum aestivum
  peptide (1)..(464): Ceres Seq. ID no. 15223208
  misc_feature (1)..(184): Pfam Name: UDP-glucose/GDP-mannose dehydrogenase family, Pfam Description: UDP-glucose/GDP-mannose dehydrogenase family,
  misc_feature (1)..(464): Homolog of NCBI NO: 13236672 NR Description: putative UDP-glucose dehydrogenase [Oryza sativa]
MAVIALKCPDIQVVVVDITKSRIDAWNSDTLPIYEPGLDEVVKQCRGKNLFFSNDIEKHVSEADIIFVSVNTPTKTRGLGAGKAADLTYWESAARMIADVAKSDKIVVEKSTVPVKTAEAIEKILTHNSNGINFQILSNPEFLAEGTAIQDLFNPDRVLIGGRETPEGQKAVQTLKAVYAHWVPEDQILTTNLWSAELSKLAANAFLAQRISSVNAMSALCEATGANVSEVSYAVGKDSRIGPKFLNASVGFGGSCFQKDILNLVYICECNGLPEVANYWKQVIKINDYQKSRFVNRVVSSMFNTVANKKIAVLGFAFKKDTGDTRETPAIDVCKGLLGDKAKISIYDPQVTEDQIQRDLAMNKFDWDHPVHLQPMSPTTTKQVSVTWDAYEATKDAHGICIMTEWDEFKTLDYKKIYNSMQKPAFVFDGRNVVDSEKLREIGFIVYSIGKPLDGWLKDMPAVA

SEQ ID NO: 69261 - DNA, 933 bp, Triticum aestivum
  misc_feature (1)..(933): Ceres Seq. ID no. 13654038
ggccctctctggtcagatcaaatcgagcctgcccttctcgctcgcgtccccactccatttccctttcccccgaggaggctgccgccgtgacctgagagcacacgcacgcaccatgtggcgccgcctccaaaccctagcccccgccctccaccgcgctgccgccgcagccggcgcggccccctccccggccagcgcccgggccgctcccctctccacggcggtcgcggccttccgccgcactgggcccctcctctctgcggacaagccggcggcggcagggacgagtgtggaggacgtcatgcccatagccacggggttggagcgcgaggagctcgaggcggagctccaggggaagaagcgcttcgacatggatcctcctgtcggtcccttcggtaccaaggaggcaccagccgtcattgagtcctattttgacaagagaatagtaggttgccctggtgatgaaggagaggatgagcatgacgtcatatggttctggttgaaaaaagatgagccacatgaatgcccagtctgctcacaatactttgtgcttaaggtcattggtgatggtggaaatccagatgggcatgatgatgatgatgatggtcatcaccactaaggatgcctcgtggttctgaaaataagaattttatgaggcatatgatttcgcttacgcgttctaagcaccagactgctccacggcatccttgtttatgaatatacatttggccatcaagcaggcggtagttgtcgccttaggtttttttgtggaaacaaaactcttttcagatttgtccagtgcatgtgttatggagcatcatcaaataagagatgactgcagagaatttttacttttgctactgagtggccatcgggtgtgatggacctgaccaattcaatcatgcaagaatttatgctgtgcggtttgcagggggg

SEQ ID NO: 69262 - protein, 204 aa, Triticum aestivum
  peptide (1)..(204): Ceres Seq. ID no. 15219608
  misc_feature (83)..(189): Pfam Name: Cytochrome c oxidase subunit Vb Pfam Description: Cytochrome c oxidase subunit Vb
  misc_feature (73)..(183): Homolog of NCBI NO: 473729 NR Description: cytochrome c oxidase subunit Vb [Rattus
  misc_feature (73)..(183): Homolog of NCBI NO: 12842467 NR Description: unnamed protein product [Mus musculus]
  misc_feature (73)..(183): Homolog of NCBI NO: 16758362 NR Description: cytochrome c oxidase subunit Vb [Rattus
  misc_feature (73)..(183): Homolog of NCBI NO: 55992 NR Description: cytochrome c oxidase subunit VIa (AA 1 - 118)
  misc_feature (73)..(183): Homolog of NCBI NO: 6753500 NR Description: cytochrome c oxidase, subunit Vb [Mus musculus]
  misc_feature (38)..(203): Homolog of NCBI NO: 21592567 NR Description: cytochrome c oxidase subunit, putative
  misc_feature (38)..(203): Homolog of NCBI NO: 15220092 NR Description: cytochrome c oxidase subunit -related
  misc_feature (38)..(204): Homolog of NCBI NO: 15232644 NR Description: cytochrome c oxidase subunit Vb -related
  misc_feature (38)..(204): Homolog of NCBI NO: 5803264 NR Description: ESTs AU057456(S21460),AU057455(S21460) correspond a region of the predicted gene.~Similar to cytochrome c oxidase
  misc_feature (38)..(204): Homolog of NCBI NO: 34912592 NR Description: cytochrome c oxidase subunit Vb precursor
ALSGQIKSSLPFSLASPLHFPFPRGGCRRDLRAHARTMWRRLQTLAPALHRAAAAAGAAPSPASARAAPLSTAVAAFRRTGPLLSADKPAAAGTSVEDVMPIATGLEREELEAELQGKKRFDMDPPVGPFGTKEAPAVIESYFDKRIVGCPGDEGEDEHDVIWFWLKKDEPHECPVCSQYFVLKVIGDGGNPDGHDDDDDGHHH

SEQ ID NO: 69263 - protein, 167 aa, Triticum aestivum
  peptide (1)..(167): Ceres Seq. ID no. 15219609
  misc_feature (46)..(152): Pfam Name: Cytochrome c oxidase subunit Vb Pfam Description: Cytochrome c oxidase subunit Vb
  misc_feature (36)..(146): Homolog of NCBI NO: 473729 NR Description: cytochrome c oxidase subunit Vb [Rattus
  misc_feature (36)..(146): Homolog of NCBI NO: 12842467 NR Description: unnamed protein product [Mus musculus]
  misc_feature (36)..(146): Homolog of NCBI NO: 16758362 NR Description: cytochrome c oxidase subunit Vb [Rattus
  misc_feature (36)..(146): Homolog of NCBI NO: 55992 NR Description: cytochrome c oxidase subunit VIa (AA 1 - 118)
  misc_feature (36)..(146): Homolog of NCBI NO: 6753500 NR Description: cytochrome c oxidase, subunit Vb [Mus musculus]
  misc_feature (1)..(166): Homolog of NCBI NO: 21592567 NR Description: cytochrome c oxidase subunit, putative
  misc_feature (1)..(166): Homolog of NCBI NO: 15220092 NR Description: cytochrome c oxidase subunit -related
  misc_feature (1)..(167): Homolog of NCBI NO: 15232644 NR Description: cytochrome c oxidase subunit Vb -related
  misc_feature (1)..(167): Homolog of NCBI NO: 5803264 NR Description: ESTs AU057456(S21460),AU057455(S21460) correspond a region of the predicted gene.~Similar to cytochrome c oxidase
  misc_feature (1)..(167): Homolog of NCBI NO: 34912592 NR Description: cytochrome c oxidase subunit Vb precursor
MWRRLQTLAPALHRAAAAAGAAPSPASARAAPLSTAVAAFRRTGPLLSADKPAAAGTSVEDVMPIATGLEREELEAELQGKKRFDMDPPVGPFGTKEAPAVIESYFDKRIVGCPGDEGEDEHDVIWFWLKKDEPHECPVCSQYFVLKVIGDGGNPDGHDDDDDGHHH

SEQ ID NO: 69264 - protein, 105 aa, Triticum aestivum
  peptide (1)..(105): Ceres Seq. ID no. 15219610
  misc_feature (1)..(90): Pfam Name: Cytochrome c oxidase subunit Vb Pfam Description: Cytochrome c oxidase subunit Vb
  misc_feature (1)..(84): Homolog of NCBI NO: 473729 NR Description: cytochrome c oxidase subunit Vb [Rattus
  misc_feature (1)..(84): Homolog of NCBI NO: 12842467 NR Description: unnamed protein product [Mus musculus]
  misc_feature (1)..(84): Homolog of NCBI NO: 16758362 NR Description: cytochrome c oxidase subunit Vb [Rattus
  misc_feature (1)..(84): Homolog of NCBI NO: 55992 NR Description: cytochrome c oxidase subunit VIa (AA 1 - 118)
  misc_feature (1)..(84): Homolog of NCBI NO: 6753500 NR Description: cytochrome c oxidase, subunit Vb [Mus musculus]
  misc_feature (1)..(104): Homolog of NCBI NO: 21592567 NR Description: cytochrome c oxidase subunit, putative
  misc_feature (1)..(104): Homolog of NCBI NO: 15220092 NR Description: cytochrome c oxidase subunit -related
  misc_feature (1)..(105): Homolog of NCBI NO: 15232644 NR Description: cytochrome c oxidase subunit Vb -related
  misc_feature (1)..(105): Homolog of NCBI NO: 5803264 NR Description: ESTs AU057456(S21460),AU057455(S21460) correspond a region of the predicted gene.~Similar to cytochrome c oxidase
  misc_feature (1)..(105): Homolog of NCBI NO: 34912592 NR Description: cytochrome c oxidase subunit Vb precursor
MPIATGLEREELEAELQGKKRFDMDPPVGPFGTKEAPAVIESYFDKRIVGCPGDEGEDEHDVIWFWLKKDEPHECPVCSQYFVLKVIGDGGNPDGHDDDDDGHHH

SEQ ID NO: 69265 - DNA, 1705 bp, Triticum aestivum
  misc_feature (1)..(1705): Ceres Seq. ID no. 13595885
ctaatcgaaaaacccgcttttccctttttctctcatctagaacccccaagaccgggctcactcgccccctcggacctgctagggatggcacgcgccgctgccgccaacctgcgtggcctggtcggcattgcagcggcgggccggaggcgggtgaccgcctccgtcgcgccaccccgcgcgtcgcccggcgggcgcgcattccgggccgtggcctcaggctccgggggcaggacgactcctgaatcctcctcttcgtcctcgccggccctaccacagctgcagccgcggcgcggcttggcgacgagacgagcggtgctgcgtaacttgattagcggcggcttagagagtgaggatggtaagctgagctgcggatattcaagttttaaagggaggagacctactatggaggatcgctacgatgtaaagttcgctaaaatgaagggacagtcagttagcttgtttggtgtatttgatggtcatgcaggagcacttgccgctgaatatctaaaggaacatctgcttgacaaccttatcgagcatcctcagttcctgagaaacccaaagcttgctctgaagacgaccttcctgaaaactgatgctgatttcttagagtcggtaaccactccttatagggaggatggttcgactgctttggctgctgttctggttggtgaccaaatttatgtagcaaatgttggtgattcacgtgctatcgctttaaaaggtggcaaagctatcccactctcagatgaccataaacctaacttaaaggatgagagaacgagaattgagaatgctggaggtggtgttagttatgatggttttacttggagggttgatggaattctggcaatgtcccgtgcatttggcaaccgttcattgaagaattatgtgatagcagagcctgacattcaggaaacgcaggtcagcagtgacttggaatacctggttctcgctacagatggtctttgggatgtcgtgcaaaatgaggatgttatttcacttatgagagcaacggacgagcctgaggtggcggcagtgaagctgacggaaatggcccactctcggcacagctcagacaacattacatgcattgtggtgggatttcaccactgaacagcgtatgatacgtgaccgatattggtggcagtgaagttttttcacttcctctctgatctatggctggtataagacttccaacggctgtgaaagaaactggccaattgttggatctttttgtagggaattttttgcatctgattatcacttagtgaaattgcatcagatccgttaggagttgggtccacaaaatcaacaaaatggagaaggcctagggcatactactactaccactacaccacaacatcatcatatctttataattgaaggagtgtggagtattttctttagtgttttgtgttcagtttagtttattcacaaaaccgaggtctacatggcatactcatgtcatgagatcctaaattggatctagaacttgcaaactacatatttctttgttgcttttatgcaccacgctgaaatatgtatatctgaagtacaaagattatccggaatcttttactctagtattttttttgcgaataaatcttttactctagtatgctggacaaaattcaaaaattaacactagacatgtgttattcagattcgcaccttctgattgtactctatttatttcaaagtg

SEQ ID NO: 69266 - protein, 371 aa, Triticum aestivum
  peptide (1)..(371): Ceres Seq. ID no. 13595886
  misc_feature (121)..(362): Pfam Name: Protein phosphatase 2C Pfam Description: Protein phosphatase 2C
  misc_feature (69)..(369): Homolog of NCBI NO: 30693757 NR Description: protein phosphatase 2C (PP2C), putative
  misc_feature (111)..(369): Homolog of NCBI NO: 15238651 NR Description: protein phosphatase 2C (PP2C), putative
  misc_feature (111)..(369): Homolog of NCBI NO: 18416366 NR Description: protein phosphatase 2C (PP2C) -related
  misc_feature (110)..(371): Homolog of NCBI NO: 38345197 NR Description: OSJNBa0015K02.7 [Oryza sativa (japonica
  misc_feature (110)..(369): Homolog of NCBI NO: 30689144 NR Description: protein phosphatase 2C (PP2C), putative
  misc_feature (110)..(369): Homolog of NCBI NO: 20146110 NR Description: protein phosphatase 2C [Mesembryanthemum
  misc_feature (135)..(371): Homolog of NCBI NO: 34912708 NR Description: putative protein phosphatase 2C-like protein
  misc_feature (135)..(371): Homolog of NCBI NO: 9757995 NR Description: protein phosphatase 2C-like [Arabidopsis thaliana]
  misc_feature (41)..(371): Homolog of NCBI NO: 18086420 NR Description: AT5g53140/MFH8_8 [Arabidopsis thaliana]
  misc_feature (41)..(371): Homolog of NCBI NO: 18423476 NR Description: protein phosphatase 2C (PP2C), putative
LIEKPAFPFFSHLEPPRPGSLAPSDLLGMARAAAANLRGLVGIAAAGRRRVTASVAPPRASPGGRAFRAVASGSGGRTTPESSSSSSPALPQLQPRRGLATRRAVLRNLISGGLESEDGKLSCGYSSFKGRRPTMEDRYDVKFAKMKGQSVSLFGVFDGHAGALAAEYLKEHLLDNLIEHPQFLRNPKLALKTTFLKTDADFLESVTTPYREDGSTALAAVLVGDQIYVANVGDSRAIALKGGKAIPLSDDHKPNLKDERTRIENAGGGVSYDGFTWRVDGILAMSRAFGNRSLKNYVIAEPDIQETQVSSDLEYLVLATDGLWDVVQNEDVISLMRATDEPEVAAVKLTEMAHSRHSSDNITCIVVGFHH

SEQ ID NO: 69267 - protein, 343 aa, Triticum aestivum
  peptide (1)..(343): Ceres Seq. ID no. 13595887
  misc_feature (93)..(334): Pfam Name: Protein phosphatase 2C Pfam Description: Protein phosphatase 2C
  misc_feature (41)..(341): Homolog of NCBI NO: 30693757 NR Description: protein phosphatase 2C (PP2C), putative
  misc_feature (83)..(341): Homolog of NCBI NO: 15238651 NR Description: protein phosphatase 2C (PP2C), putative
  misc_feature (83)..(341): Homolog of NCBI NO: 18416366 NR Description: protein phosphatase 2C (PP2C) -related
  misc_feature (82)..(343): Homolog of NCBI NO: 38345197 NR Description: OSJNBa0015K02.7 [Oryza sativa (japonica
  misc_feature (82)..(341): Homolog of NCBI NO: 30689144 NR Description: protein phosphatase 2C (PP2C), putative
  misc_feature (82)..(341): Homolog of NCBI NO: 20146110 NR Description: protein phosphatase 2C [Mesembryanthemum
  misc_feature (107)..(343): Homolog of NCBI NO: 34912708 NR Description: putative protein phosphatase 2C-like protein
  misc_feature (107)..(343): Homolog of NCBI NO: 9757995 NR Description: protein phosphatase 2C-like [Arabidopsis thaliana]
  misc_feature (13)..(343): Homolog of NCBI NO: 18086420 NR Description: AT5g53140/MFH8_8 [Arabidopsis thaliana]
  misc_feature (13)..(343): Homolog of NCBI NO: 18423476 NR Description: protein phosphatase 2C (PP2C), putative
MARAAAANLRGLVGIAAAGRRRVTASVAPPRASPGGRAFRAVASGSGGRTTPESSSSSSPALPQLQPRRGLATRRAVLRNLISGGLESEDGKLSCGYSSFKGRRPTMEDRYDVKFAKMKGQSVSLFGVFDGHAGALAAEYLKEHLLDNLIEHPQFLRNPKLALKTTFLKTDADFLESVTTPYREDGSTALAAVLVGDQIYVANVGDSRAIALKGGKAIPLSDDHKPNLKDERTRIENAGGGVSYDGFTWRVDGILAMSRAFGNRSLKNYVIAEPDIQETQVSSDLEYLVLATDGLWDVVQNEDVISLMRATDEPEVAAVKLTEMAHSRHSSDNITCIVVGFHH

SEQ ID NO: 69268 - protein, 237 aa, Triticum aestivum
  peptide (1)..(237): Ceres Seq. ID no. 13595888
  misc_feature (1)..(228): Pfam Name: Protein phosphatase 2C Pfam Description: Protein phosphatase 2C
  misc_feature (1)..(235): Homolog of NCBI NO: 30693757 NR Description: protein phosphatase 2C (PP2C), putative
  misc_feature (1)..(235): Homolog of NCBI NO: 15238651 NR Description: protein phosphatase 2C (PP2C), putative
  misc_feature (1)..(235): Homolog of NCBI NO: 18416366 NR Description: protein phosphatase 2C (PP2C) -related
  misc_feature (1)..(237): Homolog of NCBI NO: 38345197 NR Description: OSJNBa0015K02.7 [Oryza sativa (japonica
  misc_feature (1)..(235): Homolog of NCBI NO: 30689144 NR Description: protein phosphatase 2C (PP2C), putative
  misc_feature (1)..(235): Homolog of NCBI NO: 20146110 NR Description: protein phosphatase 2C [Mesembryanthemum
  misc_feature (1)..(237): Homolog of NCBI NO: 34912708 NR Description: putative protein phosphatase 2C-like protein
  misc_feature (1)..(237): Homolog of NCBI NO: 9757995 NR Description: protein phosphatase 2C-like [Arabidopsis thaliana]
  misc_feature (1)..(237): Homolog of NCBI NO: 18086420 NR Description: AT5g53140/MFH8_8 [Arabidopsis thaliana]
  misc_feature (1)..(237): Homolog of NCBI NO: 18423476 NR Description: protein phosphatase 2C (PP2C), putative
MEDRYDVKFAKMKGQSVSLFGVFDGHAGALAAEYLKEHLLDNLIEHPQFLRNPKLALKTTFLKTDADFLESVTTPYREDGSTALAAVLVGDQIYVANVGDSRAIALKGGKAIPLSDDHKPNLKDERTRIENAGGGVSYDGFTWRVDGILAMSRAFGNRSLKNYVIAEPDIQETQVSSDLEYLVLATDGLWDVVQNEDVISLMRATDEPEVAAVKLTEMAHSRHSSDNITCIVVGFHH

SEQ ID NO: 69269 - DNA, 1258 bp, Triticum aestivum
  misc_feature (1)..(1258): Ceres Seq. ID no. 13596304
aaaaacaaccaagaaatctcacgacgcgtcctcctcccactcctctcctcccccctctcgccatggccggccgcctcctcgccgcccctctcctcctctttgtgctcctccagctccccgtgccgtcccaggtgcgcgcgtacccgctcgcggcggcacactctggtcggtgcccaaggccggaggagaggccgccgccgttcctccaggggctccggcgaacctgccgcacctcgacggaggggcacccggccgaggaggttaatggggaggaacttatcagagagttgggtggaaaggagtacactgctgtcctcttctatgcatcatggtgccctttctctcatagaatgagaccaatcttcgacgatcttagctcaatgtatccacatattaagcacttggctgtagaacagtccaacgtgatgccaacagttttatcaagatatggtgtccgcagccttccttctatactaatagctcatgagtcatatgcattttggcctcttgttgccaaagatctcaactcactggtcaacttctactctgctgttactggacaagaaccagttgcatatcttggtccacggaagtggatcacaaccgaaagaagcacacagtatgtgaagctttggaatggttcagtcagcgaatcagtgaagggcgagccctacctagcattcagcatcttctttatttgcctaagggtgttctcgttcttcttcccaaagttcttcgcctgcatcaaaggcttgtgggcccaatacttccggcacgccaactttggagtccttgccaaattgacgcagctgctcgaatgtgtgccccatgccgtggatgtaaggaagatgtggagcaaatggaggctcatggttggagccataaacatgagagtctgggcatcatctctagcttcggtgtctcttggtgggcaatcttctccccgagctgctagattggattgatggtttggattttaatgtcgggcgggagagcatgcgggctgtttgaattgcgctggatgtggaagctcctataactcacatgaacatgtagtgaaacatcttgtttgtagcatgtaaatcttagggatactgttgagcctgtgtagaccacactgtaacattaatcatgagtaccaattgtcatagtttttgagcaactgggcacacatcataagcccttttactatttttcacatgtaatctgcaattgcagtatgttcatctgtcttgtactaataagtgaaagacattcc

SEQ ID NO: 69270 - protein, 320 aa, Triticum aestivum
  peptide (1)..(320): Ceres Seq. ID no. 13596305
  misc_feature (141)..(316): Homolog of NCBI NO: 6006856 NR Description: unknown protein [Arabidopsis thaliana]
  misc_feature (57)..(185): Homolog of NCBI NO: 15236643 NR Description: protein disulfide isomerase -related [Arabidopsis
  misc_feature (71)..(202): Homolog of NCBI NO: 6006856 NR Description: unknown protein [Arabidopsis thaliana]
  misc_feature (48)..(313): Homolog of NCBI NO: 29367467 NR Description: disulfide isomerase-like protein
  misc_feature (100)..(313): Homolog of NCBI NO: 18399435 NR Description: expressed protein [Arabidopsis thaliana]
  misc_feature (67)..(316): Homolog of NCBI NO: 9758894 NR Description: contains similarity to protein disulfide
  misc_feature (63)..(317): Homolog of NCBI NO: 30103009 NR Description: unknown protein [Oryza sativa (japonica
  misc_feature (67)..(316): Homolog of NCBI NO: 21536613 NR Description: contains similarity to protein disulfide
  misc_feature (67)..(316): Homolog of NCBI NO: 18418521 NR Description: expressed protein [Arabidopsis thaliana]
  misc_feature (71)..(316): Homolog of NCBI NO: 18396691 NR Description: expressed protein [Arabidopsis thaliana]
KQPRNLTTRPPPTPLLPPLAMAGRLLAAPLLLFVLLQLPVPSQVRAYPLAAAHSGRCPRPEERPPPFLQGLRRTCRTSTEGHPAEEVNGEELIRELGGKEYTAVLFYASWCPFSHRMRPIFDDLSSMYPHIKHLAVEQSNVMPTVLSRYGVRSLPSILIAHESYAFWPLVAKDLNSLVNFYSAVTGQEPVAYLGPRKWITTERSTQYVKLWNGSVSESVKGEPYLAFSIFFICLRVFSFFFPKFFACIKGLWAQYFRHANFGVLAKLTQLLECVPHAVDVRKMWSKWRLMVGAINMRVWASSLASVSLGGQSSPRAARLD

SEQ ID NO: 69271 - protein, 300 aa, Triticum aestivum
  peptide (1)..(300): Ceres Seq. ID no. 13596306
  misc_feature (121)..(296): Homolog of NCBI NO: 6006856 NR Description: unknown protein [Arabidopsis thaliana]
  misc_feature (37)..(165): Homolog of NCBI NO: 15236643 NR Description: protein disulfide isomerase -related [Arabidopsis
  misc_feature (51)..(182): Homolog of NCBI NO: 6006856 NR Description: unknown protein [Arabidopsis thaliana]
  misc_feature (28)..(293): Homolog of NCBI NO: 29367467 NR Description: disulfide isomerase-like protein
  misc_feature (80)..(293): Homolog of NCBI NO: 18399435 NR Description: expressed protein [Arabidopsis thaliana]
  misc_feature (47)..(296): Homolog of NCBI NO: 9758894 NR Description: contains similarity to protein disulfide
  misc_feature (43)..(297): Homolog of NCBI NO: 30103009 NR Description: unknown protein [Oryza sativa (japonica
  misc_feature (47)..(296): Homolog of NCBI NO: 21536613 NR Description: contains similarity to protein disulfide
  misc_feature (47)..(296): Homolog of NCBI NO: 18418521 NR Description: expressed protein [Arabidopsis thaliana]
  misc_feature (51)..(296): Homolog of NCBI NO: 18396691 NR Description: expressed protein [Arabidopsis thaliana]
MAGRLLAAPLLLFVLLQLPVPSQVRAYPLAAAHSGRCPRPEERPPPFLQGLRRTCRTSTEGHPAEEVNGEELIRELGGKEYTAVLFYASWCPFSHRMRPIFDDLSSMYPHIKHLAVEQSNVMPTVLSRYGVRSLPSILIAHESYAFWPLVAKDLNSLVNFYSAVTGQEPVAYLGPRKWITTERSTQYVKLWNGSVSESVKGEPYLAFSIFFICLRVFSFFFPKFFACIKGLWAQYFRHANFGVLAKLTQLLECVPHAVDVRKMWSKWRLMVGAINMRVWASSLASVSLGGQSSPRAARLD

SEQ ID NO: 69272 - protein, 204 aa, Triticum aestivum
  peptide (1)..(204): Ceres Seq. ID no. 13596307
  misc_feature (25)..(200): Homolog of NCBI NO: 6006856 NR Description: unknown protein [Arabidopsis thaliana]
  misc_feature (1)..(69): Homolog of NCBI NO: 15236643 NR Description: protein disulfide isomerase -related [Arabidopsis
  misc_feature (1)..(86): Homolog of NCBI NO: 6006856 NR Description: unknown protein [Arabidopsis thaliana]
  misc_feature (1)..(197): Homolog of NCBI NO: 29367467 NR Description: disulfide isomerase-like protein
  misc_feature (1)..(197): Homolog of NCBI NO: 18399435 NR Description: expressed protein [Arabidopsis thaliana]
  misc_feature (1)..(200): Homolog of NCBI NO: 9758894 NR Description: contains similarity to protein disulfide
  misc_feature (1)..(201): Homolog of NCBI NO: 30103009 NR Description: unknown protein [Oryza sativa (japonica
  misc_feature (1)..(200): Homolog of NCBI NO: 21536613 NR Description: contains similarity to protein disulfide
  misc_feature (1)..(200): Homolog of NCBI NO: 18418521 NR Description: expressed protein [Arabidopsis thaliana]
  misc_feature (1)..(200): Homolog of NCBI NO: 18396691 NR Description: expressed protein [Arabidopsis thaliana]
MRPIFDDLSSMYPHIKHLAVEQSNVMPTVLSRYGVRSLPSILIAHESYAFWPLVAKDLNSLVNFYSAVTGQEPVAYLGPRKWITTERSTQYVKLWNGSVSESVKGEPYLAFSIFFICLRVFSFFFPKFFACIKGLWAQYFRHANFGVLAKLTQLLECVPHAVDVRKMWSKWRLMVGAINMRVWASSLASVSLGGQSSPRAARLD

SEQ ID NO: 69273 - DNA, 1541 bp, Triticum aestivum
  misc_feature (1)..(1541): Ceres Seq. ID no. 13595916
cttagactcgcctcgcctcccttctttgctcagtcttctcggatctccggctcaaattcgtctcccgaatccccagttccaggttctcggaggagggggggaaaccatgggcagcttcgccaagctggccaagaggtgcgtggagacggaggcgccggtcatggtgaagatacaagagctgcttcgaggggccacggatgtgatgtcgcttgcgcagggaattgtttattggcaacctcctgagacagccctgaacaaggtcaaggaaattgtatgggaaccagcaaccagtaaatatggtgctgatgatggccttcccgagcttcgagaagcacttctcgagaagcttcgcagagagaataagctaaccaagtcatctgttatggtgaccgctggtgcaaatcaggcttttgtaaacctggttctgaccctttgcgatgctggtgattcagttgtcatgttcgcaccatactatttcaattccttcatgtcattccagatgactggcgtcactgatatattagttggtgctagcaatcccaagactcttcatcctgatgttgattggttggagaaggtgctgaaagaaaataaccctatccctaaacttgttactgttgtcaatccgggaaacccatctggagcttttattcccaagcctatgctacagagaatttcagacctgtgcaggaatgctggtgcatggctggtggttgacaacacctatgagtacttcatgtatgataaaatggagcactactgcctagaggatgatcatattgtcaaccttttctcgttctcaaaggcttatggcatgatggggtggcgagtaggatacattgcatatccaagtgaagccgatggtttccacgcgcagctccttaaggtgcaagataacatacctatctgtgcttccatcatcgggcagcgcctggctctatactcattggaggccggcccagagtggatcagggaaagggtgaatgatctcgtgaaaaaccgcgagctgcttgtggaagcaatgtctccccttggtgaggatgctgtcaagggtggggagggtgccatctatctctgggctaaactaccagataactgttcagacgactttgaggttgtcaggtggctcgcgaccaagcacggcgtcgcagtgatccccgggagcgccagcggaggccccggatacatccgtgtttcttttggaggactgaaagaagaagacacaaggctcgccggcgagaggctaaggcggggattgcaagagctggtgaccgatgggatggtacagtaacaacagcccaccgtatgtaagacagtaagagtacatttctacattcagatcacacaagtccgattttttcgacgatatgattctgctgggattagttcattcagaggagcaaaagcaccatatatccaagtcttttgtatcttacagaatcaccatgctggaggtgcccaataggaatggcaattggtgtagtgagaattggggcaaaataaaaagccatccagtggtgtcgtaaacacaataaagtggg

SEQ ID NO: 69274 - protein, 429 aa, Triticum aestivum
  peptide (1)..(429): Ceres Seq. ID no. 15221689
  misc_feature (114)..(419): Pfam Name: Aminotransferase class I and II Pfam Description: Aminotransferase class I and II
  misc_feature (53)..(419): Homolog of NCBI NO: 15826454 NR Description: Chain A, Thermus Thermophilus Aspartate
  misc_feature (67)..(416): Homolog of NCBI NO: 39995195 NR Description: aminotransferase, classes I and II [Geobacter
  misc_feature (53)..(422): Homolog of NCBI NO: 15606968 NR Description: aspartate aminotransferase [Aquifex aeolicus]
  misc_feature (45)..(419): Homolog of NCBI NO: 34810106 NR Description: Chain A, Thermus Thermophilus Aspartate
  misc_feature (52)..(426): Homolog of NCBI NO: 33863300 NR Description: Aminotransferases class-I [Prochlorococcus
  misc_feature (50)..(422): Homolog of NCBI NO: 16331997 NR Description: aspartate aminotransferase [Synechocystis sp. PCC
  misc_feature (45)..(426): Homolog of NCBI NO: 17228534 NR Description: probable aspartate aminotransferase [Nostoc sp.
  misc_feature (42)..(423): Homolog of NCBI NO: 23123920 NR Description: hypothetical protein [Nostoc punctiforme]
  misc_feature (36)..(429): Homolog of NCBI NO: 15220119 NR Description: aminotransferase family [Arabidopsis thaliana]
  misc_feature (36)..(429): Homolog of NCBI NO: 34906130 NR Description: putative aspartate transaminase
LDSPRLPSLLSLLGSPAQIRLPNPQFQVLGGGGETMGSFAKLAKRCVETEAPVMVKIQELLRGATDVMSLAQGIVYWQPPETALNKVKEIVWEPATSKYGADDGLPELREALLEKLRRENKLTKSSVMVTAGANQAFVNLVLTLCDAGDSVVMFAPYYFNSFMSFQMTGVTDILVGASNPKTLHPDVDWLEKVLKENNPIPKLVTVVNPGNPSGAFIPKPMLQRISDLCRNAGAWLVVDNTYEYFMYDKMEHYCLEDDHIVNLFSFSKAYGMMGWRVGYIAYPSEADGFHAQLLKVQDNIPICASIIGQRLALYSLEAGPEWIRERVNDLVKNRELLVEAMSPLGEDAVKGGEGAIYLWAKLPDNCSDDFEVVRWLATKHGVAVIPGSASGGPGYIRVSFGGLKEEDTRLAGERLRRGLQELVTDGMVQ

SEQ ID NO: 69275 - protein, 394 aa, Triticum aestivum
  peptide (1)..(394): Ceres Seq. ID no. 15221690
  misc_feature (79)..(384): Pfam Name: Aminotransferase class I and II Pfam Description: Aminotransferase class I and II
  misc_feature (18)..(384): Homolog of NCBI NO: 15826454 NR Description: Chain A, Thermus Thermophilus Aspartate
  misc_feature (32)..(381): Homolog of NCBI NO: 39995195 NR Description: aminotransferase, classes I and II [Geobacter
  misc_feature (18)..(387): Homolog of NCBI NO: 15606968 NR Description: aspartate aminotransferase [Aquifex aeolicus]
  misc_feature (10)..(384): Homolog of NCBI NO: 34810106 NR Description: Chain A, Thermus Thermophilus Aspartate
  misc_feature (17)..(391): Homolog of NCBI NO: 33863300 NR Description: Aminotransferases class-I [Prochlorococcus
  misc_feature (15)..(387): Homolog of NCBI NO: 16331997 NR Description: aspartate aminotransferase [Synechocystis sp. PCC
  misc_feature (10)..(391): Homolog of NCBI NO: 17228534 NR Description: probable aspartate aminotransferase [Nostoc sp.
  misc_feature (7)..(388): Homolog of NCBI NO: 23123920 NR Description: hypothetical protein [Nostoc punctiforme]
  misc_feature (1)..(394): Homolog of NCBI NO: 15220119 NR Description: aminotransferase family [Arabidopsis thaliana]
  misc_feature (1)..(394): Homolog of NCBI NO: 34906130 NR Description: putative aspartate transaminase
MGSFAKLAKRCVETEAPVMVKIQELLRGATDVMSLAQGIVYWQPPETALNKVKEIVWEPATSKYGADDGLPELREALLEKLRRENKLTKSSVMVTAGANQAFVNLVLTLCDAGDSVVMFAPYYFNSFMSFQMTGVTDILVGASNPKTLHPDVDWLEKVLKENNPIPKLVTVVNPGNPSGAFIPKPMLQRISDLCRNAGAWLVVDNTYEYFMYDKMEHYCLEDDHIVNLFSFSKAYGMMGWRVGYIAYPSEADGFHAQLLKVQDNIPICASIIGQRLALYSLEAGPEWIRERVNDLVKNRELLVEAMSPLGEDAVKGGEGAIYLWAKLPDNCSDDFEVVRWLATKHGVAVIPGSASGGPGYIRVSFGGLKEEDTRLAGERLRRGLQELVTDGMVQ

SEQ ID NO: 69276 - protein, 376 aa, Triticum aestivum
  peptide (1)..(376): Ceres Seq. ID no. 15221691
  misc_feature (61)..(366): Pfam Name: Aminotransferase class I and II Pfam Description: Aminotransferase class I and II
  misc_feature (1)..(366): Homolog of NCBI NO: 15826454 NR Description: Chain A, Thermus Thermophilus Aspartate
  misc_feature (14)..(363): Homolog of NCBI NO: 39995195 NR Description: aminotransferase, classes I and II [Geobacter
  misc_feature (1)..(369): Homolog of NCBI NO: 15606968 NR Description: aspartate aminotransferase [Aquifex aeolicus]
  misc_feature (1)..(366): Homolog of NCBI NO: 34810106 NR Description: Chain A, Thermus Thermophilus Aspartate
  misc_feature (1)..(373): Homolog of NCBI NO: 33863300 NR Description: Aminotransferases class-I [Prochlorococcus
  misc_feature (1)..(369): Homolog of NCBI NO: 16331997 NR Description: aspartate aminotransferase [Synechocystis sp. PCC
  misc_feature (1)..(373): Homolog of NCBI NO: 17228534 NR Description: probable aspartate aminotransferase [Nostoc sp.
  misc_feature (1)..(370): Homolog of NCBI NO: 23123920 NR Description: hypothetical protein [Nostoc punctiforme]
  misc_feature (1)..(376): Homolog of NCBI NO: 15220119 NR Description: aminotransferase family [Arabidopsis thaliana]
  misc_feature (1)..(376): Homolog of NCBI NO: 34906130 NR Description: putative aspartate transaminase
MVKIQELLRGATDVMSLAQGIVYWQPPETALNKVKEIVWEPATSKYGADDGLPELREALLEKLRRENKLTKSSVMVTAGANQAFVNLVLTLCDAGDSVVMFAPYYFNSFMSFQMTGVTDILVGASNPKTLHPDVDWLEKVLKENNPIPKLVTVVNPGNPSGAFIPKPMLQRISDLCRNAGAWLVVDNTYEYFMYDKMEHYCLEDDHIVNLFSFSKAYGMMGWRVGYIAYPSEADGFHAQLLKVQDNIPICASIIGQRLALYSLEAGPEWIRERVNDLVKNRELLVEAMSPLGEDAVKGGEGAIYLWAKLPDNCSDDFEVVRWLATKHGVAVIPGSASGGPGYIRVSFGGLKEEDTRLAGERLRRGLQELVTDGMVQ

SEQ ID NO: 69277 - DNA, 1960 bp, Triticum aestivum
  misc_feature (1)..(1960): Ceres Seq. ID no. 14301920
ataccaagtgaggaagaaaaacgacaccaaattatacgagcatctccatctcctctcccctcgcgcaaagggaggagggagaggccatccactccacggcgccgatcgatcggagcagcggagaggacggcgcgcgcgtcggcgatgcggaagggcccgtcgcggtcggggtcggcgcggcaccagcagttccgcgcccgtgccaagacccgcgtcgacgacctccaggacatgttctccggcctccagtacgcccgcaaggaggcccgctccaccgacgccgtcctcctcgaggcccagctccaccagatgctccgcgagtggcgcgccgagctcagcgtcccgtcccccgcctcctccctccaggcagggaacaacaaccgggacccgtcggatccgccgtccgagacaccgcggccgccgcagctggcgccggccgaggaggaggacgacgccaccagcaagctcgtcgagcagaagccccggccgtccgctaatcagactcacaagcacccgcggggagaccaggacatgaagccggagccgcgcgaggaagcgatcgcgcatccagtgacggtggcgcagcagccgccgtcgctgggtccgggagtcatcaccactccagctagtgccgggttccacgatcagatgtactatgtgaaccaggagcttagtgttgaggattttctttacgacgatgattacaagataaaccttcctgggtccaatccagaaatcctcaataaccttgaagggattggtcatcaagaatatctgcagttcaatttgccacaagagttgccccctaatgcatatcttgatatgaacaactatgggcagaatgctgnagatggtttcctccacatgtcagacttgctcacaacaatgtctccagcacctgcttcatttctgaggccaaagtgcgctctctgggactgccctcgtcctgctcaaggatctgaaagctggcaagattactgcagcatgtaccatgctgaattggccgtgaaggaagagggccctccaggcacaatgcctgtgatccgcccgagaggtattgatctaaaagatggccctttgtttgctgctcttagtgcgaaaatccaaggaaagcatgtcggtgttcctgtctgtgaaggggctgcaactacgaagtccccttggaatgcacctgaacttttcgacctttacatctttgaaggtgaatctatgagagaatggcttttctttgacaaaccaagaagggcattcgacagtggaaaccggaagcaaaggtcactgccagattacaacggccgtggctggcatgaatcaaggaagcaggtgatgaaagactttgggggtctaaagaggtcatactacatggatccacagccatccagcagctacgaatggcacctctatgagtacgagatcaatgaccgcgacgcttttgccttataccggctcgaattcaagtcttcggaagcaaagaagagtgctaagtcaaaattcacttgcagtccactgattgaaatccagcagcaaatggtcaggctgagcgcagacggtcacgtggagaacaagcggactgcccgtgtgcggacacaggatgtcagcacaaacatctacccggttcagaacaacacggctcaggccagtgctccggacgcttaccaggcagcgtcgcaggtggaccagatgacgtttttgaacggcagtgttgtttatgggcctcatctcccatatggctactcgaccgaaggaggtgacttctattggaactcaaatgacggggcttgataaaaccatcttcgacttgtggcatattttcggcttcaagttctaaccgtatcagctgtaattaaggggtctactttattggcaatggcctccataatttctattgggaatggcctccgtgattctaactgtaatggttgggccaaatttaaatttacaggaaacgtctctttgaggc

SEQ ID NO: 69278 - protein, 593 aa, Triticum aestivum
  peptide (1)..(593): Ceres Seq. ID no. 14301921
  misc_feature (71)..(273): Homolog of NCBI NO: 18405962 NR Description: expressed protein [Arabidopsis thaliana]
  misc_feature (392)..(524): Homolog of NCBI NO: 6691215 NR Description: F1K23.24 [Arabidopsis thaliana]
  misc_feature (148)..(510): Homolog of NCBI NO: 18405962 NR Description: expressed protein [Arabidopsis thaliana]
  misc_feature (71)..(510): Homolog of NCBI NO: 25370817 NR Description: hypothetical protein At2g42400 [imported] -
  misc_feature (50)..(164): Homolog of NCBI NO: 15218694 NR Description: expressed protein [Arabidopsis thaliana]
  misc_feature (248)..(524): Homolog of NCBI NO: 15218694 NR Description: expressed protein [Arabidopsis thaliana]
  misc_feature (53)..(593): Homolog of NCBI NO: 34909602 NR Description: P0435B05.21 [Oryza sativa (japonica
  misc_feature (283)..(283): Xaa is any aa, unknown or other
IPSEEEKRHQIIRASPSPLPSRKGRRERPSTPRRRSIGAAERTARASAMRKGPSRSGSARHQQFRARAKTRVDDLQDMFSGLQYARKEARSTDAVLLEAQLHQMLREWRAELSVPSPASSLQAGNNNRDPSDPPSETPRPPQLAPAEEEDDATSKLVEQKPRPSANQTHKHPRGDQDMKPEPREEAIAHPVTVAQQPPSLGPGVITTPASAGFHDQMYYVNQELSVEDFLYDDDYKINLPGSNPEILNNLEGIGHQEYLQFNLPQELPPNAYLDMNNYGQNAXDGFLHMSDLLTTMSPAPASFLRPKCALWDCPRPAQGSESWQDYCSMYHAELAVKEEGPPGTMPVIRPRGIDLKDGPLFAALSAKIQGKHVGVPVCEGAATTKSPWNAPELFDLYIFEGESMREWLFFDKPRRAFDSGNRKQRSLPDYNGRGWHESRKQVMKDFGGLKRSYYMDPQPSSSYEWHLYEYEINDRDAFALYRLEFKSSEAKKSAKSKFTCSPLIEIQQQMVRLSADGHVENKRTARVRTQDVSTNIYPVQNNTAQASAPDAYQAASQVDQMTFLNGSVVYGPHLPYGYSTEGGDFYWNSNDGA

SEQ ID NO: 69279 - protein, 545 aa, Triticum aestivum
  peptide (1)..(545): Ceres Seq. ID no. 14301922
  misc_feature (23)..(225): Homolog of NCBI NO: 18405962 NR Description: expressed protein [Arabidopsis thaliana]
  misc_feature (344)..(476): Homolog of NCBI NO: 6691215 NR Description: F1K23.24 [Arabidopsis thaliana]
  misc_feature (100)..(462): Homolog of NCBI NO: 18405962 NR Description: expressed protein [Arabidopsis thaliana]
  misc_feature (23)..(462): Homolog of NCBI NO: 25370817 NR Description: hypothetical protein At2g42400 [imported] -
  misc_feature (2)..(116): Homolog of NCBI NO: 15218694 NR Description: expressed protein [Arabidopsis thaliana]
  misc_feature (200)..(476): Homolog of NCBI NO: 15218694 NR Description: expressed protein [Arabidopsis thaliana]
  misc_feature (5)..(545): Homolog of NCBI NO: 34909602 NR Description: P0435B05.21 [Oryza sativa (japonica
  misc_feature (235)..(235): Xaa is any aa, unknown or other
MRKGPSRSGSARHQQFRARAKTRVDDLQDMFSGLQYARKEARSTDAVLLEAQLHQMLREWRAELSVPSPASSLQAGNNNRDPSDPPSETPRPPQLAPAEEEDDATSKLVEQKPRPSANQTHKHPRGDQDMKPEPREEAIAHPVTVAQQPPSLGPGVITTPASAGFHDQMYYVNQELSVEDFLYDDDYKINLPGSNPEILNNLEGIGHQEYLQFNLPQELPPNAYLDMNNYGQNAXDGFLHMSDLLTTMSPAPASFLRPKCALWDCPRPAQGSESWQDYCSMYHAELAVKEEGPPGTMPVIRPRGIDLKDGPLFAALSAKIQGKHVGVPVCEGAATTKSPWNAPELFDLYIFEGESMREWLFFDKPRRAFDSGNRKQRSLPDYNGRGWHESRKQVMKDFGGLKRSYYMDPQPSSSYEWHLYEYEINDRDAFALYRLEFKSSEAKKSAKSKFTCSPLIEIQQQMVRLSADGHVENKRTARVRTQDVSTNIYPVQNNTAQASAPDAYQAASQVDQMTFLNGSVVYGPHLPYGYSTEGGDFYWNSNDGA

SEQ ID NO: 69280 - protein, 516 aa, Triticum aestivum
  peptide (1)..(516): Ceres Seq. ID no. 14301923
  misc_feature (1)..(196): Homolog of NCBI NO: 18405962 NR Description: expressed protein [Arabidopsis thaliana]
  misc_feature (315)..(447): Homolog of NCBI NO: 6691215 NR Description: F1K23.24 [Arabidopsis thaliana]
  misc_feature (71)..(433): Homolog of NCBI NO: 18405962 NR Description: expressed protein [Arabidopsis thaliana]
  misc_feature (1)..(433): Homolog of NCBI NO: 25370817 NR Description: hypothetical protein At2g42400 [imported] -
  misc_feature (1)..(87): Homolog of NCBI NO: 15218694 NR Description: expressed protein [Arabidopsis thaliana]
  misc_feature (171)..(447): Homolog of NCBI NO: 15218694 NR Description: expressed protein [Arabidopsis thaliana]
  misc_feature (1)..(516): Homolog of NCBI NO: 34909602 NR Description: P0435B05.21 [Oryza sativa (japonica
  misc_feature (206)..(206): Xaa is any aa, unknown or other
MFSGLQYARKEARSTDAVLLEAQLHQMLREWRAELSVPSPASSLQAGNNNRDPSDPPSETPRPPQLAPAEEEDDATSKLVEQKPRPSANQTHKHPRGDQDMKPEPREEAIAHPVTVAQQPPSLGPGVITTPASAGFHDQMYYVNQELSVEDFLYDDDYKINLPGSNPEILNNLEGIGHQEYLQFNLPQELPPNAYLDMNNYGQNAXDGFLHMSDLLTTMSPAPASFLRPKCALWDCPRPAQGSESWQDYCSMYHAELAVKEEGPPGTMPVIRPRGIDLKDGPLFAALSAKIQGKHVGVPVCEGAATTKSPWNAPELFDLYIFEGESMREWLFFDKPRRAFDSGNRKQRSLPDYNGRGWHESRKQVMKDFGGLKRSYYMDPQPSSSYEWHLYEYEINDRDAFALYRLEFKSSEAKKSAKSKFTCSPLIEIQQQMVRLSADGHVENKRTARVRTQDVSTNIYPVQNNTAQASAPDAYQAASQVDQMTFLNGSVVYGPHLPYGYSTEGGDFYWNSNDGA

SEQ ID NO: 69281 - DNA, 1482 bp, Triticum aestivum
  misc_feature (1)..(1482): Ceres Seq. ID no. 14301916
gagagagagatgaaggtctgtaccctcgcttaaacactctcgcctacccggctcgaccccccctcccatcttctccttcgccaagaacaccaccgcagccaccacgatcgatctcgtgctcgtgcgcggtgcgctggagcggcggctggggtgggcggtggccgccatgatcccgtgaaggaggaggggaggggatagataggtggctgtgtgacaaaggggccggatcgatgtacaagaaccagctgcaggagctggcgcagaggagctgcttcagcctgccgtcgtacgtgtgcacgcgggaggggcccgaccatgcgccccgcttcaaggccaccgtcaccttcaacggcgagaccttccacgggcccacctgctgcaccacgctccgccaggccgagcacgccgccgccgaggtcgcgctcgcccgcctctccacccgcgggccatccacctacctcaccgccagagtcctcgacgagaccggggtgtacaagaacctgctgcaggagacagcgcaccgggcggggctgaagctgccggcctacaccaccgtgcgctccggcccgggccactcgccggtcttcgcctccagcgtggagctcgctggcctcagcttcgccggcgacgccgccaggaccaagaagcaggcggagaagaacgctgccatgaccgcctggtccgcccttaagcagatgccggaggcgcgcaaggagcccggcaacggctgtgtcggcgaggagcaggagcactggtcgtagccagagtgctcgccgccctgaagcagcgctgcgatgtcaatgcggcgtcgcccttaccgaagcagcactgcctcgccggctcttcttcgtcctctgctccgaacccgtcgctctacagccaccaatggctgcctctgagctcccatgctgcacagcccaggacgcgccacgtgcagccgcagccggccggccccaggatactgcctccgctgcacatgctgcagcgaccggcgccgtccacctcccgtcacggcggcgagctggagcggcagaggaggatcgatgcggccgagctggtgcagatgctggagagggccatggtgacgaacagagaagaggcaatgccgtcggcgccgtgctactacccgcacgtcccggcgtaccaccacgccggcgcggcgccaagatacttcgccgcgggcggattccactcgccggcgatggcagtgagcgtgcggtcggtgatcccgatgtgctccgcgccgccttcgccgccgcagccggccgcggccaccaaggatgaccatgatgatgaccggaacgacccggcagcacctgcagagcactaggcggcgaggcgtgagctcgcggctgccaggttttgaagatcaagaagacgaggaaagattccgaggttcagtagctatatgatgagatcagtctggttgtagaagggaattttgatcgcaagttcctctgtctaagcttgtgtaagtgaccg

SEQ ID NO: 69282 - protein, 176 aa, Triticum aestivum
  peptide (1)..(176): Ceres Seq. ID no. 14301917
  misc_feature (2)..(68): Pfam Name: Double-stranded RNA binding motif Pfam Description: Double-stranded RNA binding motif
  misc_feature (1)..(165): Homolog of NCBI NO: 8346542 NR Description: BcpLH protein [Brassica rapa]
  misc_feature (1)..(154): Homolog of NCBI NO: 22331912 NR Description: expressed protein [Arabidopsis thaliana]
  misc_feature (1)..(154): Homolog of NCBI NO: 18389232 NR Description: unknown protein [Arabidopsis thaliana]
  misc_feature (1)..(173): Homolog of NCBI NO: 37535422 NR Description: putative extensin [Oryza sativa (japonica
  misc_feature (1)..(158): Homolog of NCBI NO: 9759153 NR Description: gb|AAD20688.1~gene_id:MEE6.14~similar to unknown
  misc_feature (1)..(156): Homolog of NCBI NO: 30693732 NR Description: expressed protein [Arabidopsis thaliana]
  misc_feature (1)..(156): Homolog of NCBI NO: 18401724 NR Description: expressed protein [Arabidopsis thaliana]
  misc_feature (1)..(176): Homolog of NCBI NO: 40788412 NR Description: hypothetical protein [Oryza sativa (japonica
  misc_feature (1)..(176): Homolog of NCBI NO: 15231653 NR Description: hypothetical protein [Arabidopsis thaliana]
  misc_feature (1)..(176): Homolog of NCBI NO: 11994159 NR Description: gb|AAD20688.1~gene_id:MQP17.5~similar to unknown
MYKNQLQELAQRSCFSLPSYVCTREGPDHAPRFKATVTFNGETFHGPTCCTTLRQAEHAAAEVALARLSTRGPSTYLTARVLDETGVYKNLLQETAHRAGLKLPAYTTVRSGPGHSPVFASSVELAGLSFAGDAARTKKQAEKNAAMTAWSALKQMPEARKEPGNGCVGEEQEHWS

SEQ ID NO: 69283 - protein, 132 aa, Triticum aestivum
  peptide (1)..(132): Ceres Seq. ID no. 14301918
  misc_feature (1)..(87): Homolog of NCBI NO: 30984464 NR Description: very large tegument protein [Cercopithecine
  misc_feature (1)..(88): Homolog of NCBI NO: 22962211 NR Description: hypothetical protein [Rhodopseudomonas palustris]
  misc_feature (1)..(56): Homolog of NCBI NO: 25143299 NR Description: pre-mRNA splicing SR protein related (68.2 kD)
  misc_feature (1)..(69): Homolog of NCBI NO: 28493118 NR Description: unknown [Tropheryma whipplei str. Twist]
  misc_feature (1)..(126): Homolog of NCBI NO: 31414574 NR Description: large tegument protein [Cercopithecine
  misc_feature (1)..(33): Homolog of NCBI NO: 25408026 NR Description: probable proline-rich protein [imported] -
  misc_feature (1)..(33): Homolog of NCBI NO: 30684163 NR Description: proline-rich protein -related [Arabidopsis
  misc_feature (1)..(33): Homolog of NCBI NO: 9843651 NR Description: SRM102 [Arabidopsis thaliana]
  misc_feature (1)..(123): Homolog of NCBI NO: 27375632 NR Description: blr0521 [Bradyrhizobium japonicum]
  misc_feature (1)..(126): Homolog of NCBI NO: 40788412 NR Description: hypothetical protein [Oryza sativa (japonica
MAASELPCCTAQDAPRAAAAGRPQDTASAAHAAATGAVHLPSRRRAGAAEEDRCGRAGADAGEGHGDEQRRGNAVGAVLLPARPGVPPRRRGAKILRRGRIPLAGDGSERAVGDPDVLRAAFAAAAGRGHQG

SEQ ID NO: 69284 - protein, 117 aa, Triticum aestivum
  peptide (1)..(117): Ceres Seq. ID no. 14301919
  misc_feature (75)..(96): Homolog of NCBI NO: 15231653 NR Description: hypothetical protein [Arabidopsis thaliana]
  misc_feature (75)..(96): Homolog of NCBI NO: 11994159 NR Description: gb|AAD20688.1~gene_id:MQP17.5~similar to unknown
MLQRPAPSTSRHGGELERQRRIDAAELVQMLERAMVTNREEAMPSAPCYYPHVPAYHHAGAAPRYFAAGGFHSPAMAVSVRSVIPMCSAPPSPPQPAAATKDDHDDDRNDPAAPAEH

SEQ ID NO: 69285 - DNA, 1143 bp, Triticum aestivum
  misc_feature (1)..(1143): Ceres Seq. ID no. 15227260
gaacctcaccaaaaaaaaagcccgcaccacctctcctcccccgccgccaccgccggcaaccaccggatccggagaagaaagaggcagcgcccggcgaagcgaagcgggggaagagatggtgggcactccgtcctcgccggtggtgaacgtgtacccgctcgccaactacacgttcggcaccaaggaggccaagatggagaaggacacctccgtcgccgaccgcctcgctcgcatgaaggtcaactacatgaaagaaggaatgcgaacaagtgttgaagcaatcctattggtgcaagagcacaaccacccccacatactgttgttgcaaattggaaacacattttgcaaacttcccggtggacggttgaagcctggagaaagtgaaattgagggcctgaaaaggaagctgtgcagcaagcttgcagttaactcaccttcctttccacctaactggcaggttggagagtgtgttgctgaatggtggaggccaaactttgaaaccgtgatgtatccttactgccctccacatataacaaagcccaaggagtgcaagaagcttttcattgttcacctaactgaaagggagtatttcgctgttccaaggaacttgaagctacttgctgttccactgtttgaactatatgacaatgttcagcggtacggaccagtgatttccaccatcccgcagcagctgtccaggttccagttcaacatggtgagctcgtaatcaatggtggcgatgagatgcgaggattagtcgagtataagatgtactgagatggatcttggacgaagcaccaaactactagatgctgatcaacttagcatgactcgttatttagtcgccgattttcataaactagatgctcattccgactgccttttatttggcgacgcgtgctgttaatgaagctcaggctggttagatacgtggtgtattattgtttggatggtaatcggttgttcctccggtgcggtgcggtgcgctaatctgttcctgtgtacgtactgtaggcgatggccggagatgtatgcctgtaacgtacgtacgtaggcgatgtatgcctgtaattgctatggtctgctgtagtactagtggctacggtgcatgggttcgtcgtcactgacgctatgcattttagg

SEQ ID NO: 69286 - protein, 241 aa, Triticum aestivum
  peptide (1)..(241): Ceres Seq. ID no. 15227261
  misc_feature (88)..(214): Pfam Name: NUDIX domain Pfam Description: NUDIX domain
  misc_feature (48)..(239): Homolog of NCBI NO: 32421925 NR Description: hypothetical protein [Neurospora crassa]
  misc_feature (45)..(185): Homolog of NCBI NO: 25354611 NR Description: hypothetical protein AT4g25550 [imported] -
  misc_feature (48)..(236): Homolog of NCBI NO: 13386106 NR Description: cleavage and polyadenylation specific factor 5
  misc_feature (45)..(185): Homolog of NCBI NO: 7486820 NR Description: hypothetical protein M7J2.80 - Arabidopsis
  misc_feature (17)..(236): Homolog of NCBI NO: 31873228 NR Description: hypothetical protein [Homo sapiens]
  misc_feature (17)..(236): Homolog of NCBI NO: 5901926 NR Description: cleavage and polyadenylation specific factor 5,
  misc_feature (47)..(239): Homolog of NCBI NO: 18417474 NR Description: mRNA cleavage factor subunit - like protein
  misc_feature (17)..(236): Homolog of NCBI NO: 31418817 NR Description: Unknown (protein for MGC:63966) [Danio rerio]
  misc_feature (45)..(241): Homolog of NCBI NO: 30686923 NR Description: expressed protein [Arabidopsis thaliana]
  misc_feature (39)..(241): Homolog of NCBI NO: 32488646 NR Description: OSJNBa0032F06.22 [Oryza sativa (japonica
NLTKKKARTTSPPPPPPPATTGSGEERGSARRSEAGEEMVGTPSSPVVNVYPLANYTFGTKEAKMEKDTSVADRLARMKVNYMKEGMRTSVEAILLVQEHNHPHILLLQIGNTFCKLPGGRLKPGESEIEGLKRKLCSKLAVNSPSFPPNWQVGECVAEWWRPNFETVMYPYCPPHITKPKECKKLFIVHLTEREYFAVPRNLKLLAVPLFELYDNVQRYGPVISTIPQQLSRFQFNMVSS

SEQ ID NO: 69287 - protein, 203 aa, Triticum aestivum
  peptide (1)..(203): Ceres Seq. ID no. 15227262
  misc_feature (50)..(176): Pfam Name: NUDIX domain Pfam Description: NUDIX domain
  misc_feature (10)..(201): Homolog of NCBI NO: 32421925 NR Description: hypothetical protein [Neurospora crassa]
  misc_feature (7)..(147): Homolog of NCBI NO: 25354611 NR Description: hypothetical protein AT4g25550 [imported] -
  misc_feature (10)..(198): Homolog of NCBI NO: 13386106 NR Description: cleavage and polyadenylation specific factor 5
  misc_feature (7)..(147): Homolog of NCBI NO: 7486820 NR Description: hypothetical protein M7J2.80 - Arabidopsis
  misc_feature (1)..(198): Homolog of NCBI NO: 31873228 NR Description: hypothetical protein [Homo sapiens]
  misc_feature (1)..(198): Homolog of NCBI NO: 5901926 NR Description: cleavage and polyadenylation specific factor 5,
  misc_feature (9)..(201): Homolog of NCBI NO: 18417474 NR Description: mRNA cleavage factor subunit - like protein
  misc_feature (1)..(198): Homolog of NCBI NO: 31418817 NR Description: Unknown (protein for MGC:63966) [Danio rerio]
  misc_feature (7)..(203): Homolog of NCBI NO: 30686923 NR Description: expressed protein [Arabidopsis thaliana]
  misc_feature (1)..(203): Homolog of NCBI NO: 32488646 NR Description: OSJNBa0032F06.22 [Oryza sativa (japonica
MVGTPSSPVVNVYPLANYTFGTKEAKMEKDTSVADRLARMKVNYMKEGMRTSVEAILLVQEHNHPHILLLQIGNTFCKLPGGRLKPGESEIEGLKRKLCSKLAVNSPSFPPNWQVGECVAEWWRPNFETVMYPYCPPHITKPKECKKLFIVHLTEREYFAVPRNLKLLAVPLFELYDNVQRYGPVISTIPQQLSRFQFNMVSS

SEQ ID NO: 69288 - protein, 177 aa, Triticum aestivum
  peptide (1)..(177): Ceres Seq. ID no. 15227263
  misc_feature (24)..(150): Pfam Name: NUDIX domain Pfam Description: NUDIX domain
  misc_feature (1)..(175): Homolog of NCBI NO: 32421925 NR Description: hypothetical protein [Neurospora crassa]
  misc_feature (1)..(121): Homolog of NCBI NO: 25354611 NR Description: hypothetical protein AT4g25550 [imported] -
  misc_feature (1)..(172): Homolog of NCBI NO: 13386106 NR Description: cleavage and polyadenylation specific factor 5
  misc_feature (1)..(121): Homolog of NCBI NO: 7486820 NR Description: hypothetical protein M7J2.80 - Arabidopsis
  misc_feature (1)..(172): Homolog of NCBI NO: 31873228 NR Description: hypothetical protein [Homo sapiens]
  misc_feature (1)..(172): Homolog of NCBI NO: 5901926 NR Description: cleavage and polyadenylation specific factor 5,
  misc_feature (1)..(175): Homolog of NCBI NO: 18417474 NR Description: mRNA cleavage factor subunit - like protein
  misc_feature (1)..(172): Homolog of NCBI NO: 31418817 NR Description: Unknown (protein for MGC:63966) [Danio rerio]
  misc_feature (1)..(177): Homolog of NCBI NO: 30686923 NR Description: expressed protein [Arabidopsis thaliana]
  misc_feature (1)..(177): Homolog of NCBI NO: 32488646 NR Description: OSJNBa0032F06.22 [Oryza sativa (japonica
MEKDTSVADRLARMKVNYMKEGMRTSVEAILLVQEHNHPHILLLQIGNTFCKLPGGRLKPGESEIEGLKRKLCSKLAVNSPSFPPNWQVGECVAEWWRPNFETVMYPYCPPHITKPKECKKLFIVHLTEREYFAVPRNLKLLAVPLFELYDNVQRYGPVISTIPQQLSRFQFNMVSS

SEQ ID NO: 69289 - DNA, 1993 bp, Triticum aestivum
  misc_feature (1)..(1993): Ceres Seq. ID no. 13595900
gctcaaaccctagctaccaatccccgcaattcctcccctggcccaggttcctccgtagctggatgcccccaacctaggcggcggctcggtggcgtgtgtgcgtgcgcggccgccgatggagccgcgcgtgggtaacaagtaccgcctcggccgcaagctcggcagcggctcgttcggggagatctacctcggtactaacgtgcagaccaacgaggaggtcgcgattaagcttgaaaatgtgaagacaaagcatcctcagttgctgtatgagtcaaagttgtacagagtactgcagggcggaactgggatttcaaatgtcaagtggtttggtgttgagggtgactacaatgttcttgttatggatgtgttggggccaagccttgaagatcttttcagcttttgcaacagaaaactgtcgctcaaaactgttctgatgcttgctgatcaaatgatcaaccgagttgaatttatacattcaaagtccttcttgcatcgagatataaagccagacaattttctcatgggccttggaaagagagcaaatcaggtatatatgattgactttggactggcaaagaaatatagggacacgtcaacgcaccagcacattccataccgggagaacaaaaatttgactgggacagctcgatatgcgagtgtaagcacccatctcggaattgaacaaagcagaagggatgacatggagtctcttggatatgtactcatgtacttcttgagaggaagtctcccatggcagggtttaaaagccggtacgaagaaacaaaagtatgagaaaatcagcgaacggaagattgccacttcaattgaggctttgtgtcgtggatacccttctgaatttcagtcattcttccattactgccgcgcactgcgttttgaagacagtccagactatcaatacctgaagagattgttcagagatctttttattcgagagggattccagtttgattatgtttttgactggaccattcttaaataccagcagtcacaaatgaccagtgctccaccacgtgctattgccgctgctgcaggacaaagctcggggatggctccaattgcaagtaataatagactgtcagccaccgaagagggaagaagtgggtggtcagatgatcctacacgacgtcaagttccacctacaggaataaatgcaggcagcttagcgaaacagaagtcaccagttagaccagatgtgtccgcaccaaaggaagctgtgttgtccagttcgacttttttgggtcggtcaggcgtgtcctcaaggcgacctgctgtttgtagtagccgagatttgccaagcagtgaggctgaaccatcgcgtagtcgtgcaccagacgtgagtccagggacgttccagagaaactcagccccacggaggacctcacagacgcttgactactctgaccccaggcacaagtctaacagcaacaactacgagtccactataaggggcatccggggcctaaatttcaatgccaacgataggatccactactagtatcttctggatcctaaaaagcatgtataatatgtgatctgctgaagttaaagtggggagtgaggccatactttccgagctactctcctaccatagtaccatgtgatccacaagctacgtgctggagcggtgaggcagtttactgacgcaaagaaacgggggctggctggcaaaataaagggtctgcgacagccatggccctaaaatagcacgttgggcctatgttttagcctctctgtacaggttttcttttgtgcgttgagatgttgctttcgtacttttcacataatattatgttttaagatatttaccttactgtcatgtctagtatgtttacattggaatgccttgttggcttgagcaggtaaaaaaaaaaaaaaaaaaaaaaaaaaaaaaaaaaaaaaaaaaaaaaaaaagaaaaaaaaaaaaaaaaaagcttatcgataccgtcgacctcgagggggggcccggtaccca

SEQ ID NO: 69290 - protein, 466 aa, Triticum aestivum
  peptide (1)..(466): Ceres Seq. ID no. 13595901
  misc_feature (1)..(410): Homolog of NCBI NO: 15240091 NR Description: casein kinase, putative [Arabidopsis thaliana]
  misc_feature (1)..(454): Homolog of NCBI NO: 30678728 NR Description: protein kinase (ADK1) [Arabidopsis thaliana]
  misc_feature (1)..(398): Homolog of NCBI NO: 15224781 NR Description: casein kinase, putative [Arabidopsis thaliana]
  misc_feature (40)..(458): Homolog of NCBI NO: 6635385 NR Description: casein kinase I-like protein [Brassica oleracea]
  misc_feature (1)..(384): Homolog of NCBI NO: 549973 NR Description: casein kinase I-like protein
  misc_feature (1)..(427): Homolog of NCBI NO: 22327902 NR Description: casein kinase, putative [Arabidopsis thaliana]
  misc_feature (1)..(465): Homolog of NCBI NO: 15236114 NR Description: casein kinase, putative [Arabidopsis thaliana]
  misc_feature (1)..(458): Homolog of NCBI NO: 15218569 NR Description: casein kinase, putative [Arabidopsis thaliana]
  misc_feature (1)..(167): Homolog of NCBI NO: 20161073 NR Description: putative casein kinase [Oryza sativa (japonica
  misc_feature (158)..(466): Homolog of NCBI NO: 20161073 NR Description: putative casein kinase [Oryza sativa (japonica
MEPRVGNKYRLGRKLGSGSFGEIYLGTNVQTNEEVAIKLENVKTKHPQLLYESKLYRVLQGGTGISNVKWFGVEGDYNVLVMDVLGPSLEDLFSFCNRKLSLKTVLMLADQMINRVEFIHSKSFLHRDIKPDNFLMGLGKRANQVYMIDFGLAKKYRDTSTHQHIPYRENKNLTGTARYASVSTHLGIEQSRRDDMESLGYVLMYFLRGSLPWQGLKAGTKKQKYEKISERKIATSIEALCRGYPSEFQSFFHYCRALRFEDSPDYQYLKRLFRDLFIREGFQFDYVFDWTILKYQQSQMTSAPPRAIAAAAGQSSGMAPIASNNRLSATEEGRSGWSDDPTRRQVPPTGINAGSLAKQKSPVRPDVSAPKEAVLSSSTFLGRSGVSSRRPAVCSSRDLPSSEAEPSRSRAPDVSPGTFQRNSAPRRTSQTLDYSDPRHKSNSNNYESTIRGIRGLNFNANDRIHY

SEQ ID NO: 69291 - protein, 385 aa, Triticum aestivum
  peptide (1)..(385): Ceres Seq. ID no. 13595902
  misc_feature (1)..(329): Homolog of NCBI NO: 15240091 NR Description: casein kinase, putative [Arabidopsis thaliana]
  misc_feature (1)..(373): Homolog of NCBI NO: 30678728 NR Description: protein kinase (ADK1) [Arabidopsis thaliana]
  misc_feature (1)..(317): Homolog of NCBI NO: 15224781 NR Description: casein kinase, putative [Arabidopsis thaliana]
  misc_feature (1)..(377): Homolog of NCBI NO: 6635385 NR Description: casein kinase I-like protein [Brassica oleracea]
  misc_feature (1)..(303): Homolog of NCBI NO: 549973 NR Description: casein kinase I-like protein
  misc_feature (1)..(346): Homolog of NCBI NO: 22327902 NR Description: casein kinase, putative [Arabidopsis thaliana]
  misc_feature (1)..(384): Homolog of NCBI NO: 15236114 NR Description: casein kinase, putative [Arabidopsis thaliana]
  misc_feature (1)..(377): Homolog of NCBI NO: 15218569 NR Description: casein kinase, putative [Arabidopsis thaliana]
  misc_feature (1)..(86): Homolog of NCBI NO: 20161073 NR Description: putative casein kinase [Oryza sativa (japonica
  misc_feature (77)..(385): Homolog of NCBI NO: 20161073 NR Description: putative casein kinase [Oryza sativa (japonica
MDVLGPSLEDLFSFCNRKLSLKTVLMLADQMINRVEFIHSKSFLHRDIKPDNFLMGLGKRANQVYMIDFGLAKKYRDTSTHQHIPYRENKNLTGTARYASVSTHLGIEQSRRDDMESLGYVLMYFLRGSLPWQGLKAGTKKQKYEKISERKIATSIEALCRGYPSEFQSFFHYCRALRFEDSPDYQYLKRLFRDLFIREGFQFDYVFDWTILKYQQSQMTSAPPRAIAAAAGQSSGMAPIASNNRLSATEEGRSGWSDDPTRRQVPPTGINAGSLAKQKSPVRPDVSAPKEAVLSSSTFLGRSGVSSRRPAVCSSRDLPSSEAEPSRSRAPDVSPGTFQRNSAPRRTSQTLDYSDPRHKSNSNNYESTIRGIRGLNFNANDRIHY

SEQ ID NO: 69292 - protein, 360 aa, Triticum aestivum
  peptide (1)..(360): Ceres Seq. ID no. 13595903
  misc_feature (1)..(304): Homolog of NCBI NO: 15240091 NR Description: casein kinase, putative [Arabidopsis thaliana]
  misc_feature (1)..(348): Homolog of NCBI NO: 30678728 NR Description: protein kinase (ADK1) [Arabidopsis thaliana]
  misc_feature (1)..(292): Homolog of NCBI NO: 15224781 NR Description: casein kinase, putative [Arabidopsis thaliana]
  misc_feature (1)..(352): Homolog of NCBI NO: 6635385 NR Description: casein kinase I-like protein [Brassica oleracea]
  misc_feature (1)..(278): Homolog of NCBI NO: 549973 NR Description: casein kinase I-like protein
  misc_feature (1)..(321): Homolog of NCBI NO: 22327902 NR Description: casein kinase, putative [Arabidopsis thaliana]
  misc_feature (1)..(359): Homolog of NCBI NO: 15236114 NR Description: casein kinase, putative [Arabidopsis thaliana]
  misc_feature (1)..(352): Homolog of NCBI NO: 15218569 NR Description: casein kinase, putative [Arabidopsis thaliana]
  misc_feature (1)..(61): Homolog of NCBI NO: 20161073 NR Description: putative casein kinase [Oryza sativa (japonica
  misc_feature (52)..(360): Homolog of NCBI NO: 20161073 NR Description: putative casein kinase [Oryza sativa (japonica
MLADQMINRVEFIHSKSFLHRDIKPDNFLMGLGKRANQVYMIDFGLAKKYRDTSTHQHIPYRENKNLTGTARYASVSTHLGIEQSRRDDMESLGYVLMYFLRGSLPWQGLKAGTKKQKYEKISERKIATSIEALCRGYPSEFQSFFHYCRALRFEDSPDYQYLKRLFRDLFIREGFQFDYVFDWTILKYQQSQMTSAPPRAIAAAAGQSSGMAPIASNNRLSATEEGRSGWSDDPTRRQVPPTGINAGSLAKQKSPVRPDVSAPKEAVLSSSTFLGRSGVSSRRPAVCSSRDLPSSEAEPSRSRAPDVSPGTFQRNSAPRRTSQTLDYSDPRHKSNSNNYESTIRGIRGLNFNANDRIHY

SEQ ID NO: 69293 - DNA, 1314 bp, Triticum aestivum
  misc_feature (1)..(1314): Ceres Seq. ID no. 13595922
aaaaaccggcagcgcgcgttcttgctcgggtctcgtctcggaagaaagattccagcaccgagagctcgaggccgacgactcaccttttggaaaggcggggttcttctgaggaccttgcatctccagtagatcgggcgcgtccactgttcccaggaccagagcatcgcacttggcaaagcagaggagaagatggacgctcgcggcggagacgcatcggccattgccctgctgctgtgcgcttgctttctcaccgcccttgcatgtgacagcaatggtgccaagtttgcgtacagcggtcctcttggccccgatcactgggggggattggaccccaacttcacgcgctgcgccatggggacgtaccagtctccggttgatatcaagaccagcgacgtggtttacaacccgatgctggggcctcttcacagggaatacaccgctgcgaatgctaccctcgtagacaacatcttcaacatcgcgctgcgatgcgaggatgctgctgggacggtgcagatcgacggggtgaagtacaagctggacaatatccattggcactctccttcagagcacaccatcaacggcgagaggtttgcggtggagcagcacatggttcacttcagtgacgacggcaacatatccgttgtgtcgatcctgtaccggctcggcaggccagaccctttcctcatgcagctgcaggataagctatcggagctctacgtggaggcctgcagggccgagaaaggtgctccgatccccaccggagtagtaaacatgtggcagctgcggcgttacgccaacatgtactaccggtacgtcgggtcgctgaccacgccgccgtgcaccgagaacatcatctggaacatccacggcagggtgagggagatggcgttggggcaggctgccgccctgatcgcgcccctggaggaaggctaccggcgcaacaacaggccgacgcagccgctcaacggccgcaccgtgcagttctaccgcaggttctggaagaagaaggggagcgggaagccgtaagggctggtcgatgcgcctcgatcgatgtttggagatgatgatgatgctgcagtctctctcgtctttgctctcggttcaggacaaagttatagtagtcgtttatctatctgcaagtcgtgttagcatataggtctgctttataggtttgctttatcgcttatcggtcttactctgaatttggttaagtgttaggtctttcgtgtctgtaaatgcgtccgggagggttgatgtgatcgatccttcttttgtctacaaaaaaagttaagctaatcaagaaagtttcactcc

SEQ ID NO: 69294 - protein, 278 aa, Triticum aestivum
  peptide (1)..(278): Ceres Seq. ID no. 13595923
  misc_feature (39)..(267): Pfam Name: Eukaryotic-type carbonic anhydrase Pfam Description: Eukaryotic-type carbonic anhydrase
  misc_feature (9)..(266): Homolog of NCBI NO: 37806288 NR Description: putative dioscorin [Oryza sativa (japonica
  misc_feature (26)..(273): Homolog of NCBI NO: 15223097 NR Description: carbonic anhydrase -related [Arabidopsis thaliana]
  misc_feature (13)..(273): Homolog of NCBI NO: 29468280 NR Description: nectarin III [Nicotiana langsdorffii x Nicotiana
  misc_feature (11)..(268): Homolog of NCBI NO: 7271963 NR Description: dioscorin B [Dioscorea alata]
  misc_feature (6)..(266): Homolog of NCBI NO: 34904986 NR Description: putative carbonic anhydrase precursor
  misc_feature (26)..(267): Homolog of NCBI NO: 25291473 NR Description: probable carbonic anhydrase [imported] -
  misc_feature (39)..(267): Homolog of NCBI NO: 15223122 NR Description: storage protein -related [Arabidopsis thaliana]
  misc_feature (11)..(229): Homolog of NCBI NO: 30693691 NR Description: carbonic anhydrase (CAH1) [Arabidopsis thaliana]
  misc_feature (11)..(277): Homolog of NCBI NO: 30693687 NR Description: carbonic anhydrase (CAH1) [Arabidopsis thaliana]
  misc_feature (1)..(278): Homolog of NCBI NO: 38346319 NR Description: OJ000126_13.1 [Oryza sativa (japonica
MDARGGDASAIALLLCACFLTALACDSNGAKFAYSGPLGPDHWGGLDPNFTRCAMGTYQSPVDIKTSDVVYNPMLGPLHREYTAANATLVDNIFNIALRCEDAAGTVQIDGVKYKLDNIHWHSPSEHTINGERFAVEQHMVHFSDDGNISVVSILYRLGRPDPFLMQLQDKLSELYVEACRAEKGAPIPTGVVNMWQLRRYANMYYRYVGSLTTPPCTENIIWNIHGRVREMALGQAAALIAPLEEGYRRNNRPTQPLNGRTVQFYRRFWKKKGSGKP

SEQ ID NO: 69295 - protein, 224 aa, Triticum aestivum
  peptide (1)..(224): Ceres Seq. ID no. 13595924
  misc_feature (1)..(213): Pfam Name: Eukaryotic-type carbonic anhydrase Pfam Description: Eukaryotic-type carbonic anhydrase
  misc_feature (1)..(212): Homolog of NCBI NO: 37806288 NR Description: putative dioscorin [Oryza sativa (japonica
  misc_feature (1)..(219): Homolog of NCBI NO: 15223097 NR Description: carbonic anhydrase -related [Arabidopsis thaliana]
  misc_feature (1)..(219): Homolog of NCBI NO: 29468280 NR Description: nectarin III [Nicotiana langsdorffii x Nicotiana
  misc_feature (1)..(214): Homolog of NCBI NO: 7271963 NR Description: dioscorin B [Dioscorea alata]
  misc_feature (1)..(212): Homolog of NCBI NO: 34904986 NR Description: putative carbonic anhydrase precursor
  misc_feature (1)..(213): Homolog of NCBI NO: 25291473 NR Description: probable carbonic anhydrase [imported] -
  misc_feature (1)..(213): Homolog of NCBI NO: 15223122 NR Description: storage protein -related [Arabidopsis thaliana]
  misc_feature (1)..(175): Homolog of NCBI NO: 30693691 NR Description: carbonic anhydrase (CAH1) [Arabidopsis thaliana]
  misc_feature (1)..(223): Homolog of NCBI NO: 30693687 NR Description: carbonic anhydrase (CAH1) [Arabidopsis thaliana]
  misc_feature (1)..(224): Homolog of NCBI NO: 38346319 NR Description: OJ000126_13.1 [Oryza sativa (japonica
MGTYQSPVDIKTSDVVYNPMLGPLHREYTAANATLVDNIFNIALRCEDAAGTVQIDGVKYKLDNIHWHSPSEHTINGERFAVEQHMVHFSDDGNISVVSILYRLGRPDPFLMQLQDKLSELYVEACRAEKGAPIPTGVVNMWQLRRYANMYYRYVGSLTTPPCTENIIWNIHGRVREMALGQAAALIAPLEEGYRRNNRPTQPLNGRTVQFYRRFWKKKGSGKP

SEQ ID NO: 69296 - protein, 205 aa, Triticum aestivum
  peptide (1)..(205): Ceres Seq. ID no. 13595925
  misc_feature (1)..(194): Pfam Name: Eukaryotic-type carbonic anhydrase Pfam Description: Eukaryotic-type carbonic anhydrase
  misc_feature (1)..(193): Homolog of NCBI NO: 37806288 NR Description: putative dioscorin [Oryza sativa (japonica
  misc_feature (1)..(200): Homolog of NCBI NO: 15223097 NR Description: carbonic anhydrase -related [Arabidopsis thaliana]
  misc_feature (1)..(200): Homolog of NCBI NO: 29468280 NR Description: nectarin III [Nicotiana langsdorffii x Nicotiana
  misc_feature (1)..(195): Homolog of NCBI NO: 7271963 NR Description: dioscorin B [Dioscorea alata]
  misc_feature (1)..(193): Homolog of NCBI NO: 34904986 NR Description: putative carbonic anhydrase precursor
  misc_feature (1)..(194): Homolog of NCBI NO: 25291473 NR Description: probable carbonic anhydrase [imported] -
  misc_feature (1)..(194): Homolog of NCBI NO: 15223122 NR Description: storage protein -related [Arabidopsis thaliana]
  misc_feature (1)..(156): Homolog of NCBI NO: 30693691 NR Description: carbonic anhydrase (CAH1) [Arabidopsis thaliana]
  misc_feature (1)..(204): Homolog of NCBI NO: 30693687 NR Description: carbonic anhydrase (CAH1) [Arabidopsis thaliana]
  misc_feature (1)..(205): Homolog of NCBI NO: 38346319 NR Description: OJ000126_13.1 [Oryza sativa (japonica
MLGPLHREYTAANATLVDNIFNIALRCEDAAGTVQIDGVKYKLDNIHWHSPSEHTINGERFAVEQHMVHFSDDGNISVVSILYRLGRPDPFLMQLQDKLSELYVEACRAEKGAPIPTGVVNMWQLRRYANMYYRYVGSLTTPPCTENIIWNIHGRVREMALGQAAALIAPLEEGYRRNNRPTQPLNGRTVQFYRRFWKKKGSGKP

SEQ ID NO: 69297 - DNA, 1430 bp, Triticum aestivum
  misc_feature (1)..(1430): Ceres Seq. ID no. 13598272
aaaaaaacctagatgccacaccctatcccagccgcagccgccgccgccgtcgccgccgccgccgctgcaaccgccgccttcgattccgtgaaattggaggggaagacaattggatctgtctgccgcaggaggagtggggagaaatagattgaaggcgcgacagttcctgaatgttgtgatggagaggtatggcactggcggtgccggtggcagcttgtatacggtcagtcgcatcgacgccaaggaacacctcttctaccgatccacggccgaagcacaggcagcagaaaaatcaaggttcgatatggagtgcatctggcgaatgcctacgtccaggctcaggttcgaagcataccgctcggatgacaagaggctcaatttcctgcccttctatggacgacgcagcggcggcgatagcaagatgctctgcatggacgccgctggccacaccgtgctctgtgatgccgctggcctctctgtcatgccggctccctgccttaacgaacccaaggttgacagccctgtttctttctccatcacccgcaccaacgtggaaacccccaatcgcgccgatgctctctacgtcctcgacagatttgtcacgagccgcaactccttcaacttcgaggcactcatgtttggcgagaagacctgggactgggttcggcttccaccgccgccctatgtcaacaacccggcctacaactccacatccatccagtcctacacgctcctggctgatggctccaccatttgcatctcctcccctcggcacagcctcgtcggcacctactgcttcgacacgattagctgtaagtggagcaaggctggccgctgggcgcttcccttgtacggccgggctgagcatgtacctgagctgggcaacctctggttcggcatggccgacaacagcccccacaatttttccgcattggacctctccaacctagacggggctccaaagttgcttcaagactggcaagaccttgacccgcctgaggattgggtgcagatgaggtgcagcctgctgtacctgggcgcgggcaagttttgcataaccaaattcttcaacatcggggacccagacacagaggacaacacaaccgctgctgtgctcaccggagtggaggtgctgtgtggagtttctggtggggaggtggtgcacggaggatcgtccgaactccagatgatcaagcacaagtcttttatcagctatgacggcatccagtgcgtcctctgaaatacgtactagggaagtcgttaaaacgagagcaaatgaattatgagcattttagaagacggccgagtggttgttttcgttgcagctgtttccattggaagccttgttcgttttgtggatctattttccgctgggattgggttgatctccaccatttcttctgctagagaaatatagtcctagcactttt

SEQ ID NO: 69298 - protein, 353 aa, Triticum aestivum
  peptide (1)..(353): Ceres Seq. ID no. 13598273
  misc_feature (203)..(342): Homolog of NCBI NO: 27818009 NR Description: OSJNBb0041J06.17 [Oryza sativa (japonica
  misc_feature (159)..(305): Homolog of NCBI NO: 34904128 NR Description: unnamed protein product [Oryza sativa (japonica
  misc_feature (115)..(272): Homolog of NCBI NO: 34907070 NR Description: OSJNBa0093F16.24 [Oryza sativa (japonica
  misc_feature (133)..(335): Homolog of NCBI NO: 15451605 NR Description: Hypothetical protein [Oryza sativa]
  misc_feature (79)..(318): Homolog of NCBI NO: 37531434 NR Description: hypothetical protein [Oryza sativa (japonica
  misc_feature (107)..(353): Homolog of NCBI NO: 38344193 NR Description: OSJNBa0064G10.9 [Oryza sativa (japonica
  misc_feature (79)..(342): Homolog of NCBI NO: 15451604 NR Description: Hypothetical protein [Oryza sativa]
  misc_feature (157)..(342): Homolog of NCBI NO: 34902348 NR Description: Hypothetical protein [Oryza sativa (japonica
  misc_feature (1)..(319): Homolog of NCBI NO: 38345446 NR Description: OSJNBa0042L16.1 [Oryza sativa (japonica
  misc_feature (1)..(342): Homolog of NCBI NO: 34907072 NR Description: OSJNBa0093F16.25 [Oryza sativa (japonica
MERYGTGGAGGSLYTVSRIDAKEHLFYRSTAEAQAAEKSRFDMECIWRMPTSRLRFEAYRSDDKRLNFLPFYGRRSGGDSKMLCMDAAGHTVLCDAAGLSVMPAPCLNEPKVDSPVSFSITRTNVETPNRADALYVLDRFVTSRNSFNFEALMFGEKTWDWVRLPPPPYVNNPAYNSTSIQSYTLLADGSTICISSPRHSLVGTYCFDTISCKWSKAGRWALPLYGRAEHVPELGNLWFGMADNSPHNFSALDLSNLDGAPKLLQDWQDLDPPEDWVQMRCSLLYLGAGKFCITKFFNIGDPDTEDNTTAAVLTGVEVLCGVSGGEVVHGGSSELQMIKHKSFISYDGIQCVL

SEQ ID NO: 69299 - protein, 311 aa, Triticum aestivum
  peptide (1)..(311): Ceres Seq. ID no. 13598274
  misc_feature (161)..(300): Homolog of NCBI NO: 27818009 NR Description: OSJNBb0041J06.17 [Oryza sativa (japonica
  misc_feature (117)..(263): Homolog of NCBI NO: 34904128 NR Description: unnamed protein product [Oryza sativa (japonica
  misc_feature (73)..(230): Homolog of NCBI NO: 34907070 NR Description: OSJNBa0093F16.24 [Oryza sativa (japonica
  misc_feature (91)..(293): Homolog of NCBI NO: 15451605 NR Description: Hypothetical protein [Oryza sativa]
  misc_feature (37)..(276): Homolog of NCBI NO: 37531434 NR Description: hypothetical protein [Oryza sativa (japonica
  misc_feature (65)..(311): Homolog of NCBI NO: 38344193 NR Description: OSJNBa0064G10.9 [Oryza sativa (japonica
  misc_feature (37)..(300): Homolog of NCBI NO: 15451604 NR Description: Hypothetical protein [Oryza sativa]
  misc_feature (115)..(300): Homolog of NCBI NO: 34902348 NR Description: Hypothetical protein [Oryza sativa (japonica
  misc_feature (1)..(277): Homolog of NCBI NO: 38345446 NR Description: OSJNBa0042L16.1 [Oryza sativa (japonica
  misc_feature (1)..(300): Homolog of NCBI NO: 34907072 NR Description: OSJNBa0093F16.25 [Oryza sativa (japonica
MECIWRMPTSRLRFEAYRSDDKRLNFLPFYGRRSGGDSKMLCMDAAGHTVLCDAAGLSVMPAPCLNEPKVDSPVSFSITRTNVETPNRADALYVLDRFVTSRNSFNFEALMFGEKTWDWVRLPPPPYVNNPAYNSTSIQSYTLLADGSTICISSPRHSLVGTYCFDTISCKWSKAGRWALPLYGRAEHVPELGNLWFGMADNSPHNFSALDLSNLDGAPKLLQDWQDLDPPEDWVQMRCSLLYLGAGKFCITKFFNIGDPDTEDNTTAAVLTGVEVLCGVSGGEVVHGGSSELQMIKHKSFISYDGIQCVL

SEQ ID NO: 69300 - protein, 305 aa, Triticum aestivum
  peptide (1)..(305): Ceres Seq. ID no. 13598275
  misc_feature (155)..(294): Homolog of NCBI NO: 27818009 NR Description: OSJNBb0041J06.17 [Oryza sativa (japonica
  misc_feature (111)..(257): Homolog of NCBI NO: 34904128 NR Description: unnamed protein product [Oryza sativa (japonica
  misc_feature (67)..(224): Homolog of NCBI NO: 34907070 NR Description: OSJNBa0093F16.24 [Oryza sativa (japonica
  misc_feature (85)..(287): Homolog of NCBI NO: 15451605 NR Description: Hypothetical protein [Oryza sativa]
  misc_feature (31)..(270): Homolog of NCBI NO: 37531434 NR Description: hypothetical protein [Oryza sativa (japonica
  misc_feature (59)..(305): Homolog of NCBI NO: 38344193 NR Description: OSJNBa0064G10.9 [Oryza sativa (japonica
  misc_feature (31)..(294): Homolog of NCBI NO: 15451604 NR Description: Hypothetical protein [Oryza sativa]
  misc_feature (109)..(294): Homolog of NCBI NO: 34902348 NR Description: Hypothetical protein [Oryza sativa (japonica
  misc_feature (1)..(271): Homolog of NCBI NO: 38345446 NR Description: OSJNBa0042L16.1 [Oryza sativa (japonica
  misc_feature (1)..(294): Homolog of NCBI NO: 34907072 NR Description: OSJNBa0093F16.25 [Oryza sativa (japonica
MPTSRLRFEAYRSDDKRLNFLPFYGRRSGGDSKMLCMDAAGHTVLCDAAGLSVMPAPCLNEPKVDSPVSFSITRTNVETPNRADALYVLDRFVTSRNSFNFEALMFGEKTWDWVRLPPPPYVNNPAYNSTSIQSYTLLADGSTICISSPRHSLVGTYCFDTISCKWSKAGRWALPLYGRAEHVPELGNLWFGMADNSPHNFSALDLSNLDGAPKLLQDWQDLDPPEDWVQMRCSLLYLGAGKFCITKFFNIGDPDTEDNTTAAVLTGVEVLCGVSGGEVVHGGSSELQMIKHKSFISYDGIQCVL

SEQ ID NO: 69301 - DNA, 1442 bp, Triticum aestivum
  misc_feature (1)..(1442): Ceres Seq. ID no. 15169607
gaccaagcccagcccataccggcagccacctccgtcgtcgtcggtactgacgcggcacgagccggcgaatccgacaggccccctacctctcgctcgccgcgagatcccgcgtccatggcggtcggcatcgcgctcctgctcgaccttgcggcccgcgcgccccgctcctccgcctcgctccactcgcacgccgccttctccgccgccgccgccgccgccgccgcggcagccctgtccgcctccggcgtacccctctccgcgcggccattcttcggttttccaggattcactgttgctcattgtgatgctggtgcaacttatggatcgattgatagtcctgatcttgccaatgatcttaatgagaagatacatgactcgattcatgatctccaattaccgataaaagaatacccgttggagctgaagccgcttttgtatgcatttggctttaagcatttgagtatgacgactattagggcctttttattatactatttaccacttctggagcctcgtccgcccactgatgacgatgacgatgacgatctgcttcaagatgattcagagaggccgccggttgacctggttactcccttccataattcattgaagcaaatcgctcgcgagatttctgttgtaacaacaagaagagtattcgaaaggattgcggtttgtcatgtttcacaaagaacagcatggaagcttctcaaagatgctgcaaaatcatcgaagaggaaagctctgagggggatgtcaattccagaatacacatactgtgttgccagaacaactttccgagcgcatgcattgggagtagctgctacttgggttgtacaatctgtcgtccaggtctacaaatgttttattcgtcaacctgataatgatgacgaattgttcgacgagaaggaaaaactcagattgtttgcgagaaggatctatagtgtaaccatcaaatgtggtttctctttggtttttgcctcgattggagcaggcctcggcgtccttctgcatccagtgcatggacaatggattggttgtatccttggagattttgcaggaccagttgttgctatccttattttcgagaagttacagttcccgctagaaggttaaagaccaccatctcctgctacaaagttaagaaacccaggtcatccgaccttgtttctagcctgcctggttttcgaagaacatgaagtggagctccttggccttgagtctaccctttcaggatattcattggcctaacttggagctcaaagttgatgaataactatgcatgcatggttaatagcttttcgtggcacaatgcctttgggtattgtgtaatgcttacttttggcacatttaataactagctactgtacttcgttgccgtgctttacattttgaactcaaaggaacatttctgtccactggtttgctaaatttctacagtaagc

SEQ ID NO: 69302 - protein, 370 aa, Triticum aestivum
  peptide (1)..(370): Ceres Seq. ID no. 15169608
  misc_feature (42)..(363): Homolog of NCBI NO: 15240548 NR Description: expressed protein [Arabidopsis thaliana]
DQAQPIPAATSVVVGTDAARAGESDRPPTSRSPRDPASMAVGIALLLDLAARAPRSSASLHSHAAFSAAAAAAAAAALSASGVPLSARPFFGFPGFTVAHCDAGATYGSIDSPDLANDLNEKIHDSIHDLQLPIKEYPLELKPLLYAFGFKHLSMTTIRAFLLYYLPLLEPRPPTDDDDDDDLLQDDSERPPVDLVTPFHNSLKQIAREISVVTTRRVFERIAVCHVSQRTAWKLLKDAAKSSKRKALRGMSIPEYTYCVARTTFRAHALGVAATWVVQSVVQVYKCFIRQPDNDDELFDEKEKLRLFARRIYSVTIKCGFSLVFASIGAGLGVLLHPVHGQWIGCILGDFAGPVVAILIFEKLQFPLEG

SEQ ID NO: 69303 - protein, 332 aa, Triticum aestivum
  peptide (1)..(332): Ceres Seq. ID no. 15169609
  misc_feature (4)..(325): Homolog of NCBI NO: 15240548 NR Description: expressed protein [Arabidopsis thaliana]
MAVGIALLLDLAARAPRSSASLHSHAAFSAAAAAAAAAALSASGVPLSARPFFGFPGFTVAHCDAGATYGSIDSPDLANDLNEKIHDSIHDLQLPIKEYPLELKPLLYAFGFKHLSMTTIRAFLLYYLPLLEPRPPTDDDDDDDLLQDDSERPPVDLVTPFHNSLKQIAREISVVTTRRVFERIAVCHVSQRTAWKLLKDAAKSSKRKALRGMSIPEYTYCVARTTFRAHALGVAATWVVQSVVQVYKCFIRQPDNDDELFDEKEKLRLFARRIYSVTIKCGFSLVFASIGAGLGVLLHPVHGQWIGCILGDFAGPVVAILIFEKLQFPLEG

SEQ ID NO: 69304 - protein, 216 aa, Triticum aestivum
  peptide (1)..(216): Ceres Seq. ID no. 15169610
  misc_feature (1)..(209): Homolog of NCBI NO: 15240548 NR Description: expressed protein [Arabidopsis thaliana]
MTTIRAFLLYYLPLLEPRPPTDDDDDDDLLQDDSERPPVDLVTPFHNSLKQIAREISVVTTRRVFERIAVCHVSQRTAWKLLKDAAKSSKRKALRGMSIPEYTYCVARTTFRAHALGVAATWVVQSVVQVYKCFIRQPDNDDELFDEKEKLRLFARRIYSVTIKCGFSLVFASIGAGLGVLLHPVHGQWIGCILGDFAGPVVAILIFEKLQFPLEG

SEQ ID NO: 69305 - DNA, 1198 bp, Triticum aestivum
  misc_feature (1)..(1198): Ceres Seq. ID no. 15176085
ctgataggcgatagcgataccattccttcctccacggagcgatggaagacacgacgccgcccgctgacgagaggccgctggtgctcctggggcagccgctcttcccggagttcgccaccgcgctggccggccgcttccggttcgtcctggtcgcggacgccgacgccgcgaccctggcccaggggagggcgctgctcatcgggctcaacccggtcacggacgaccacctggccgcgctcccggcgctcgggctcgtggcgggcatctccgtgggcgtcaaccacgtcgacctcgccgcctgccggcgccgcgggatcgccgtcaccaacgcaggcgccgccttcgcggtcgacacggccgactacggcgtcgggctcgtcgtcgccgtgctccgccggttggccgccgccgaggcccacgtccgggccggcaggtgggcggccgacggcgactatcctctcaccaccaaggtgagcggcaagcgggtggggatcgtggggctgggcaacatcggctcccgcatcgcgcggcgtctcgccgccttcggctgcgccgtctcctacaactcgaggtcgcccaagccgtcggcgccgtacgagttcgtcccggccgtgcgcgacatcgccgccggcagcgacgtgctggtgctatcctgcgcgctgacggaggagacgaggcacgtggtgaaccgggaggtgatggaggcgctggggaaggccggcgtactggtgaacgtcggccgcggcggcctcgtggacgagccggagctggtccgctgcctgcaggagggcgtcatcggcggcgccggcttggacgtgttcgagagcgagccggacgtgccgccggagctcttctccatggacaacgtcgtgctttcggcgcacagagccgtggccacgccggagtccatccgcggcacgatcgagctcgtcgcggccaacctcgacgccttcttcgcagggaagccactgctcagccccgtggagctctgagacaaccgccgccgccggagggttcttacaaggacgctgtcgtgagcggcggcaactagtgtgatcttgccgtccacggcggtaacgaataataagagaggacgtgacaaggcagctggtagaggcgaagcattggcttagggcgacgccatcctgtattttcctatctgtacacgatgtcatgtgaattatatcgacttgctgcc

SEQ ID NO: 69306 - protein, 316 aa, Triticum aestivum
  peptide (1)..(316): Ceres Seq. ID no. 15176086
  misc_feature (106)..(281): Pfam Name: D-isomer specific 2-hydroxyacid dehydrogenase, Pfam Description: D-isomer specific 2-hydroxyacid dehydrogenase,
  misc_feature (63)..(314): Homolog of NCBI NO: 16262721 NR Description: putative D-isomer specific 2-hydroxyacid
  misc_feature (3)..(314): Homolog of NCBI NO: 17548726 NR Description: PUTATIVE D-3-PHOSPHOGLYCERATE DEHYDROGENASE
  misc_feature (65)..(314): Homolog of NCBI NO: 34904262 NR Description: putative Caulobacter crescentus D-isomer specific
  misc_feature (5)..(316): Homolog of NCBI NO: 21636166 NR Description: unknown [Aegilops tauschii]
  misc_feature (57)..(314): Homolog of NCBI NO: 7485630 NR Description: probable glycerate dehydrogenase [imported] -
  misc_feature (12)..(315): Homolog of NCBI NO: 32488422 NR Description: OSJNBb0085F13.12 [Oryza sativa (japonica
  misc_feature (8)..(316): Homolog of NCBI NO: 38345306 NR Description: OSJNBb0085F13.6 [Oryza sativa (japonica
  misc_feature (6)..(314): Homolog of NCBI NO: 32488421 NR Description: OSJNBb0085F13.11 [Oryza sativa (japonica
  misc_feature (8)..(316): Homolog of NCBI NO: 15222015 NR Description: oxidoreductase family [Arabidopsis thaliana]
  misc_feature (7)..(316): Homolog of NCBI NO: 38345308 NR Description: OSJNBb0085F13.13 [Oryza sativa (japonica
MEDTTPPADERPLVLLGQPLFPEFATALAGRFRFVLVADADAATLAQGRALLIGLNPVTDDHLAALPALGLVAGISVGVNHVDLAACRRRGIAVTNAGAAFAVDTADYGVGLVVAVLRRLAAAEAHVRAGRWAADGDYPLTTKVSGKRVGIVGLGNIGSRIARRLAAFGCAVSYNSRSPKPSAPYEFVPAVRDIAAGSDVLVLSCALTEETRHVVNREVMEALGKAGVLVNVGRGGLVDEPELVRCLQEGVIGGAGLDVFESEPDVPPELFSMDNVVLSAHRAVATPESIRGTIELVAANLDAFFAGKPLLSPVEL

SEQ ID NO: 69307 - DNA, 1580 bp, Triticum aestivum
  misc_feature (1)..(1580): Ceres Seq. ID no. 13596244
ggttctgacccccgattcggtccgtcgattgtgatttcccctcgatttcgtgcgggattagtggccggaattaatcgccatgacggcgtcgtcgccgatggtgctgtccctcctgctcttcgcctcgctcacggcgctgctcgtcctggcccctcgcacggcgtcgccgccgctgccgctggccgtggtggttggggacgaggaggcgccgccggccgccgctggtggtgctgcggggatcagcggcggaggggcgggagttgaggagggaccggaggacctcgcgctataccggcgcgtgacgctcgacgccggcgagggcgcggcggtggcgtccaaggtggcgttcatgttcctgaccaactccgacctcaccttcgcgccgctttgggagcgcttcttcgcggggcacgctgaccagttcaacgtctacgtgcacgcagacccggcggtgcggctgcggctcccccctacgccttccttccggggccgcttcgtcgcggccaagccgacgcggcgcggggacccgagcctcatcgctgcggcgcggcggctgcttgtcgccgcgctactcgacgacccggccaacgcctacttcgcgctgctctcgcagcactgcgtcccgctccactccttcccgcggctctacgaggcgctcttcccgcccaaggccgcgcaccaccaccgcctcccgagctatatcgaggtgctcaccggcgagccccagatgcccgcgcgctacgtggcgcgcggtgacgacgccatgctcccggaggtgcccttcgaccggttccgcatcggctcccagttcttcacgctggcccgccgccacgccgtgctagtcgtccgcgagcgccgtctctggcgaaagtttagggagccgtgcctgccggagtcgcagggctcgtgctacccggaggagcactatttcccgacgcttctcgacatggccgaccccgccggctgcacccggtacacgctcacgcgcgtcaactggaccgacagcttcgagggccacccgcacacgtattccgcgccagaggtgtcgccgcggctcatcgccgagctacgccagtccaacagctccacctatgagcacatgttcgcgcgcaagttcgcgcccgactgccttggcccgctcatggccatcgccgacaccgtcatcttcaaagattgatcgatgcggtgctctgcatcatagatacacgtaggaggtctatccgttgagagttgcgcgtgcgagaagacgaaagcagtgtcgttattctccgttgaatcttcacacggttcagactggtgctttgcctctgtgccctccaccgttcttctcctcctggtacttctatgtagacttaagtggcaacaacctaatgcaaagcggcaggtgttgcatctgatggtcagtccatccatccactgtatttttcctacctcgtgcggctgcctaaggctgctgttctgttgaaatgcgtaaaaggatggattgtggcggtgttctgttcagctgaaactgaaaaggaactttgtaccggtttatttcagcttgtgtacataaccaaggaataaaataatcattctgc

SEQ ID NO: 69308 - protein, 365 aa, Triticum aestivum
  peptide (1)..(365): Ceres Seq. ID no. 13596245
  misc_feature (134)..(245): Pfam Name: Arabidopsis protein of unknown function, DUF266 Pfam Description: Arabidopsis protein of unknown function, DUF266
  misc_feature (86)..(338): Homolog of NCBI NO: 22327910 NR Description: expressed protein [Arabidopsis thaliana]
  misc_feature (86)..(338): Homolog of NCBI NO: 17065016 NR Description: Unknown protein [Arabidopsis thaliana]
  misc_feature (87)..(331): Homolog of NCBI NO: 26452247 NR Description: unknown protein [Arabidopsis thaliana]
  misc_feature (87)..(362): Homolog of NCBI NO: 38344090 NR Description: OSJNBb0056F09.13 [Oryza sativa (japonica
  misc_feature (67)..(362): Homolog of NCBI NO: 34907318 NR Description: contains ESTs
  misc_feature (87)..(365): Homolog of NCBI NO: 15239393 NR Description: hypothetical protein [Arabidopsis thaliana]
  misc_feature (62)..(365): Homolog of NCBI NO: 15236739 NR Description: expressed protein [Arabidopsis thaliana]
  misc_feature (87)..(365): Homolog of NCBI NO: 30688302 NR Description: expressed protein [Arabidopsis thaliana]
  misc_feature (87)..(365): Homolog of NCBI NO: 15231121 NR Description: expressed protein [Arabidopsis thaliana]
  misc_feature (3)..(365): Homolog of NCBI NO: 34394888 NR Description: unknown protein [Oryza sativa (japonica
MTASSPMVLSLLLFASLTALLVLAPRTASPPLPLAVVVGDEEAPPAAAGGAAGISGGGAGVEEGPEDLALYRRVTLDAGEGAAVASKVAFMFLTNSDLTFAPLWERFFAGHADQFNVYVHADPAVRLRLPPTPSFRGRFVAAKPTRRGDPSLIAAARRLLVAALLDDPANAYFALLSQHCVPLHSFPRLYEALFPPKAAHHHRLPSYIEVLTGEPQMPARYVARGDDAMLPEVPFDRFRIGSQFFTLARRHAVLVVRERRLWRKFREPCLPESQGSCYPEEHYFPTLLDMADPAGCTRYTLTRVNWTDSFEGHPHTYSAPEVSPRLIAELRQSNSSTYEHMFARKFAPDCLGPLMAIADTVIFKD

SEQ ID NO: 69309 - protein, 359 aa, Triticum aestivum
  peptide (1)..(359): Ceres Seq. ID no. 13596246
  misc_feature (128)..(239): Pfam Name: Arabidopsis protein of unknown function, DUF266 Pfam Description: Arabidopsis protein of unknown function, DUF266
  misc_feature (80)..(332): Homolog of NCBI NO: 22327910 NR Description: expressed protein [Arabidopsis thaliana]
  misc_feature (80)..(332): Homolog of NCBI NO: 17065016 NR Description: Unknown protein [Arabidopsis thaliana]
  misc_feature (81)..(325): Homolog of NCBI NO: 26452247 NR Description: unknown protein [Arabidopsis thaliana]
  misc_feature (81)..(356): Homolog of NCBI NO: 38344090 NR Description: OSJNBb0056F09.13 [Oryza sativa (japonica
  misc_feature (61)..(356): Homolog of NCBI NO: 34907318 NR Description: contains ESTs
  misc_feature (81)..(359): Homolog of NCBI NO: 15239393 NR Description: hypothetical protein [Arabidopsis thaliana]
  misc_feature (56)..(359): Homolog of NCBI NO: 15236739 NR Description: expressed protein [Arabidopsis thaliana]
  misc_feature (81)..(359): Homolog of NCBI NO: 30688302 NR Description: expressed protein [Arabidopsis thaliana]
  misc_feature (81)..(359): Homolog of NCBI NO: 15231121 NR Description: expressed protein [Arabidopsis thaliana]
  misc_feature (1)..(359): Homolog of NCBI NO: 34394888 NR Description: unknown protein [Oryza sativa (japonica
MVLSLLLFASLTALLVLAPRTASPPLPLAVVVGDEEAPPAAAGGAAGISGGGAGVEEGPEDLALYRRVTLDAGEGAAVASKVAFMFLTNSDLTFAPLWERFFAGHADQFNVYVHADPAVRLRLPPTPSFRGRFVAAKPTRRGDPSLIAAARRLLVAALLDDPANAYFALLSQHCVPLHSFPRLYEALFPPKAAHHHRLPSYIEVLTGEPQMPARYVARGDDAMLPEVPFDRFRIGSQFFTLARRHAVLVVRERRLWRKFREPCLPESQGSCYPEEHYFPTLLDMADPAGCTRYTLTRVNWTDSFEGHPHTYSAPEVSPRLIAELRQSNSSTYEHMFARKFAPDCLGPLMAIADTVIFKD

SEQ ID NO: 69310 - protein, 275 aa, Triticum aestivum
  peptide (1)..(275): Ceres Seq. ID no. 13596247
  misc_feature (44)..(155): Pfam Name: Arabidopsis protein of unknown function, DUF266 Pfam Description: Arabidopsis protein of unknown function, DUF266
  misc_feature (1)..(248): Homolog of NCBI NO: 22327910 NR Description: expressed protein [Arabidopsis thaliana]
  misc_feature (1)..(248): Homolog of NCBI NO: 17065016 NR Description: Unknown protein [Arabidopsis thaliana]
  misc_feature (1)..(241): Homolog of NCBI NO: 26452247 NR Description: unknown protein [Arabidopsis thaliana]
  misc_feature (1)..(272): Homolog of NCBI NO: 38344090 NR Description: OSJNBb0056F09.13 [Oryza sativa (japonica
  misc_feature (1)..(272): Homolog of NCBI NO: 34907318 NR Description: contains ESTs
  misc_feature (1)..(275): Homolog of NCBI NO: 15239393 NR Description: hypothetical protein [Arabidopsis thaliana]
  misc_feature (1)..(275): Homolog of NCBI NO: 15236739 NR Description: expressed protein [Arabidopsis thaliana]
  misc_feature (1)..(275): Homolog of NCBI NO: 30688302 NR Description: expressed protein [Arabidopsis thaliana]
  misc_feature (1)..(275): Homolog of NCBI NO: 15231121 NR Description: expressed protein [Arabidopsis thaliana]
  misc_feature (1)..(275): Homolog of NCBI NO: 34394888 NR Description: unknown protein [Oryza sativa (japonica
MFLTNSDLTFAPLWERFFAGHADQFNVYVHADPAVRLRLPPTPSFRGRFVAAKPTRRGDPSLIAAARRLLVAALLDDPANAYFALLSQHCVPLHSFPRLYEALFPPKAAHHHRLPSYIEVLTGEPQMPARYVARGDDAMLPEVPFDRFRIGSQFFTLARRHAVLVVRERRLWRKFREPCLPESQGSCYPEEHYFPTLLDMADPAGCTRYTLTRVNWTDSFEGHPHTYSAPEVSPRLIAELRQSNSSTYEHMFARKFAPDCLGPLMAIADTVIFKD

SEQ ID NO: 69311 - DNA, 1452 bp, Triticum aestivum
  misc_feature (1)..(1452): Ceres Seq. ID no. 13598276
aatttttttcatttcattctcggcggcctagtcctctccctttccctccccatcaccttggtcttcctcctcgattcgatccgaacccatccgattcggaagagaggtggtgatgccgcttgtggaatcgcctcaatggcgccggaaggccaccgatttcttctcttcatctagcttcaagctgaagcaggcagggcaatctgcaggggataatatagctgatgttgccggtaaggttggaacagtggtgaagagtcggtgggctatcttccaggatgctagacagcgaccgccaccaccaggagatactgtgcaggagcgcttcatctctgctgctgccaacactggagtgattctgaggaagggcatttcagagacaaaggagaaggtcgcggtgggaaaggtcaaagttgaagaggctgccaaaaaaactgcggacaaaagcaaaactattttgaacaatattgaacgctggcagaagggagttgcgagcaatgacgtttttggtgttcctgttgaagccactgtacaacgggagcaatctggtaaagctgtgcctctgatactggtgaggtgtgcagaccacttggttatatcaggcttgagtaatgagtacttgttcaaatctgaaggcggcagaaaagttcttcagcaactagtttcactttacaatgaggattcgggtgcatctttgcctgatggtgttagccctattgatgtagctgcactgatcaagtgctaccttgccagcatccccgaaccacttacaacatttgctctttatgatgagcttaaagatgcgagggttagcattgatgatcttaagaacatactgaagaagcttccaaatgtgaactacatgacactagaatttgttacagcattgctactaagagtaagccgtaaatcagcactcaacaagatggactcttgtacccttgctgtggagttcgcacctttgatcatatggcagcaaggggattctggaacagatttgcggaatcatctcagattcacactgaaaccacctccaaaaattgtggacacgacgacaagtaccactacatgggacttgctagatgaggatgatgtggatgcttcgtcgcaaatccccttggacgatggttcgcctccagactatggtgctattgaggtgatccagtgcttgattgagcatcacaatcccatattcacggatgcaaacgagactgtatggagatgacctgacctggccggctcctctttagatttctgtggtatttagctcgtgctatgtacaagttccaggtagtaggatggagtggagtgccgcgaataagtctagtctcggggacaagcattttggtccaaactttttttgtcttgttttgtgggagtaaaagtaggaactgtatatattaattgtccacatggcagagttgtcttgtgggatttgcctcgacatggctcgtc

SEQ ID NO: 69312 - protein, 369 aa, Triticum aestivum
  peptide (1)..(369): Ceres Seq. ID no. 15222287
  misc_feature (149)..(288): Pfam Name: RhoGAP domain Pfam Description: RhoGAP domain
  misc_feature (1)..(335): Homolog of NCBI NO: 25535923 NR Description: RhoGAP protein [imported] - human
  misc_feature (128)..(296): Homolog of NCBI NO: 4139447 NR Description: Chain B, Transition State Complex For Gtp By Cdc42: Comparisons Of The High Resolution Structures For Cdc42 To The Active And Catalytically Compromised Forms Of The
  misc_feature (1)..(335): Homolog of NCBI NO: 21361736 NR Description: homolog of rat nadrin; RhoGAP protein [Homo
  misc_feature (128)..(296): Homolog of NCBI NO: 3660275 NR Description: Chain A, RhoRHOGAPGDP(DOT)ALF4 COMPLEX
  misc_feature (128)..(296): Homolog of NCBI NO: 6730013 NR Description: Chain B, Crystal Structure Of The
  misc_feature (128)..(296): Homolog of NCBI NO: 3402094 NR Description: Chain A, Complex Between Cdc42hs.Gmppnp And P50
  misc_feature (128)..(296): Homolog of NCBI NO: 2624718 NR Description: Gtpase-Activation Domain From Rhogap
  misc_feature (1)..(369): Homolog of NCBI NO: 21553593 NR Description: unknown [Arabidopsis thaliana]
  misc_feature (1)..(369): Homolog of NCBI NO: 18424478 NR Description: auxin-regulated protein [Arabidopsis thaliana]
  misc_feature (1)..(369): Homolog of NCBI NO: 28564771 NR Description: putative auxin-regulated protein
MPLVESPQWRRKATDFFSSSSFKLKQAGQSAGDNIADVAGKVGTVVKSRWAIFQDARQRPPPPGDTVQERFISAAANTGVILRKGISETKEKVAVGKVKVEEAAKKTADKSKTILNNIERWQKGVASNDVFGVPVEATVQREQSGKAVPLILVRCADHLVISGLSNEYLFKSEGGRKVLQQLVSLYNEDSGASLPDGVSPIDVAALIKCYLASIPEPLTTFALYDELKDARVSIDDLKNILKKLPNVNYMTLEFVTALLLRVSRKSALNKMDSCTLAVEFAPLIIWQQGDSGTDLRNHLRFTLKPPPKIVDTTTSTTTWDLLDEDDVDASSQIPLDDGSPPDYGAIEVIQCLIEHHNPIFTDANETVWR

SEQ ID NO: 69313 - DNA, 1035 bp, Triticum aestivum
  misc_feature (1)..(1035): Ceres Seq. ID no. 13598268
aacatcctaatcgaaaaaaaagcacggttcatcccgatcgaagaggaccaaaaaggcccaaacccactcccatcccctcgtcacgcgtctcccggacccttcctcgtctctctctctctgaacaccccacccagccgaccaaatcgccgcacgagggcgcgccatggagccggcggtggagaggaaggtgcccgagcaggaggagcagctgcagccgtcgcacgcccgggccgaggacgcgccgcccgccgccgtcgaggaggaggacgaggcggaggcggaggagagcgagcgccgcaaccgcgagctcaaggccggcctccatcccctcaggcgcaagctcgtgctctggtacacccgccggacgcccgggacgaggtcgcagtcgtacgaggacaacatcaaaaagatcgtcgatttcagcactgtcgagtcgttctgggtttgctactgccacctcgcacgcccgtcctccctcccgagccccacggacctgcatcttttcaaagagggtgtccgtccactctgggaggatcctgcaaatcggaatggtggcaagtggattatacggttcaagaaggctgtttctgggcgtttctgggaggatttggtgctggttctagcgggtgatcaacttgattatagtgatgatgtttgtggcattgtgctaagttgtcgtttcaatgaagacatcctgagcgtctggaatcggaatgcatcagaccaccaggctgtgatgacattaagagactcgattaagaggcacttgaagctgccacacacctatctgatggagtacaaaccacatgacgcctctctgcgagacaactcgtcctacaggaacacatggctgagaggttaagctttatgtcgtcaaaactagtcatggccctcgttccgaactacagtaaatccttgtggatttccagttctgacgtttcaacccagccatgatgtatgattactctttgtcatgctactatgtactctccaaatttcaaatgctgaagtatcgacttttataaaaaaaaaaaa

SEQ ID NO: 69314 - protein, 232 aa, Triticum aestivum
  peptide (1)..(232): Ceres Seq. ID no. 13598269
  misc_feature (32)..(219): Homolog of NCBI NO: 29144998 NR Description: Similar to RIKEN cDNA 2700069E09 gene [Mus
  misc_feature (32)..(220): Homolog of NCBI NO: 3201958 NR Description: eIF4E-like protein 4E-LP [Mus musculus]
  misc_feature (32)..(220): Homolog of NCBI NO: 29839292 NR Description: Eukaryotic translation initiation factor 4E type (eIF-4E type 3) (eIF4E type 3) (mRNA cap-binding protein type 3) translation initiation factor 4E-like 3) (eIF4E-like protein
  misc_feature (32)..(220): Homolog of NCBI NO: 12653185 NR Description: EIF4EL3 protein [Homo sapiens]
  misc_feature (32)..(220): Homolog of NCBI NO: 4757702 NR Description: eukaryotic translation initiation factor 4E-like 3
  misc_feature (32)..(220): Homolog of NCBI NO: 3329384 NR Description: translation initiation factor 4e [Homo sapiens]
  misc_feature (17)..(228): Homolog of NCBI NO: 37590370 NR Description: Unknown (protein for MGC:73242) [Danio rerio]
  misc_feature (32)..(228): Homolog of NCBI NO: 13624327 NR Description: eukaryotic translation initiation factor 4E like 3
  misc_feature (38)..(232): Homolog of NCBI NO: 15238740 NR Description: eukaryotic cap-binding protein (gb|AAC17220.1)
  misc_feature (38)..(232): Homolog of NCBI NO: 25453555 NR Description: eukaryotic cap-binding protein [imported] -
MEPAVERKVPEQEEQLQPSHARAEDAPPAAVEEEDEAEAEESERRNRELKAGLHPLRRKLVLWYTRRTPGTRSQSYEDNIKKIVDFSTVESFWVCYCHLARPSSLPSPTDLHLFKEGVRPLWEDPANRNGGKWIIRFKKAVSGRFWEDLVLVLAGDQLDYSDDVCGIVLSCRFNEDILSVWNRNASDHQAVMTLRDSIKRHLKLPHTYLMEYKPHDASLRDNSSYRNTWLRG

SEQ ID NO: 69315 - protein, 209 aa, Triticum aestivum
  peptide (1)..(209): Ceres Seq. ID no. 13598270
NILIEKKARFIPIEEDQKGPNPLPSPRHASPGPFLVSLSLNTPPSRPNRRTRARHGAGGGEEGARAGGAAAAVARPGRGRAARRRRGGGRGGGGGERAPQPRAQGRPPSPQAQARALVHPPDARDEVAVVRGQHQKDRRFQHCRVVLGLLLPPRTPVLPPEPHGPASFQRGCPSTLGGSCKSEWWQVDYTVQEGCFWAFLGGFGAGSSG

SEQ ID NO: 69316 - protein, 206 aa, Triticum aestivum
  peptide (1)..(206): Ceres Seq. ID no. 13598271
  misc_feature (34)..(131): Pfam Name: Cupin Pfam Description: Cupin
  misc_feature (13)..(177): Homolog of NCBI NO: 5821145 NR Description: RNA binding protein [Homo sapiens]
  misc_feature (13)..(175): Homolog of NCBI NO: 30424862 NR Description: RIKEN cDNA 5033413A03 [Mus musculus]
HPNRKKSTVHPDRRGPKRPKPTPIPSSRVSRTLPRLSLSEHPTQPTKSPHEGAPWSRRWRGRCPSRRSSCSRRTPGPRTRRPPPSRRRTRRRRRRASAATASSRPASIPSGASSCSGTPAGRPGRGRSRTRTTSKRSSISALSSRSGFATATSHARPPSRAPRTCIFSKRVSVHSGRILQIGMVASGLYGSRRLFLGVSGRIWCWF

SEQ ID NO: 69317 - DNA, 1427 bp, Triticum aestivum
  misc_feature (1)..(1427): Ceres Seq. ID no. 13598277
ccggacccaaacaaacaaccctagccttccgcgtcgcccacgcgcgcctcgcctccgccgcttttctctccgccccggaaacagactcgccgcctcccatcccattgccgtcctcctcgccggccgatggcgctggagacgcggaagctctacgtcggcggcctcccgccgtcggcgcagcaggaagaactccaggagcacttcagccgctacggcgaggtgctgcgcgtccgtgtcgtccgcgactgggagacgggccagtgccgcggcttcgcgttcgtcgagtttgccgacgacgagggcccgcgcgccgcgcttcaggagaaggagaaggccaaccatgtcttcggcgaccgcacggtggatgttaaacgagctcggaccaggccaatgcgataccaaaatgagcaatcattctaccaatacactttaaatcagagcccaattcagagcccaattcagagcccagttcacaaccagtggtacactcagtcttctagtaacaactcatatgctggtaatggtcatagaacttgtgatccaaacaaggtctttgttggtgggctacgaggtaatgttaccaaggagcacctccagagctattttgagaagtttggtagaataacagatgttgttgtgatacgcgagggggctagtcagagatcaagaggctttggtttcattacatttgattcagaggaggctatggtaaatgtcttggagagtaaattccatgacttgaacggtacaaaggttgaaactaagagagctattcccaagggtcatagctactaccaggataggctacaatataatcctatgatatggaatggcaacaatcctcccattggctttgctggagcatacccacctcacatgcagcatattgttaataatcattatgtgatgcctatgccacaatacatgtgcttaccagagtatgtctacatgatgaatggaggagtccccttgacaaggcaaggttcactctatacaggctacggaacacaaattggatatggttatgatcatgtgaatacaaatcgttttggtgctcaacttggggaagctaaaagtgataacaaattgattgaagacataacagagcaacaagtggacctaccagctaccaggcaagaaactttgggcatggatgaccaggctactgttacaacattgtaatgatggacagcaacttgttatctgggaactcggcaactgtgaagaacttgagatgaaattctttggtgacaatacgtgtgtggaaatcctgcgttactttggaccttgtgtacattgcaaccggcaatagaccctcccgcaccatgtttaaactctatgttactgccgttccattttttttggtgacgaacctgttttgaaattggtctgggttacacatgttacctgtgcgtggttatctgctc

SEQ ID NO: 69318 - protein, 351 aa, Triticum aestivum
  peptide (1)..(351): Ceres Seq. ID no. 15222288
  misc_feature (142)..(211): Pfam Name: RNA recognition motif. (a.k.a. RRM, RBD, or RNP domain) Pfam Description: RNA recognition motif. (a.k.a. RRM, RBD, or RNP
  misc_feature (2)..(87): Homolog of NCBI NO: 7487039 NR Description: hypothetical protein T15N24.100 - Arabidopsis
  misc_feature (113)..(319): Homolog of NCBI NO: 7487039 NR Description: hypothetical protein T15N24.100 - Arabidopsis
  misc_feature (1)..(87): Homolog of NCBI NO: 15226106 NR Description: heterogeneous nuclear ribonucleoprotein (hnRNP),
  misc_feature (112)..(309): Homolog of NCBI NO: 15226106 NR Description: heterogeneous nuclear ribonucleoprotein (hnRNP),
  misc_feature (2)..(87): Homolog of NCBI NO: 18416794 NR Description: heterogeneous nuclear ribonucleoprotein (hnRNP),
  misc_feature (113)..(319): Homolog of NCBI NO: 18416794 NR Description: heterogeneous nuclear ribonucleoprotein (hnRNP),
  misc_feature (1)..(304): Homolog of NCBI NO: 37535274 NR Description: putative RNA-binding protein
  misc_feature (3)..(96): Homolog of NCBI NO: 40539059 NR Description: putative RNA binding protein
  misc_feature (141)..(305): Homolog of NCBI NO: 40539059 NR Description: putative RNA binding protein
  misc_feature (4)..(281): Homolog of NCBI NO: 28201305 NR Description: putative RNA binding protein
MALETRKLYVGGLPPSAQQEELQEHFSRYGEVLRVRVVRDWETGQCRGFAFVEFADDEGPRAALQEKEKANHVFGDRTVDVKRARTRPMRYQNEQSFYQYTLNQSPIQSPIQSPVHNQWYTQSSSNNSYAGNGHRTCDPNKVFVGGLRGNVTKEHLQSYFEKFGRITDVVVIREGASQRSRGFGFITFDSEEAMVNVLESKFHDLNGTKVETKRAIPKGHSYYQDRLQYNPMIWNGNNPPIGFAGAYPPHMQHIVNNHYVMPMPQYMCLPEYVYMMNGGVPLTRQGSLYTGYGTQIGYGYDHVNTNRFGAQLGEAKSDNKLIEDITEQQVDLPATRQETLGMDDQATVTTL

SEQ ID NO: 69319 - protein, 263 aa, Triticum aestivum
  peptide (1)..(263): Ceres Seq. ID no. 15222289
  misc_feature (54)..(123): Pfam Name: RNA recognition motif. (a.k.a. RRM, RBD, or RNP domain) Pfam Description: RNA recognition motif. (a.k.a. RRM, RBD, or RNP
  misc_feature (43)..(130): Homolog of NCBI NO: 30696616 NR Description: RNA recognition motif (RRM)-containing protein
  misc_feature (43)..(130): Homolog of NCBI NO: 22531168 NR Description: RNA-binding protein-like [Arabidopsis thaliana]
  misc_feature (1)..(28): Homolog of NCBI NO: 30696616 NR Description: RNA recognition motif (RRM)-containing protein
  misc_feature (1)..(28): Homolog of NCBI NO: 22531168 NR Description: RNA-binding protein-like [Arabidopsis thaliana]
  misc_feature (25)..(231): Homolog of NCBI NO: 7487039 NR Description: hypothetical protein T15N24.100 - Arabidopsis
  misc_feature (24)..(221): Homolog of NCBI NO: 15226106 NR Description: heterogeneous nuclear ribonucleoprotein (hnRNP),
  misc_feature (25)..(231): Homolog of NCBI NO: 18416794 NR Description: heterogeneous nuclear ribonucleoprotein (hnRNP),
  misc_feature (1)..(216): Homolog of NCBI NO: 37535274 NR Description: putative RNA-binding protein
  misc_feature (53)..(217): Homolog of NCBI NO: 40539059 NR Description: putative RNA binding protein
  misc_feature (1)..(193): Homolog of NCBI NO: 28201305 NR Description: putative RNA binding protein
MRYQNEQSFYQYTLNQSPIQSPIQSPVHNQWYTQSSSNNSYAGNGHRTCDPNKVFVGGLRGNVTKEHLQSYFEKFGRITDVVVIREGASQRSRGFGFITFDSEEAMVNVLESKFHDLNGTKVETKRAIPKGHSYYQDRLQYNPMIWNGNNPPIGFAGAYPPHMQHIVNNHYVMPMPQYMCLPEYVYMMNGGVPLTRQGSLYTGYGTQIGYGYDHVNTNRFGAQLGEAKSDNKLIEDITEQQVDLPATRQETLGMDDQATVTTL

SEQ ID NO: 69320 - DNA, 808 bp, Arabidopsis thaliana
  misc_feature (1)..(808): Ceres Seq. ID no. 4904750
  misc_feature: MA Experiment ID: 108462 Result: Up-regulated in Transcription
  misc_feature: MA Experiment 108462 PARAMETER Experiment Name: At_Germinating_Seeds_cDNA_P Parameter: Age (day) Value: 2 vs. 0
  misc_feature: MA Experiment 108462 PARAMETER Experiment Name: At_Germinating_Seeds_cDNA_P Parameter: Tissue Value: Germinating Seeds
  misc_feature: MA Experiment ID: 108464 Result: Up-regulated in Transcription
  misc_feature: MA Experiment 108464 PARAMETER Experiment Name: At_Germinating_Seeds_cDNA_P Parameter: Age (day) Value: 4 vs. 0
  misc_feature: MA Experiment 108464 PARAMETER Experiment Name: At_Germinating_Seeds_cDNA_P Parameter: Tissue Value: Germinating Seeds
  misc_feature: MA Experiment ID: 108501 Result: Down-regulated in Transcription
  misc_feature: MA Experiment 108501 PARAMETER Experiment Name: At_ap2_floral_buds_cDNA_P Parameter: Plant Line Value: ap2 (Ler.)
  misc_feature: MA Experiment 108501 PARAMETER Experiment Name: At_ap2_floral_buds_cDNA_P Parameter: Tissue Value: Closed Flower
  misc_feature: MA Experiment ID: 108574 Result: Down-regulated in Transcription
  misc_feature: MA Experiment 108574 PARAMETER Experiment Name: At_Wounding__cDNA_P Parameter: Timepoint (hr) Value: 1
  misc_feature: MA Experiment 108574 PARAMETER Experiment Name: At_Wounding__cDNA_P Parameter: Tissue Value: Aerial
  misc_feature: MA Experiment 108574 PARAMETER Experiment Name: At_Wounding__cDNA_P Parameter: Treatment Value: Wounding vs. No Wounding
  misc_feature: MA Experiment ID: 108585 Result: Up-regulated in Transcription
  misc_feature: MA Experiment 108585 PARAMETER Experiment Name: At_5mM_NaNP_cDNA_P Parameter: Timepoint (hr) Value: 6
  misc_feature: MA Experiment 108585 PARAMETER Experiment Name: At_5mM_NaNP_cDNA_P Parameter: Tissue Value: Aerial
  misc_feature: MA Experiment 108585 PARAMETER Experiment Name: At_5mM_NaNP_cDNA_P Parameter: Treatment Value: null
  misc_feature: MA Experiment ID: 108594 Result: Up-regulated in Transcription
  misc_feature: MA Experiment 108594 PARAMETER Experiment Name: At_Ler-rhl_Root_cDNA_P Parameter: Plant Line Value: null
  misc_feature: MA Experiment ID: 20000144 Result: Down-regulated in Transcription
  misc_feature: MA Experiment 20000144 PARAMETER Experiment Name: At_42deg_Heat_cDNA_P Parameter: Temperature (deg C) Value: 42 vs. 22
  misc_feature: MA Experiment 20000144 PARAMETER Experiment Name: At_42deg_Heat_cDNA_P Parameter: Timepoint (hr) Value: 1
  misc_feature: MA Experiment 20000144 PARAMETER Experiment Name: At_42deg_Heat_cDNA_P Parameter: Tissue Value: Aerial
  misc_feature: MA Experiment ID: 20000224 Result: Down-regulated in Transcription
  misc_feature: MA Experiment ID: 20000441 Result: Up-regulated in Transcription
  misc_feature: MA Experiment 20000441 PARAMETER Experiment Name: At_1uM_BR-BRZ__P Parameter: Tissue Value: Shoot Apices
  misc_feature: MA Experiment 20000441 PARAMETER Experiment Name: At_1uM_BR-BRZ__P Parameter: Treatment Value: 1uM BR vs. No Treatment
  misc_feature: MA Experiment ID: 20000573 Result: Down-regulated in Transcription
  misc_feature: MA Experiment 20000573 PARAMETER Experiment Name: At_100uM_ABA_Mutants__P Parameter: Organism Value: A. thaliana
  misc_feature: MA Experiment 20000573 PARAMETER Experiment Name: At_100uM_ABA_Mutants__P Parameter: Plant Line Value: CS22 vs. Ler wt
  misc_feature: MA Experiment 20000573 PARAMETER Experiment Name: At_100uM_ABA_Mutants__P Parameter: Timepoint (hr) Value: N/A
  misc_feature: MA Experiment 20000573 PARAMETER Experiment Name: At_100uM_ABA_Mutants__P Parameter: Tissue Value: Whole Plant
  misc_feature: MA Experiment 20000573 PARAMETER Experiment Name: At_100uM_ABA_Mutants__P Parameter: Treatment Value: None
  misc_feature: MA Experiment ID: 20001247 Result: Up-regulated in Transcription
  misc_feature: MA Experiment 20001247 PARAMETER Experiment Name: At_Far-red-induction_P Parameter: Age (day) Value: 7
  misc_feature: MA Experiment 20001247 PARAMETER Experiment Name: At_Far-red-induction_P Parameter: Light Value: Far-red vs. White
  misc_feature: MA Experiment 20001247 PARAMETER Experiment Name: At_Far-red-induction_P Parameter: Organism Value: A. thaliana
  misc_feature: MA Experiment 20001247 PARAMETER Experiment Name: At_Far-red-induction_P Parameter: Plant Line Value: Columbia
  misc_feature: MA Experiment 20001247 PARAMETER Experiment Name: At_Far-red-induction_P Parameter: Timepoint (hr) Value: 1
  misc_feature: MA Experiment 20001247 PARAMETER Experiment Name: At_Far-red-induction_P Parameter: Tissue Value: Whole Plant
  misc_feature: MA Experiment ID: 20001450 Result: Up-regulated in Transcription
  misc_feature: MA Experiment 20001450 PARAMETER Experiment Name: At_Far-red-induction_P Parameter: Age (day) Value: 7
  misc_feature: MA Experiment 20001450 PARAMETER Experiment Name: At_Far-red-induction_P Parameter: Light Value: Far-red vs. White
  misc_feature: MA Experiment 20001450 PARAMETER Experiment Name: At_Far-red-induction_P Parameter: Organism Value: A. thaliana
  misc_feature: MA Experiment 20001450 PARAMETER Experiment Name: At_Far-red-induction_P Parameter: Plant Line Value: Columbia
  misc_feature: MA Experiment 20001450 PARAMETER Experiment Name: At_Far-red-induction_P Parameter: Timepoint (hr) Value: 8
  misc_feature: MA Experiment 20001450 PARAMETER Experiment Name: At_Far-red-induction_P Parameter: Tissue Value: Whole Plant
  misc_feature: MA Experiment ID: 20001451 Result: Up-regulated in Transcription
  misc_feature: MA Experiment 20001451 PARAMETER Experiment Name: At_Far-red-induction_P Parameter: Age (day) Value: 7
  misc_feature: MA Experiment 20001451 PARAMETER Experiment Name: At_Far-red-induction_P Parameter: Light Value: Far-red vs. White
  misc_feature: MA Experiment 20001451 PARAMETER Experiment Name: At_Far-red-induction_P Parameter: Organism Value: A. thaliana
  misc_feature: MA Experiment 20001451 PARAMETER Experiment Name: At_Far-red-induction_P Parameter: Plant Line Value: Columbia
  misc_feature: MA Experiment 20001451 PARAMETER Experiment Name: At_Far-red-induction_P Parameter: Timepoint (hr) Value: 24
  misc_feature: MA Experiment 20001451 PARAMETER Experiment Name: At_Far-red-induction_P Parameter: Tissue Value: Whole Plant
aactcgacacatcgagtcaactcgctaccagcactgatcggtttcccaattccgtccaccgtaactgccgtatccagccgttaacggccggctccgaagaagagtcctccgatcataaacggcgcgtttctcgggatccgaaagcgtgcaatacgctgcgtggatcttcatgaaatcgtccgccgacgagttatcccgactatttctcgctacatcgggatgacagatcctggctagtcgccggtaagctgatttgatctcttgactcgtcgagccgacgggaatttcaaggatctcgtagagagacgcggttgctgaaaatcgctgcgggatttggcgtaatctcggtagatcttcggcgcaggtgtaggacgcggtggttgtagaaagcgacggcgagatccgggaaatgcgtgacggtggtgaagtagaagagaacgacggagaagaagaagaagaagaagagagaaatggagtagcgaagaaggttggggaagaagaaagcatcgtgaaacgacggcgtttttgtttgtcttttggtttaagttccgatttgggttttgtgatgcagtgtgatttgagatgagaaattagaaaggtttatttataggggaagaagtgattagtacgtataacgtttagttagcttttaaataattgaagattaggcagattaatgtatcttgtccggttaagcaaaatcgaaccgggttgggtcagtgtgttttcggatcttgagaaagctgagtcagactaaaaggcttatccacagttgtaaataatgggagaagtgagataagattcaacg

SEQ ID NO: 69321 - protein, 58 aa, Arabidopsis thaliana; identical to SEQ ID NO: 268
  peptide (1)..(58): Ceres Seq. ID no. 4904751

SEQ ID NO: 69322 - protein, 56 aa, Arabidopsis thaliana
  peptide (1)..(56): Ceres Seq. ID no. 4904752
LDTSSQLATSTDRFPNSVHRNCRIQPLTAGSEEESSDHKRRVSRDPKACNTLRGSS

SEQ ID NO: 69323 - DNA, 760 bp, Arabidopsis thaliana
  misc_feature (1)..(760): Ceres Seq. ID no. 4904829
  misc_feature: MA Experiment ID: 108461 Result: Up-regulated in Transcription
  misc_feature: MA Experiment 108461 PARAMETER Experiment Name: At_Germinating_Seeds_cDNA_P Parameter: Age (day) Value: 1 vs. 0
  misc_feature: MA Experiment 108461 PARAMETER Experiment Name: At_Germinating_Seeds_cDNA_P Parameter: Tissue Value: Germinating Seeds
  misc_feature: MA Experiment ID: 108462 Result: Up-regulated in Transcription
  misc_feature: MA Experiment 108462 PARAMETER Experiment Name: At_Germinating_Seeds_cDNA_P Parameter: Age (day) Value: 2 vs. 0
  misc_feature: MA Experiment 108462 PARAMETER Experiment Name: At_Germinating_Seeds_cDNA_P Parameter: Tissue Value: Germinating Seeds
  misc_feature: MA Experiment ID: 108463 Result: Up-regulated in Transcription
  misc_feature: MA Experiment 108463 PARAMETER Experiment Name: At_Germinating_Seeds_cDNA_P Parameter: Age (day) Value: 3 vs. 0
  misc_feature: MA Experiment 108463 PARAMETER Experiment Name: At_Germinating_Seeds_cDNA_P Parameter: Tissue Value: Germinating Seeds
  misc_feature: MA Experiment ID: 108464 Result: Up-regulated in Transcription
  misc_feature: MA Experiment 108464 PARAMETER Experiment Name: At_Germinating_Seeds_cDNA_P Parameter: Age (day) Value: 4 vs. 0
  misc_feature: MA Experiment 108464 PARAMETER Experiment Name: At_Germinating_Seeds_cDNA_P Parameter: Tissue Value: Germinating Seeds
  misc_feature: MA Experiment ID: 108488 Result: Up-regulated in Transcription
  misc_feature: MA Experiment ID: 108561 Result: Down-regulated in Transcription
  misc_feature: MA Experiment 108561 PARAMETER Experiment Name: At_100uM_ABA_cDNA_P Parameter: Timepoint (hr) Value: 6
  misc_feature: MA Experiment 108561 PARAMETER Experiment Name: At_100uM_ABA_cDNA_P Parameter: Tissue Value: Aerial
  misc_feature: MA Experiment 108561 PARAMETER Experiment Name: At_100uM_ABA_cDNA_P Parameter: Treatment Value: 100uM ABA vs. No Treatment
  misc_feature: MA Experiment ID: 108573 Result: Down-regulated in Transcription
  misc_feature: MA Experiment 108573 PARAMETER Experiment Name: At_Drought_cDNA_P Parameter: Timepoint (hr) Value: 6
  misc_feature: MA Experiment 108573 PARAMETER Experiment Name: At_Drought_cDNA_P Parameter: Tissue Value: Aerial
  misc_feature: MA Experiment 108573 PARAMETER Experiment Name: At_Drought_cDNA_P Parameter: Treatment Value: Drought vs. No Drought
  misc_feature: MA Experiment ID: 108577 Result: Down-regulated in Transcription
  misc_feature: MA Experiment 108577 PARAMETER Experiment Name: At_42deg_Heat_cDNA_P Parameter: Temperature (deg C) Value: 42 vs. 22
  misc_feature: MA Experiment 108577 PARAMETER Experiment Name: At_42deg_Heat_cDNA_P Parameter: Timepoint (hr) Value: 6
  misc_feature: MA Experiment 108577 PARAMETER Experiment Name: At_42deg_Heat_cDNA_P Parameter: Tissue Value: Aerial
  misc_feature: MA Experiment ID: 108579 Result: Up-regulated in Transcription
  misc_feature: MA Experiment 108579 PARAMETER Experiment Name: At_4deg_Cold_cDNA_P Parameter: Temperature (deg C) Value: 4 vs. 22
  misc_feature: MA Experiment 108579 PARAMETER Experiment Name: At_4deg_Cold_cDNA_P Parameter: Timepoint (hr) Value: 6
  misc_feature: MA Experiment 108579 PARAMETER Experiment Name: At_4deg_Cold_cDNA_P Parameter: Tissue Value: Aerial
  misc_feature: MA Experiment ID: 108595 Result: Down-regulated in Transcription
  misc_feature: MA Experiment 108595 PARAMETER Experiment Name: At_Ler-pi_Ovule_cDNA_P Parameter: Plant Line Value: null
  misc_feature: MA Experiment ID: 108605 Result: Down-regulated in Transcription
  misc_feature: MA Experiment 108605 PARAMETER Experiment Name: At_100uM_ABA_cDNA_P Parameter: Timepoint (hr) Value: 6
  misc_feature: MA Experiment 108605 PARAMETER Experiment Name: At_100uM_ABA_cDNA_P Parameter: Tissue Value: Aerial
  misc_feature: MA Experiment 108605 PARAMETER Experiment Name: At_100uM_ABA_cDNA_P Parameter: Treatment Value: 100uM ABA vs. No Treatment
  misc_feature: MA Experiment ID: 20000069 Result: Down-regulated in Transcription
  misc_feature: MA Experiment 20000069 PARAMETER Experiment Name: At_100uM_ABA_Mutants_cDNA_P Parameter: Plant Line Value: CS23
  misc_feature: MA Experiment 20000069 PARAMETER Experiment Name: At_100uM_ABA_Mutants_cDNA_P Parameter: Timepoint (hr) Value: 6
  misc_feature: MA Experiment 20000069 PARAMETER Experiment Name: At_100uM_ABA_Mutants_cDNA_P Parameter: Tissue Value: Aerial
  misc_feature: MA Experiment 20000069 PARAMETER Experiment Name: At_100uM_ABA_Mutants_cDNA_P Parameter: Treatment Value: 100uM ABA vs. No Treatment
  misc_feature: MA Experiment ID: 20000070 Result: Down-regulated in Transcription
  misc_feature: MA Experiment 20000070 PARAMETER Experiment Name: At_100uM_ABA_Mutants_cDNA_P Parameter: Plant Line Value: CS24
  misc_feature: MA Experiment 20000070 PARAMETER Experiment Name: At_100uM_ABA_Mutants_cDNA_P Parameter: Timepoint (hr) Value: 6
  misc_feature: MA Experiment 20000070 PARAMETER Experiment Name: At_100uM_ABA_Mutants_cDNA_P Parameter: Tissue Value: Aerial
  misc_feature: MA Experiment 20000070 PARAMETER Experiment Name: At_100uM_ABA_Mutants_cDNA_P Parameter: Treatment Value: 100uM ABA vs. No Treatment
  misc_feature: MA Experiment ID: 20000071 Result: Down-regulated in Transcription
  misc_feature: MA Experiment 20000071 PARAMETER Experiment Name: At_100uM_ABA_Mutants_cDNA_P Parameter: Plant Line Value: CS8104
  misc_feature: MA Experiment 20000071 PARAMETER Experiment Name: At_100uM_ABA_Mutants_cDNA_P Parameter: Timepoint (hr) Value: 6
  misc_feature: MA Experiment 20000071 PARAMETER Experiment Name: At_100uM_ABA_Mutants_cDNA_P Parameter: Tissue Value: Aerial
  misc_feature: MA Experiment 20000071 PARAMETER Experiment Name: At_100uM_ABA_Mutants_cDNA_P Parameter: Treatment Value: 100uM ABA vs. No Treatment
  misc_feature: MA Experiment ID: 20000086 Result: Down-regulated in Transcription
  misc_feature: MA Experiment 20000086 PARAMETER Experiment Name: At_100uM_ABA_Mutants_cDNA_P Parameter: Plant Line Value: CS22
  misc_feature: MA Experiment 20000086 PARAMETER Experiment Name: At_100uM_ABA_Mutants_cDNA_P Parameter: Timepoint (hr) Value: 6
  misc_feature: MA Experiment 20000086 PARAMETER Experiment Name: At_100uM_ABA_Mutants_cDNA_P Parameter: Tissue Value: Aerial
  misc_feature: MA Experiment 20000086 PARAMETER Experiment Name: At_100uM_ABA_Mutants_cDNA_P Parameter: Treatment Value: 100uM ABA vs. No Treatment
  misc_feature: MA Experiment ID: 20000088 Result: Down-regulated in Transcription
  misc_feature: MA Experiment 20000088 PARAMETER Experiment Name: At_100uM_ABA_Mutants_cDNA_P Parameter: Plant Line Value: Landsberg
  misc_feature: MA Experiment 20000088 PARAMETER Experiment Name: At_100uM_ABA_Mutants_cDNA_P Parameter: Timepoint (hr) Value: 6
  misc_feature: MA Experiment 20000088 PARAMETER Experiment Name: At_100uM_ABA_Mutants_cDNA_P Parameter: Tissue Value: Aerial
  misc_feature: MA Experiment 20000088 PARAMETER Experiment Name: At_100uM_ABA_Mutants_cDNA_P Parameter: Treatment Value: 100uM ABA vs. No Treatment
  misc_feature: MA Experiment ID: 20000111 Result: Down-regulated in Transcription
  misc_feature: MA Experiment 20000111 PARAMETER Experiment Name: At_42deg_Heat_cDNA_P Parameter: Temperature (deg C) Value: 42 vs. 22
  misc_feature: MA Experiment 20000111 PARAMETER Experiment Name: At_42deg_Heat_cDNA_P Parameter: Timepoint (hr) Value: 6
  misc_feature: MA Experiment 20000111 PARAMETER Experiment Name: At_42deg_Heat_cDNA_P Parameter: Tissue Value: Aerial
  misc_feature: MA Experiment ID: 20000117 Result: Down-regulated in Transcription
  misc_feature: MA Experiment 20000117 PARAMETER Experiment Name: At_100uM_ABA_Mutants_cDNA_P Parameter: Plant Line Value: Columbia
  misc_feature: MA Experiment 20000117 PARAMETER Experiment Name: At_100uM_ABA_Mutants_cDNA_P Parameter: Timepoint (hr) Value: 6
  misc_feature: MA Experiment 20000117 PARAMETER Experiment Name: At_100uM_ABA_Mutants_cDNA_P Parameter: Tissue Value: Aerial
  misc_feature: MA Experiment 20000117 PARAMETER Experiment Name: At_100uM_ABA_Mutants_cDNA_P Parameter: Treatment Value: 100uM ABA vs. No Treatment
  misc_feature: MA Experiment ID: 20000144 Result: Down-regulated in Transcription
  misc_feature: MA Experiment 20000144 PARAMETER Experiment Name: At_42deg_Heat_cDNA_P Parameter: Temperature (deg C) Value: 42 vs. 22
  misc_feature: MA Experiment 20000144 PARAMETER Experiment Name: At_42deg_Heat_cDNA_P Parameter: Timepoint (hr) Value: 1
  misc_feature: MA Experiment 20000144 PARAMETER Experiment Name: At_42deg_Heat_cDNA_P Parameter: Tissue Value: Aerial
aaaaatttagacaaatatttctttaactccaacacaaaagtacacatagcattaggttattcctaagatttctgggcttctggtcctaaaatcccattcactactgacgtagcgacaagaactccgacgaactcagccgccacgacggctccagcttgtgtcaatccattaaagctaaccgccgtcacgatttccttctctgccgtctctacacctctctccgccgcttctaatcctttctccgccgcatcaacgcctttctccgccgtctcaaagccttctttcacgatctccaccgcttcttcttctgctttcttcagtttctttcttataccaaataacggaatattctccgccattgatgcaggctgaagtcccgtcactaccgtcgctgccgtcaacgaaaataacagattcctgcgagaggcgccggtcagcgagaacgaagaaagcgcgggtttgttagaatgcgccgctcgtgggctaacatgcgcggttcttgcgcaacgcgcctgaagagctccactgccgccgctgagtaaagaaagcgaaacagtcgaagccattttttagatgatctcacaagaaacgaaaaaagctctcagatgtgaaatagaaaatacgaaaagttttgataatatataagataacaaaataatttcattgtcaattgacgtgacacgtcatctccattgagattctttgataaatgggtataaaaaagattataattaaagaataataaaacattttgtacgtt

SEQ ID NO: 69324 - protein, 34 aa, Arabidopsis thaliana
  peptide (1)..(34): Ceres Seq. ID no. 4904830
MQAEVPSLPSLPSTKITDSCERRRSARTKKARVC

SEQ ID NO: 69325 - DNA, 1092 bp, Arabidopsis thaliana
  misc_feature (1)..(1092): Ceres Seq. ID no. 4905118
  misc_feature: MA Experiment ID: 108461 Result: Up-regulated in Transcription
  misc_feature: MA Experiment 108461 PARAMETER Experiment Name: At_Germinating_Seeds_cDNA_P Parameter: Age (day) Value: 1 vs. 0
  misc_feature: MA Experiment 108461 PARAMETER Experiment Name: At_Germinating_Seeds_cDNA_P Parameter: Tissue Value: Germinating Seeds
  misc_feature: MA Experiment ID: 108462 Result: Up-regulated in Transcription
  misc_feature: MA Experiment 108462 PARAMETER Experiment Name: At_Germinating_Seeds_cDNA_P Parameter: Age (day) Value: 2 vs. 0
  misc_feature: MA Experiment 108462 PARAMETER Experiment Name: At_Germinating_Seeds_cDNA_P Parameter: Tissue Value: Germinating Seeds
  misc_feature: MA Experiment ID: 108463 Result: Up-regulated in Transcription
  misc_feature: MA Experiment 108463 PARAMETER Experiment Name: At_Germinating_Seeds_cDNA_P Parameter: Age (day) Value: 3 vs. 0
  misc_feature: MA Experiment 108463 PARAMETER Experiment Name: At_Germinating_Seeds_cDNA_P Parameter: Tissue Value: Germinating Seeds
  misc_feature: MA Experiment ID: 108464 Result: Up-regulated in Transcription
  misc_feature: MA Experiment 108464 PARAMETER Experiment Name: At_Germinating_Seeds_cDNA_P Parameter: Age (day) Value: 4 vs. 0
  misc_feature: MA Experiment 108464 PARAMETER Experiment Name: At_Germinating_Seeds_cDNA_P Parameter: Tissue Value: Germinating Seeds
  misc_feature: MA Experiment ID: 108488 Result: Up-regulated in Transcription
  misc_feature: MA Experiment ID: 108561 Result: Down-regulated in Transcription
  misc_feature: MA Experiment 108561 PARAMETER Experiment Name: At_100uM_ABA_cDNA_P Parameter: Timepoint (hr) Value: 6
  misc_feature: MA Experiment 108561 PARAMETER Experiment Name: At_100uM_ABA_cDNA_P Parameter: Tissue Value: Aerial
  misc_feature: MA Experiment 108561 PARAMETER Experiment Name: At_100uM_ABA_cDNA_P Parameter: Treatment Value: 100uM ABA vs. No Treatment
  misc_feature: MA Experiment ID: 108595 Result: Down-regulated in Transcription
  misc_feature: MA Experiment 108595 PARAMETER Experiment Name: At_Ler-pi_Ovule_cDNA_P Parameter: Plant Line Value: null
  misc_feature: MA Experiment ID: 20000030 Result: Down-regulated in Transcription
  misc_feature: MA Experiment 20000030 PARAMETER Experiment Name: At_CS6630_Roots_cDNA_P Parameter: Plant Line Value: CS6630 vs. WS
  misc_feature: MA Experiment 20000030 PARAMETER Experiment Name: At_CS6630_Roots_cDNA_P Parameter: Tissue Value: Roots
  misc_feature: MA Experiment ID: 20000069 Result: Down-regulated in Transcription
  misc_feature: MA Experiment 20000069 PARAMETER Experiment Name: At_100uM_ABA_Mutants_cDNA_P Parameter: Plant Line Value: CS23
  misc_feature: MA Experiment 20000069 PARAMETER Experiment Name: At_100uM_ABA_Mutants_cDNA_P Parameter: Timepoint (hr) Value: 6
  misc_feature: MA Experiment 20000069 PARAMETER Experiment Name: At_100uM_ABA_Mutants_cDNA_P Parameter: Tissue Value: Aerial
  misc_feature: MA Experiment 20000069 PARAMETER Experiment Name: At_100uM_ABA_Mutants_cDNA_P Parameter: Treatment Value: 100uM ABA vs. No Treatment
  misc_feature: MA Experiment ID: 20000071 Result: Down-regulated in Transcription
  misc_feature: MA Experiment 20000071 PARAMETER Experiment Name: At_100uM_ABA_Mutants_cDNA_P Parameter: Plant Line Value: CS8104
  misc_feature: MA Experiment 20000071 PARAMETER Experiment Name: At_100uM_ABA_Mutants_cDNA_P Parameter: Timepoint (hr) Value: 6
  misc_feature: MA Experiment 20000071 PARAMETER Experiment Name: At_100uM_ABA_Mutants_cDNA_P Parameter: Tissue Value: Aerial
  misc_feature: MA Experiment 20000071 PARAMETER Experiment Name: At_100uM_ABA_Mutants_cDNA_P Parameter: Treatment Value: 100uM ABA vs. No Treatment
  misc_feature: MA Experiment ID: 20000072 Result: Down-regulated in Transcription
  misc_feature: MA Experiment 20000072 PARAMETER Experiment Name: At_100uM_ABA_Mutants_cDNA_P Parameter: Plant Line Value: CS8105
  misc_feature: MA Experiment 20000072 PARAMETER Experiment Name: At_100uM_ABA_Mutants_cDNA_P Parameter: Timepoint (hr) Value: 6
  misc_feature: MA Experiment 20000072 PARAMETER Experiment Name: At_100uM_ABA_Mutants_cDNA_P Parameter: Tissue Value: Aerial
  misc_feature: MA Experiment 20000072 PARAMETER Experiment Name: At_100uM_ABA_Mutants_cDNA_P Parameter: Treatment Value: 100uM ABA vs. No Treatment
  misc_feature: MA Experiment ID: 20000184 Result: Up-regulated in Transcription
  misc_feature: MA Experiment 20000184 PARAMETER Experiment Name: At_Shoots__P Parameter: Age (day) Value: 7
  misc_feature: MA Experiment 20000184 PARAMETER Experiment Name: At_Shoots__P Parameter: Tissue Value: Shoots vs. Whole Plant
  misc_feature: MA Experiment ID: 20000224 Result: Down-regulated in Transcription
  misc_feature: MA Experiment ID: 20000234 Result: Up-regulated in Transcription
  misc_feature: MA Experiment 20000234 PARAMETER Experiment Name: At_Siliques_P Parameter: Age (day) Value: 21
  misc_feature: MA Experiment 20000234 PARAMETER Experiment Name: At_Siliques_P Parameter: Organism Value: A. thaliana
  misc_feature: MA Experiment 20000234 PARAMETER Experiment Name: At_Siliques_P Parameter: Plant Line Value: WS
  misc_feature: MA Experiment 20000234 PARAMETER Experiment Name: At_Siliques_P Parameter: Tissue Value: Less Than 5mm Siliques vs. Whole Plant
  misc_feature: MA Experiment ID: 20000235 Result: Up-regulated in Transcription
  misc_feature: MA Experiment 20000235 PARAMETER Experiment Name: At_Siliques_P Parameter: Age (day) Value: 21
  misc_feature: MA Experiment 20000235 PARAMETER Experiment Name: At_Siliques_P Parameter: Organism Value: A. thaliana
  misc_feature: MA Experiment 20000235 PARAMETER Experiment Name: At_Siliques_P Parameter: Plant Line Value: WS
  misc_feature: MA Experiment 20000235 PARAMETER Experiment Name: At_Siliques_P Parameter: Tissue Value: 5-10mm Siliques vs. Whole Plant
  misc_feature: MA Experiment ID: 20000264 Result: Up-regulated in Transcription
  misc_feature: MA Experiment 20000264 PARAMETER Experiment Name: At_Open_Flower_P Parameter: Age (day) Value: 21
  misc_feature: MA Experiment 20000264 PARAMETER Experiment Name: At_Open_Flower_P Parameter: Plant Line Value: WS
  misc_feature: MA Experiment 20000264 PARAMETER Experiment Name: At_Open_Flower_P Parameter: Tissue Value: Open Flower vs. Whole Plant
  misc_feature: MA Experiment ID: 20000286 Result: Up-regulated in Transcription
  misc_feature: MA Experiment 20000286 PARAMETER Experiment Name: At_Open_Flower_P Parameter: Age (day) Value: 21
  misc_feature: MA Experiment 20000286 PARAMETER Experiment Name: At_Open_Flower_P Parameter: Plant Line Value: WS
  misc_feature: MA Experiment 20000286 PARAMETER Experiment Name: At_Open_Flower_P Parameter: Tissue Value: Half Open vs. Whole Plant
  misc_feature: MA Experiment ID: 20000451 Result: Down-regulated in Transcription
  misc_feature: MA Experiment 20000451 PARAMETER Experiment Name: At_CS6879_Shoots-Roots_P Parameter: Age (day) Value: 14
  misc_feature: MA Experiment 20000451 PARAMETER Experiment Name: At_CS6879_Shoots-Roots_P Parameter: Organism Value: A. thaliana
  misc_feature: MA Experiment 20000451 PARAMETER Experiment Name: At_CS6879_Shoots-Roots_P Parameter: Plant Line Value: CS6879 vs. WS
  misc_feature: MA Experiment 20000451 PARAMETER Experiment Name: At_CS6879_Shoots-Roots_P Parameter: Tissue Value: Roots
  misc_feature: MA Experiment ID: 20000452 Result: Down-regulated in Transcription
  misc_feature: MA Experiment 20000452 PARAMETER Experiment Name: At_CS6879_Shoots-Roots_P Parameter: Age (day) Value: 14
  misc_feature: MA Experiment 20000452 PARAMETER Experiment Name: At_CS6879_Shoots-Roots_P Parameter: Organism Value: A. thaliana
  misc_feature: MA Experiment 20000452 PARAMETER Experiment Name: At_CS6879_Shoots-Roots_P Parameter: Plant Line Value: CS6879 vs. WS
  misc_feature: MA Experiment 20000452 PARAMETER Experiment Name: At_CS6879_Shoots-Roots_P Parameter: Tissue Value: Shoots
aaaataatattaattttctcggcgaggcttgcagcgtggtcggcagtcagcttctccaatgagagttgtttgcttgggactccgagatctgtggatctattggatgctctgtcttataaagtgtcggcgaaggctctggtctcattatgtttcctgttgcttgtagcggatccgtggttgtttgtctcactctgttttgctagtccggtaagcagactttccaacctttcttcatagcctttttgttagggttagacggaatcgcttttgttgggttcttgagttggctgtaacagtttcagagatagtatcgtttagcttctcttcttcttcgacggtctgggatgttgaaaaggcaatgtctttccggttttagttgtttaagtttcgttttgtctctggctgttttggatagaagatgggattcccattttatgctttttgatgaatgaacgaatgctcgttgtggtgattatctggcctacaagttcttttgtattcttgggagatttctttggttcactctggttcgatcttctgctgctcctgattcttcgagaatggtgttacccggtgtggattttttgctccttgtctctgcatttcagatctgatcgagatctggtcctatggttttgcttctatctaggtgtaaaatgtcgccttgtctccgacgtcaccgtatccggaagaaagtgtgaggttccatgtgtggttctgtctttgcggattatgaagattagcataggagttctgttacttttaggcagtttggcatctttagaggaggattagattatcgatggttggccacgggcatcttcgatatgtactatcaaaggatctcttgaagtatgctttccttgttgggttggtttatggtcccatttggtcgagtgttttgttttggtctgttcttgtagtggggttcttctgctttcattatatgtttgtatcggtttgtagccttgtagtattgtttctttgcttcccttacatagggctttagactccagagatatctttgttttctgctagcatatggttgtaatcttccaaatatccttcatggtttttaataaaatctagatg

SEQ ID NO: 69326 - protein, 116 aa, Arabidopsis thaliana
  peptide (1)..(116): Ceres Seq. ID no. 4905119
MNERMLVVVIIWPTSSFVFLGDFFGSLWFDLLLLLILREWCYPVWIFCSLSLHFRSDRDLVLWFCFYLGVKCRLVSDVTVSGRKCEVPCVVLSLRIMKISIGVLLLLGSLASLEED

SEQ ID NO: 69327 - protein, 112 aa, Arabidopsis thaliana
  peptide (1)..(112): Ceres Seq. ID no. 4905120
MLVVVIIWPTSSFVFLGDFFGSLWFDLLLLLILREWCYPVWIFCSLSLHFRSDRDLVLWFCFYLGVKCRLVSDVTVSGRKCEVPCVVLSLRIMKISIGVLLLLGSLASLEED

SEQ ID NO: 69328 - protein, 78 aa, Arabidopsis thaliana
  peptide (1)..(78): Ceres Seq. ID no. 4905121
KIILIFSARLAAWSAVSFSNESCLLGTPRSVDLLDALSYKVSAKALVSLCFLLLVADPWLFVSLCFASPVSRLSNLSS

SEQ ID NO: 69329 - DNA, 664 bp, Arabidopsis thaliana
  misc_feature (1)..(664): Ceres Seq. ID no. 4906357
  misc_feature: MA Experiment ID: 108489 Result: Down-regulated in Transcription
  misc_feature: MA Experiment ID: 20000264 Result: Up-regulated in Transcription
  misc_feature: MA Experiment 20000264 PARAMETER Experiment Name: At_Open_Flower_P Parameter: Age (day) Value: 21
  misc_feature: MA Experiment 20000264 PARAMETER Experiment Name: At_Open_Flower_P Parameter: Plant Line Value: WS
  misc_feature: MA Experiment 20000264 PARAMETER Experiment Name: At_Open_Flower_P Parameter: Tissue Value: Open Flower vs. Whole Plant
  misc_feature: MA Experiment ID: 20000438 Result: Down-regulated in Transcription
  misc_feature: MA Experiment 20000438 PARAMETER Experiment Name: At_Shoots__P Parameter: Age (day) Value: 14
  misc_feature: MA Experiment 20000438 PARAMETER Experiment Name: At_Shoots__P Parameter: Tissue Value: Shoots vs. Whole Plant
  misc_feature: MA Experiment ID: 20000440 Result: Up-regulated in Transcription
  misc_feature: MA Experiment 20000440 PARAMETER Experiment Name: At_Closed-Flower__Sub_P Parameter: Tissue Value: Closed Flower vs. Whole Plant
  misc_feature: MA Experiment ID: 20000794 Result: Up-regulated in Transcription
  misc_feature: MA Experiment 20000794 PARAMETER Experiment Name: At_Petals_P Parameter: Age (day) Value: 23-25 days
  misc_feature: MA Experiment 20000794 PARAMETER Experiment Name: At_Petals_P Parameter: Plant Line Value: WS
  misc_feature: MA Experiment 20000794 PARAMETER Experiment Name: At_Petals_P Parameter: Tissue Value: Petals vs. Whole plant
  misc_feature: MA Experiment ID: 20001757 Result: Down-regulated in Transcription
  misc_feature: MA Experiment 20001757 PARAMETER Experiment Name: At_50mM_NH4NO3_L-to-H_P Parameter: Timepoint (hr) Value: 6
  misc_feature: MA Experiment 20001757 PARAMETER Experiment Name: At_50mM_NH4NO3_L-to-H_P Parameter: Tissue Value: Leaf
  misc_feature: MA Experiment 20001757 PARAMETER Experiment Name: At_50mM_NH4NO3_L-to-H_P Parameter: Treatment Value: 50mM NH4NO3 vs 100mM Mannitol
  misc_feature: MA Experiment ID: 20001911 Result: Down-regulated in Transcription
  misc_feature: MA Experiment 20001911 PARAMETER Experiment Name: At_Drought_Reproduction_P Parameter: Age (day) Value: 40
  misc_feature: MA Experiment 20001911 PARAMETER Experiment Name: At_Drought_Reproduction_P Parameter: Organism Value: A. thaliana
  misc_feature: MA Experiment 20001911 PARAMETER Experiment Name: At_Drought_Reproduction_P Parameter: Plant Line Value: WS
  misc_feature: MA Experiment 20001911 PARAMETER Experiment Name: At_Drought_Reproduction_P Parameter: Timepoint (day) Value: 10
  misc_feature: MA Experiment 20001911 PARAMETER Experiment Name: At_Drought_Reproduction_P Parameter: Tissue Value: Flowers
  misc_feature: MA Experiment 20001911 PARAMETER Experiment Name: At_Drought_Reproduction_P Parameter: Treatment Value: Drought vs. No Drought
ccaacactcgtaagtagtcctccttcatcattcatgcatatgtatatcagagtgaccattcacggctattaatgggtttcttaattgatcatatatgtgtgtatatatatatatagttattgtagcaactactacggccagtttgcggagcctaccgagatttgcgactggtgccgcagcgacgaccggaagctgagcaacgttgctagacatggcggttcttcttcaaagaagccttcttcttcggttaaatatgaaaatgacttctcaaacagatcggaatattcgcccggccaccggatcaagcataacaataaccgtcacgatcaagtagccaagggcgttgctggagatggaggcggagttacgtcgcctaagacggccacacgaaggtacaagcttctcaaagatgtcatgtgttagttccacctaaacgagaggtattagaagacttactataatcatactactctttcgagactgtgtgattaaattatgtataattagactacggagagagcaaattaaaaaagaaaacgtcgttgtttgttttcatccttttttcctttttactttgtgtttatatatatgaaatgaatgtgtgtttggcgtgagcttgtgttttcttaatcaccatataagctattaataactgcaatttgcg

SEQ ID NO: 69330 - protein, 40 aa, Arabidopsis thaliana
  peptide (1)..(40): Ceres Seq. ID no. 4906358
MAVLLQRSLLLRLNMKMTSQTDRNIRPATGSSITITVTIK

SEQ ID NO: 69331 - protein, 33 aa, Arabidopsis thaliana
  peptide (1)..(33): Ceres Seq. ID no. 4906359
MCVYIYIVIVATTTASLRSLPRFATGAAATTGS

SEQ ID NO: 69332 - DNA, 997 bp, Arabidopsis thaliana
  misc_feature (1)..(997): Ceres Seq. ID no. 4907033
  misc_feature: MA Experiment ID: 108461 Result: Up-regulated in Transcription
  misc_feature: MA Experiment 108461 PARAMETER Experiment Name: At_Germinating_Seeds_cDNA_P Parameter: Age (day) Value: 1 vs. 0
  misc_feature: MA Experiment 108461 PARAMETER Experiment Name: At_Germinating_Seeds_cDNA_P Parameter: Tissue Value: Germinating Seeds
  misc_feature: MA Experiment ID: 108463 Result: Up-regulated in Transcription
  misc_feature: MA Experiment 108463 PARAMETER Experiment Name: At_Germinating_Seeds_cDNA_P Parameter: Age (day) Value: 3 vs. 0
  misc_feature: MA Experiment 108463 PARAMETER Experiment Name: At_Germinating_Seeds_cDNA_P Parameter: Tissue Value: Germinating Seeds
gaattagacacattttaaagaagtttcagattttagaacttacagagccagagccaatagtgatctgcgagaagctaagatcaatcggagaagaagtgacatgaacaccaaagaaagtaccagtgttacggtacaacattctcagtgtcgcgttcatagtgatcatatcagttcctatacctccagcatcttgtccagcttgaaccttaagttgctcaaacgttatactctgcaaaattcaattctacaaacgtaagcacgactctagatctgaaatctgatctcgatctactaagtcaactctcacaaaccttaacagagatcttaggtttctgaggtttagcagctgcataaagaatcaaagagaagaaagcaaagagtagagagaatccaacaatgaaagctaaaacataacatcgacgaggcaaagcttcttgttctctatctccatcatcaagaagaccttcttcttcaatcatagcgaactgtttttctccagcgtggcccttacgttttgagccgttgatcttggagaagcggcttgaggaagagtgagaatgtggtggagatcccatcgggctggtgagtaccggtgttgagtggaatgatgttgctgttttctccccatcgtgggagtcacgtgatggagattggacgaagtaggctggtcgacggggagatctagtcggcgatgaagctgagaggcttgtcacctcggagtcggtcttcgcgtgcatcttgagattggaatggaagatgaacaagtagaagatgagaggttatgtgatgtttgtatttatgtattgaattatttagtcaatgagtggatttgagggccatttgcccattgctttgtatattaccgtaacgcattatagcatcatgatcgcttttttttttttttttttaatacgattggtaatcaaaatttaagtcacctagtatatagttgttgaaataggcaaaaagatatttgtagtaactttttgactttttt

SEQ ID NO: 69333 - protein, 51 aa, Arabidopsis thaliana; identical to SEQ ID NO: 257
  peptide (1)..(51): Ceres Seq. ID no. 4907034

SEQ ID NO: 69334 - protein, 33 aa, Arabidopsis thaliana; identical to SEQ ID NO: 258
  peptide (1)..(33): Ceres Seq. ID no. 4907035

SEQ ID NO: 69335 - protein, 37 aa, Arabidopsis thaliana
  peptide (1)..(37): Ceres Seq. ID no. 4907036
MSGFEGHLPIALYITVTHYSIMIAFFFFFLIRLVIKI

SEQ ID NO: 69336 - DNA, 1231 bp, Arabidopsis thaliana
  misc_feature (1)..(1231): Ceres Seq. ID no. 4909962
  misc_feature: MA Experiment ID: 108461 Result: Down-regulated in Transcription
  misc_feature: MA Experiment 108461 PARAMETER Experiment Name: At_Germinating_Seeds_cDNA_P Parameter: Age (day) Value: 1 vs. 0
  misc_feature: MA Experiment 108461 PARAMETER Experiment Name: At_Germinating_Seeds_cDNA_P Parameter: Tissue Value: Germinating Seeds
  misc_feature: MA Experiment ID: 108462 Result: Down-regulated in Transcription
  misc_feature: MA Experiment 108462 PARAMETER Experiment Name: At_Germinating_Seeds_cDNA_P Parameter: Age (day) Value: 2 vs. 0
  misc_feature: MA Experiment 108462 PARAMETER Experiment Name: At_Germinating_Seeds_cDNA_P Parameter: Tissue Value: Germinating Seeds
  misc_feature: MA Experiment ID: 108463 Result: Down-regulated in Transcription
  misc_feature: MA Experiment 108463 PARAMETER Experiment Name: At_Germinating_Seeds_cDNA_P Parameter: Age (day) Value: 3 vs. 0
  misc_feature: MA Experiment 108463 PARAMETER Experiment Name: At_Germinating_Seeds_cDNA_P Parameter: Tissue Value: Germinating Seeds
  misc_feature: MA Experiment ID: 108464 Result: Down-regulated in Transcription
  misc_feature: MA Experiment 108464 PARAMETER Experiment Name: At_Germinating_Seeds_cDNA_P Parameter: Age (day) Value: 4 vs. 0
  misc_feature: MA Experiment 108464 PARAMETER Experiment Name: At_Germinating_Seeds_cDNA_P Parameter: Tissue Value: Germinating Seeds
  misc_feature: MA Experiment ID: 108576 Result: Up-regulated in Transcription
  misc_feature: MA Experiment 108576 PARAMETER Experiment Name: At_42deg_Heat_cDNA_P Parameter: Temperature (deg C) Value: 42 vs. 22
  misc_feature: MA Experiment 108576 PARAMETER Experiment Name: At_42deg_Heat_cDNA_P Parameter: Timepoint (hr) Value: 1
  misc_feature: MA Experiment 108576 PARAMETER Experiment Name: At_42deg_Heat_cDNA_P Parameter: Tissue Value: Aerial
  misc_feature: MA Experiment ID: 108577 Result: Up-regulated in Transcription
  misc_feature: MA Experiment 108577 PARAMETER Experiment Name: At_42deg_Heat_cDNA_P Parameter: Temperature (deg C) Value: 42 vs. 22
  misc_feature: MA Experiment 108577 PARAMETER Experiment Name: At_42deg_Heat_cDNA_P Parameter: Timepoint (hr) Value: 6
  misc_feature: MA Experiment 108577 PARAMETER Experiment Name: At_42deg_Heat_cDNA_P Parameter: Tissue Value: Aerial
  misc_feature: MA Experiment ID: 20000093 Result: Up-regulated in Transcription
  misc_feature: MA Experiment 20000093 PARAMETER Experiment Name: At_42deg_Heat_cDNA_P Parameter: Temperature (deg C) Value: 42 vs. 22
  misc_feature: MA Experiment 20000093 PARAMETER Experiment Name: At_42deg_Heat_cDNA_P Parameter: Timepoint (hr) Value: 0.5
  misc_feature: MA Experiment 20000093 PARAMETER Experiment Name: At_42deg_Heat_cDNA_P Parameter: Tissue Value: Aerial
  misc_feature: MA Experiment ID: 20000111 Result: Up-regulated in Transcription
  misc_feature: MA Experiment 20000111 PARAMETER Experiment Name: At_42deg_Heat_cDNA_P Parameter: Temperature (deg C) Value: 42 vs. 22
  misc_feature: MA Experiment 20000111 PARAMETER Experiment Name: At_42deg_Heat_cDNA_P Parameter: Timepoint (hr) Value: 6
  misc_feature: MA Experiment 20000111 PARAMETER Experiment Name: At_42deg_Heat_cDNA_P Parameter: Tissue Value: Aerial
  misc_feature: MA Experiment ID: 20000112 Result: Up-regulated in Transcription
  misc_feature: MA Experiment 20000112 PARAMETER Experiment Name: At_42deg_Heat_cDNA_P Parameter: Temperature (deg C) Value: 42 vs. 22
  misc_feature: MA Experiment 20000112 PARAMETER Experiment Name: At_42deg_Heat_cDNA_P Parameter: Timepoint (hr) Value: 2
  misc_feature: MA Experiment 20000112 PARAMETER Experiment Name: At_42deg_Heat_cDNA_P Parameter: Tissue Value: Aerial
  misc_feature: MA Experiment ID: 20000113 Result: Up-regulated in Transcription
  misc_feature: MA Experiment 20000113 PARAMETER Experiment Name: At_42deg_Heat_cDNA_P Parameter: Temperature (deg C) Value: 42 vs. 22
  misc_feature: MA Experiment 20000113 PARAMETER Experiment Name: At_42deg_Heat_cDNA_P Parameter: Timepoint (hr) Value: 8
  misc_feature: MA Experiment 20000113 PARAMETER Experiment Name: At_42deg_Heat_cDNA_P Parameter: Tissue Value: Aerial
  misc_feature: MA Experiment ID: 20000144 Result: Up-regulated in Transcription
  misc_feature: MA Experiment 20000144 PARAMETER Experiment Name: At_42deg_Heat_cDNA_P Parameter: Temperature (deg C) Value: 42 vs. 22
  misc_feature: MA Experiment 20000144 PARAMETER Experiment Name: At_42deg_Heat_cDNA_P Parameter: Timepoint (hr) Value: 1
  misc_feature: MA Experiment 20000144 PARAMETER Experiment Name: At_42deg_Heat_cDNA_P Parameter: Tissue Value: Aerial
  misc_feature: MA Experiment ID: 20000171 Result: Up-regulated in Transcription
  misc_feature: MA Experiment 20000171 PARAMETER Experiment Name: At_42deg_Heat_P Parameter: Age (day) Value: 14
  misc_feature: MA Experiment 20000171 PARAMETER Experiment Name: At_42deg_Heat_P Parameter: Organism Value: A. thaliana
  misc_feature: MA Experiment 20000171 PARAMETER Experiment Name: At_42deg_Heat_P Parameter: Plant Line Value: WS
  misc_feature: MA Experiment 20000171 PARAMETER Experiment Name: At_42deg_Heat_P Parameter: Temperature (deg C) Value: 42 vs. 22
  misc_feature: MA Experiment 20000171 PARAMETER Experiment Name: At_42deg_Heat_P Parameter: Timepoint (hr) Value: 1
  misc_feature: MA Experiment 20000171 PARAMETER Experiment Name: At_42deg_Heat_P Parameter: Tissue Value: Aerial
  misc_feature: MA Experiment ID: 20000173 Result: Up-regulated in Transcription
  misc_feature: MA Experiment 20000173 PARAMETER Experiment Name: At_42deg_Heat_P Parameter: Age (day) Value: 14
  misc_feature: MA Experiment 20000173 PARAMETER Experiment Name: At_42deg_Heat_P Parameter: Organism Value: A. thaliana
  misc_feature: MA Experiment 20000173 PARAMETER Experiment Name: At_42deg_Heat_P Parameter: Plant Line Value: WS
  misc_feature: MA Experiment 20000173 PARAMETER Experiment Name: At_42deg_Heat_P Parameter: Temperature (deg C) Value: 42 vs. 22
  misc_feature: MA Experiment 20000173 PARAMETER Experiment Name: At_42deg_Heat_P Parameter: Timepoint (hr) Value: 6
  misc_feature: MA Experiment 20000173 PARAMETER Experiment Name: At_42deg_Heat_P Parameter: Tissue Value: Aerial
  misc_feature: MA Experiment ID: 20000180 Result: Down-regulated in Transcription
  misc_feature: MA Experiment 20000180 PARAMETER Experiment Name: At_Germinating_Seeds_P Parameter: Age (hr) Value: 24 vs. 0
  misc_feature: MA Experiment 20000180 PARAMETER Experiment Name: At_Germinating_Seeds_P Parameter: Tissue Value: Germinating Seeds
  misc_feature: MA Experiment ID: 20000495 Result: Up-regulated in Transcription
  misc_feature: MA Experiment 20000495 PARAMETER Experiment Name: At_Guard_Cells_P Parameter: Harvest Date Value: 8/2/2002
  misc_feature: MA Experiment 20000495 PARAMETER Experiment Name: At_Guard_Cells_P Parameter: Organism Value: A. thaliana
  misc_feature: MA Experiment 20000495 PARAMETER Experiment Name: At_Guard_Cells_P Parameter: Tissue Value: Guard Cells vs. Leaves
aggagcctctgtaattttgtagtagtctgtccgattcttctcaacgatttttgtattcatcgagtcaattgttcctgtgttttcattgattagatcttgtgaatatagtctttatagctttggttagagttttcttattggttaatgatgataaatccaaaggcttgtttttcaaacattcgcagtggccgcctaagagctttcgcctttcgccaggcttgagagttaatgctgttttatccttccttggatgtctgaaacttttgtatctaaacctgtattgttttgttttctattagggttttagatttgggactaagttattcaatgtcccattagcagaattgatttctcttagtgcttaataggattgaacaaagtccctcaaatcttgatccatctgtcactttgtcagcagtcttaattggtttcttgctgatcattatatgatgggaaataacatataatctcgattttgattaattggtagaattgcttaatattggtcgatgaggataagatgaaggcttgtttctcaaaacattcgcagtggccgcctaaggctttcgcctttcgccgggcttgagagcttatgatgtttttatccttccttggatgtctgagaccaattatgttttagttagatgattgttgctgttagttttcggttgatgaggattatattaaggcttgtttctcaaaacattcgcagtggccgcctaaagctttcgcctttcgccaggcttgagagctaatgcagctttatccttccttggatgtctgaaaccgatgaatgttttaattctcgtttttatgtttttgtctgtaagaaagatcaatgatgataaacttaaggcttgtttctcaaaacattcgcagtggccgcctaaagctttcgcctttcgccgggcttgagagttaatgcagcttttatccttccttggatgtctgagatctttattcactctatcgattatcttgtctgtttaggttattccttctagtagattattatcgtctattttttgtgttgaatttgcaggtaatttcttggtggtagcttcttcgctttactggcttttggagaaagagttccttacgtttcctgtaatttcctttaatctgtaaaaatcattgtcagatttatttacaatctgtaaagagttctttgttgtaaacaattttgttcattggtgatgaaattttgttctcattatgaattttatttgtg

SEQ ID NO: 69337 - protein, 41 aa, Arabidopsis thaliana
  peptide (1)..(41): Ceres Seq. ID no. 4909963
MNVLILVFMFLSVRKINDDKLKACFSKHSQWPPKAFAFRRA

SEQ ID NO: 69338 - protein, 36 aa, Arabidopsis thaliana
  peptide (1)..(36): Ceres Seq. ID no. 4909964
MIVAVSFRLMRIILRLVSQNIRSGRLKLSPFARLES

SEQ ID NO: 69339 - protein, 33 aa, Arabidopsis thaliana
  peptide (1)..(33): Ceres Seq. ID no. 4909965
MFLSVRKINDDKLKACFSKHSQWPPKAFAFRRA

SEQ ID NO: 69340 - DNA, 722 bp, Arabidopsis thaliana
  misc_feature (1)..(722): Ceres Seq. ID no. 4914446
  misc_feature: MA Experiment ID: 108463 Result: Up-regulated in Transcription
  misc_feature: MA Experiment 108463 PARAMETER Experiment Name: At_Germinating_Seeds_cDNA_P Parameter: Age (day) Value: 3 vs. 0
  misc_feature: MA Experiment 108463 PARAMETER Experiment Name: At_Germinating_Seeds_cDNA_P Parameter: Tissue Value: Germinating Seeds
  misc_feature: MA Experiment ID: 108473 Result: Up-regulated in Transcription
  misc_feature: MA Experiment 108473 PARAMETER Experiment Name: At_Drought_Flowers_cDNA_P Parameter: Timepoint (hr) Value: 7 d
  misc_feature: MA Experiment 108473 PARAMETER Experiment Name: At_Drought_Flowers_cDNA_P Parameter: Tissue Value: Flower
  misc_feature: MA Experiment 108473 PARAMETER Experiment Name: At_Drought_Flowers_cDNA_P Parameter: Treatment Value: Drought vs. No Drought
  misc_feature: MA Experiment ID: 108561 Result: Up-regulated in Transcription
  misc_feature: MA Experiment 108561 PARAMETER Experiment Name: At_100uM_ABA_cDNA_P Parameter: Timepoint (hr) Value: 6
  misc_feature: MA Experiment 108561 PARAMETER Experiment Name: At_100uM_ABA_cDNA_P Parameter: Tissue Value: Aerial
  misc_feature: MA Experiment 108561 PARAMETER Experiment Name: At_100uM_ABA_cDNA_P Parameter: Treatment Value: 100uM ABA vs. No Treatment
  misc_feature: MA Experiment ID: 108573 Result: Up-regulated in Transcription
  misc_feature: MA Experiment 108573 PARAMETER Experiment Name: At_Drought_cDNA_P Parameter: Timepoint (hr) Value: 6
  misc_feature: MA Experiment 108573 PARAMETER Experiment Name: At_Drought_cDNA_P Parameter: Tissue Value: Aerial
  misc_feature: MA Experiment 108573 PARAMETER Experiment Name: At_Drought_cDNA_P Parameter: Treatment Value: Drought vs. No Drought
  misc_feature: MA Experiment ID: 108605 Result: Up-regulated in Transcription
  misc_feature: MA Experiment 108605 PARAMETER Experiment Name: At_100uM_ABA_cDNA_P Parameter: Timepoint (hr) Value: 6
  misc_feature: MA Experiment 108605 PARAMETER Experiment Name: At_100uM_ABA_cDNA_P Parameter: Tissue Value: Aerial
  misc_feature: MA Experiment 108605 PARAMETER Experiment Name: At_100uM_ABA_cDNA_P Parameter: Treatment Value: 100uM ABA vs. No Treatment
  misc_feature: MA Experiment ID: 108607 Result: Up-regulated in Transcription
  misc_feature: MA Experiment 108607 PARAMETER Experiment Name: At_100uM_ABA_cDNA_P Parameter: Timepoint (hr) Value: 4
  misc_feature: MA Experiment 108607 PARAMETER Experiment Name: At_100uM_ABA_cDNA_P Parameter: Tissue Value: Aerial
  misc_feature: MA Experiment 108607 PARAMETER Experiment Name: At_100uM_ABA_cDNA_P Parameter: Treatment Value: 100uM ABA vs. No Treatment
  misc_feature: MA Experiment ID: 108609 Result: Up-regulated in Transcription
  misc_feature: MA Experiment 108609 PARAMETER Experiment Name: At_100uM_ABA_cDNA_P Parameter: Timepoint (hr) Value: 24
  misc_feature: MA Experiment 108609 PARAMETER Experiment Name: At_100uM_ABA_cDNA_P Parameter: Tissue Value: Aerial
  misc_feature: MA Experiment 108609 PARAMETER Experiment Name: At_100uM_ABA_cDNA_P Parameter: Treatment Value: 100uM ABA vs. No Treatment
  misc_feature: MA Experiment ID: 20000069 Result: Up-regulated in Transcription
  misc_feature: MA Experiment 20000069 PARAMETER Experiment Name: At_100uM_ABA_Mutants_cDNA_P Parameter: Plant Line Value: CS23
  misc_feature: MA Experiment 20000069 PARAMETER Experiment Name: At_100uM_ABA_Mutants_cDNA_P Parameter: Timepoint (hr) Value: 6
  misc_feature: MA Experiment 20000069 PARAMETER Experiment Name: At_100uM_ABA_Mutants_cDNA_P Parameter: Tissue Value: Aerial
  misc_feature: MA Experiment 20000069 PARAMETER Experiment Name: At_100uM_ABA_Mutants_cDNA_P Parameter: Treatment Value: 100uM ABA vs. No Treatment
  misc_feature: MA Experiment ID: 20000086 Result: Up-regulated in Transcription
  misc_feature: MA Experiment 20000086 PARAMETER Experiment Name: At_100uM_ABA_Mutants_cDNA_P Parameter: Plant Line Value: CS22
  misc_feature: MA Experiment 20000086 PARAMETER Experiment Name: At_100uM_ABA_Mutants_cDNA_P Parameter: Timepoint (hr) Value: 6
  misc_feature: MA Experiment 20000086 PARAMETER Experiment Name: At_100uM_ABA_Mutants_cDNA_P Parameter: Tissue Value: Aerial
  misc_feature: MA Experiment 20000086 PARAMETER Experiment Name: At_100uM_ABA_Mutants_cDNA_P Parameter: Treatment Value: 100uM ABA vs. No Treatment
  misc_feature: MA Experiment ID: 20000087 Result: Up-regulated in Transcription
  misc_feature: MA Experiment 20000087 PARAMETER Experiment Name: At_100uM_ABA_Mutants_cDNA_P Parameter: Plant Line Value: WS
  misc_feature: MA Experiment 20000087 PARAMETER Experiment Name: At_100uM_ABA_Mutants_cDNA_P Parameter: Timepoint (hr) Value: 6
  misc_feature: MA Experiment 20000087 PARAMETER Experiment Name: At_100uM_ABA_Mutants_cDNA_P Parameter: Tissue Value: Aerial
  misc_feature: MA Experiment 20000087 PARAMETER Experiment Name: At_100uM_ABA_Mutants_cDNA_P Parameter: Treatment Value: 100uM ABA vs. No Treatment
  misc_feature: MA Experiment ID: 20000224 Result: Up-regulated in Transcription
  misc_feature: MA Experiment ID: 20000573 Result: Up-regulated in Transcription
  misc_feature: MA Experiment 20000573 PARAMETER Experiment Name: At_100uM_ABA_Mutants__P Parameter: Organism Value: A. thaliana
  misc_feature: MA Experiment 20000573 PARAMETER Experiment Name: At_100uM_ABA_Mutants__P Parameter: Plant Line Value: CS22 vs. Ler wt
  misc_feature: MA Experiment 20000573 PARAMETER Experiment Name: At_100uM_ABA_Mutants__P Parameter: Timepoint (hr) Value: N/A
  misc_feature: MA Experiment 20000573 PARAMETER Experiment Name: At_100uM_ABA_Mutants__P Parameter: Tissue Value: Whole Plant
  misc_feature: MA Experiment 20000573 PARAMETER Experiment Name: At_100uM_ABA_Mutants__P Parameter: Treatment Value: None
  misc_feature: MA Experiment ID: 20001904 Result: Up-regulated in Transcription
  misc_feature: MA Experiment 20001904 PARAMETER Experiment Name: At_Drought_Reproduction_P Parameter: Age (day) Value: 37
  misc_feature: MA Experiment 20001904 PARAMETER Experiment Name: At_Drought_Reproduction_P Parameter: Organism Value: A. thaliana
  misc_feature: MA Experiment 20001904 PARAMETER Experiment Name: At_Drought_Reproduction_P Parameter: Plant Line Value: WS
  misc_feature: MA Experiment 20001904 PARAMETER Experiment Name: At_Drought_Reproduction_P Parameter: Timepoint (day) Value: 7
  misc_feature: MA Experiment 20001904 PARAMETER Experiment Name: At_Drought_Reproduction_P Parameter: Tissue Value: Rosettes
  misc_feature: MA Experiment 20001904 PARAMETER Experiment Name: At_Drought_Reproduction_P Parameter: Treatment Value: Drought vs. No Drought
  misc_feature: MA Experiment ID: 20001905 Result: Up-regulated in Transcription
  misc_feature: MA Experiment 20001905 PARAMETER Experiment Name: At_Drought_Reproduction_P Parameter: Age (day) Value: 40
  misc_feature: MA Experiment 20001905 PARAMETER Experiment Name: At_Drought_Reproduction_P Parameter: Organism Value: A. thaliana
  misc_feature: MA Experiment 20001905 PARAMETER Experiment Name: At_Drought_Reproduction_P Parameter: Plant Line Value: WS
  misc_feature: MA Experiment 20001905 PARAMETER Experiment Name: At_Drought_Reproduction_P Parameter: Timepoint (day) Value: 10
  misc_feature: MA Experiment 20001905 PARAMETER Experiment Name: At_Drought_Reproduction_P Parameter: Tissue Value: Rosettes
  misc_feature: MA Experiment 20001905 PARAMETER Experiment Name: At_Drought_Reproduction_P Parameter: Treatment Value: Drought vs. No Drought
attcaaaagtgtataatttggaaactggaatattctttcatgggaagtctggccgaagaaggcggcgacctccttcttcctcgtggcggtgtctccggtggtgccaaaaccggggaaggactttgcagcggtgataaaggcgttgtaagtgtagaaacctctagcaggacaagcggcatcattcctatgcttaagcatatcatcgaactgagaacttgaaatgatgcccgaaagatcgccggtgggtccaggaggagtaccaccgggagtgcactggctttggcagccaggctgcttacagtatggttcggtgttaccgcaccagccgaactcgctgcagcatagaccgttggggcagagtgctcctccagcttggcgaccacattgctcggccgaggataatgataggagaagtgaaaagatgagaaagagaaaaagattagtcttcattttgttcaatgttctatggttttctttttgtggaggcatgaaagatatatatagatccaattaatgaatgttttatcacatcaaattctatctttttccatagtttattgtttgttatgtctatggagtgtggctatggggaacaaacagtatttggtaggtttgtttttgattatatttattttccttccgtcattgttgctaggttagatattgatttgtttttttgggggattatcatgttaattccaagtaatgagaactttctatgt

SEQ ID NO: 69341 - protein, 97 aa, Arabidopsis thaliana; identical to SEQ ID NO: 308
  peptide (1)..(97): Ceres Seq. ID no. 4914447

SEQ ID NO: 69342 - protein, 96 aa, Arabidopsis thaliana; identical to SEQ ID NO: 309
  peptide (1)..(96): Ceres Seq. ID no. 4914448

SEQ ID NO: 69343 - protein, 72 aa, Arabidopsis thaliana
  peptide (1)..(72): Ceres Seq. ID no. 4914449
IQKCIIWKLEYSFMGSLAEEGGDLLLPRGGVSGGAKTGEGLCSGDKGVVSVETSSRTSGIIPMLKHIIELRT

SEQ ID NO: 69344 - protein, 59 aa, Arabidopsis thaliana
  peptide (1)..(59): Ceres Seq. ID no. 4914450
MGSLAEEGGDLLLPRGGVSGGAKTGEGLCSGDKGVVSVETSSRTSGIIPMLKHIIELRT

SEQ ID NO: 69345 - DNA, 1520 bp, Arabidopsis thaliana
  misc_feature (1)..(1520): Ceres Seq. ID no. 4944075
  misc_feature: MA Experiment ID: 108434 Result: Down-regulated in Transcription
  misc_feature: MA Experiment 108434 PARAMETER Experiment Name: At_Root_Tips_cDNA_P Parameter: Tissue Value: Root Tips
  misc_feature: MA Experiment ID: 108461 Result: Down-regulated in Transcription
  misc_feature: MA Experiment 108461 PARAMETER Experiment Name: At_Germinating_Seeds_cDNA_P Parameter: Age (day) Value: 1 vs. 0
  misc_feature: MA Experiment 108461 PARAMETER Experiment Name: At_Germinating_Seeds_cDNA_P Parameter: Tissue Value: Germinating Seeds
  misc_feature: MA Experiment ID: 108462 Result: Up-regulated in Transcription
  misc_feature: MA Experiment 108462 PARAMETER Experiment Name: At_Germinating_Seeds_cDNA_P Parameter: Age (day) Value: 2 vs. 0
  misc_feature: MA Experiment 108462 PARAMETER Experiment Name: At_Germinating_Seeds_cDNA_P Parameter: Tissue Value: Germinating Seeds
  misc_feature: MA Experiment ID: 108463 Result: Up-regulated in Transcription
  misc_feature: MA Experiment 108463 PARAMETER Experiment Name: At_Germinating_Seeds_cDNA_P Parameter: Age (day) Value: 3 vs. 0
  misc_feature: MA Experiment 108463 PARAMETER Experiment Name: At_Germinating_Seeds_cDNA_P Parameter: Tissue Value: Germinating Seeds
  misc_feature: MA Experiment ID: 108464 Result: Up-regulated in Transcription
  misc_feature: MA Experiment 108464 PARAMETER Experiment Name: At_Germinating_Seeds_cDNA_P Parameter: Age (day) Value: 4 vs. 0
  misc_feature: MA Experiment 108464 PARAMETER Experiment Name: At_Germinating_Seeds_cDNA_P Parameter: Tissue Value: Germinating Seeds
  misc_feature: MA Experiment ID: 108594 Result: Down-regulated in Transcription
  misc_feature: MA Experiment 108594 PARAMETER Experiment Name: At_Ler-rhl_Root_cDNA_P Parameter: Plant Line Value: null
  misc_feature: MA Experiment ID: 108595 Result: Up-regulated in Transcription
  misc_feature: MA Experiment 108595 PARAMETER Experiment Name: At_Ler-pi_Ovule_cDNA_P Parameter: Plant Line Value: null
  misc_feature: MA Experiment ID: 108608 Result: Up-regulated in Transcription
  misc_feature: MA Experiment 108608 PARAMETER Experiment Name: At_100uM_ABA_cDNA_P Parameter: Timepoint (hr) Value: 1
  misc_feature: MA Experiment 108608 PARAMETER Experiment Name: At_100uM_ABA_cDNA_P Parameter: Tissue Value: Aerial
  misc_feature: MA Experiment 108608 PARAMETER Experiment Name: At_100uM_ABA_cDNA_P Parameter: Treatment Value: 100uM ABA vs. No Treatment
  misc_feature: MA Experiment ID: 108668 Result: Up-regulated in Transcription
  misc_feature: MA Experiment 108668 PARAMETER Experiment Name: At_2mM_SA_cDNA_P Parameter: Plant Line Value: WS
  misc_feature: MA Experiment 108668 PARAMETER Experiment Name: At_2mM_SA_cDNA_P Parameter: Timepoint (hr) Value: 6
  misc_feature: MA Experiment 108668 PARAMETER Experiment Name: At_2mM_SA_cDNA_P Parameter: Treatment Value: 2mM SA vs. No Treatment
  misc_feature: MA Experiment ID: 20000184 Result: Down-regulated in Transcription
  misc_feature: MA Experiment 20000184 PARAMETER Experiment Name: At_Shoots__P Parameter: Age (day) Value: 7
  misc_feature: MA Experiment 20000184 PARAMETER Experiment Name: At_Shoots__P Parameter: Tissue Value: Shoots vs. Whole Plant
  misc_feature: MA Experiment ID: 20000185 Result: Down-regulated in Transcription
  misc_feature: MA Experiment 20000185 PARAMETER Experiment Name: At_Roots__P Parameter: Age (day) Value: 7 vs. 21
  misc_feature: MA Experiment 20000185 PARAMETER Experiment Name: At_Roots__P Parameter: Organism Value: A. thaliana
  misc_feature: MA Experiment 20000185 PARAMETER Experiment Name: At_Roots__P Parameter: Tissue Value: Roots vs. Whole Plant
  misc_feature: MA Experiment ID: 20000234 Result: Down-regulated in Transcription
  misc_feature: MA Experiment 20000234 PARAMETER Experiment Name: At_Siliques_P Parameter: Age (day) Value: 21
  misc_feature: MA Experiment 20000234 PARAMETER Experiment Name: At_Siliques_P Parameter: Organism Value: A. thaliana
  misc_feature: MA Experiment 20000234 PARAMETER Experiment Name: At_Siliques_P Parameter: Plant Line Value: WS
  misc_feature: MA Experiment 20000234 PARAMETER Experiment Name: At_Siliques_P Parameter: Tissue Value: Less Than 5mm Siliques vs. Whole Plant
  misc_feature: MA Experiment ID: 20000235 Result: Down-regulated in Transcription
  misc_feature: MA Experiment 20000235 PARAMETER Experiment Name: At_Siliques_P Parameter: Age (day) Value: 21
  misc_feature: MA Experiment 20000235 PARAMETER Experiment Name: At_Siliques_P Parameter: Organism Value: A. thaliana
  misc_feature: MA Experiment 20000235 PARAMETER Experiment Name: At_Siliques_P Parameter: Plant Line Value: WS
  misc_feature: MA Experiment 20000235 PARAMETER Experiment Name: At_Siliques_P Parameter: Tissue Value: 5-10mm Siliques vs. Whole Plant
  misc_feature: MA Experiment ID: 20000264 Result: Down-regulated in Transcription
  misc_feature: MA Experiment 20000264 PARAMETER Experiment Name: At_Open_Flower_P Parameter: Age (day) Value: 21
  misc_feature: MA Experiment 20000264 PARAMETER Experiment Name: At_Open_Flower_P Parameter: Plant Line Value: WS
  misc_feature: MA Experiment 20000264 PARAMETER Experiment Name: At_Open_Flower_P Parameter: Tissue Value: Open Flower vs. Whole Plant
  misc_feature: MA Experiment ID: 20000265 Result: Down-regulated in Transcription
  misc_feature: MA Experiment 20000265 PARAMETER Experiment Name: At_Open_Flower_P Parameter: Age (day) Value: 21
  misc_feature: MA Experiment 20000265 PARAMETER Experiment Name: At_Open_Flower_P Parameter: Plant Line Value: WS
  misc_feature: MA Experiment 20000265 PARAMETER Experiment Name: At_Open_Flower_P Parameter: Tissue Value: Closed Flower vs. Whole Plant
  misc_feature: MA Experiment ID: 20000286 Result: Down-regulated in Transcription
  misc_feature: MA Experiment 20000286 PARAMETER Experiment Name: At_Open_Flower_P Parameter: Age (day) Value: 21
  misc_feature: MA Experiment 20000286 PARAMETER Experiment Name: At_Open_Flower_P Parameter: Plant Line Value: WS
  misc_feature: MA Experiment 20000286 PARAMETER Experiment Name: At_Open_Flower_P Parameter: Tissue Value: Half Open vs. Whole Plant
  misc_feature: MA Experiment ID: 20000437 Result: Down-regulated in Transcription
  misc_feature: MA Experiment 20000437 PARAMETER Experiment Name: At_Drought_P Parameter: Age (day) Value: 8
  misc_feature: MA Experiment 20000437 PARAMETER Experiment Name: At_Drought_P Parameter: Organism Value: A. thaliana
  misc_feature: MA Experiment 20000437 PARAMETER Experiment Name: At_Drought_P Parameter: Plant Line Value: WS
  misc_feature: MA Experiment 20000437 PARAMETER Experiment Name: At_Drought_P Parameter: Timepoint (hr) Value: 24
  misc_feature: MA Experiment 20000437 PARAMETER Experiment Name: At_Drought_P Parameter: Tissue Value: Whole Plant
  misc_feature: MA Experiment 20000437 PARAMETER Experiment Name: At_Drought_P Parameter: Treatment Value: Drought vs. No Drought
  misc_feature: MA Experiment ID: 20000439 Result: Down-regulated in Transcription
  misc_feature: MA Experiment 20000439 PARAMETER Experiment Name: At_Roots__P Parameter: Age (day) Value: 14 vs. 21
  misc_feature: MA Experiment 20000439 PARAMETER Experiment Name: At_Roots__P Parameter: Organism Value: A. thaliana
  misc_feature: MA Experiment 20000439 PARAMETER Experiment Name: At_Roots__P Parameter: Tissue Value: Roots vs. Whole Plant
  misc_feature: MA Experiment ID: 20000527 Result: Up-regulated in Transcription
  misc_feature: MA Experiment 20000527 PARAMETER Experiment Name: At_10percent_PEG_P Parameter: Age (day) Value: 20
  misc_feature: MA Experiment 20000527 PARAMETER Experiment Name: At_10percent_PEG_P Parameter: Organism Value: A. thaliana
  misc_feature: MA Experiment 20000527 PARAMETER Experiment Name: At_10percent_PEG_P Parameter: Plant Line Value: WS
  misc_feature: MA Experiment 20000527 PARAMETER Experiment Name: At_10percent_PEG_P Parameter: Timepoint (day) Value: 20
  misc_feature: MA Experiment 20000527 PARAMETER Experiment Name: At_10percent_PEG_P Parameter: Tissue Value: Whole Plant
  misc_feature: MA Experiment 20000527 PARAMETER Experiment Name: At_10percent_PEG_P Parameter: Treatment Value: 10percent PEG vs. No Treatment
  misc_feature: MA Experiment ID: 20001247 Result: Up-regulated in Transcription
  misc_feature: MA Experiment 20001247 PARAMETER Experiment Name: At_Far-red-induction_P Parameter: Age (day) Value: 7
  misc_feature: MA Experiment 20001247 PARAMETER Experiment Name: At_Far-red-induction_P Parameter: Light Value: Far-red vs. White
  misc_feature: MA Experiment 20001247 PARAMETER Experiment Name: At_Far-red-induction_P Parameter: Organism Value: A. thaliana
  misc_feature: MA Experiment 20001247 PARAMETER Experiment Name: At_Far-red-induction_P Parameter: Plant Line Value: Columbia
  misc_feature: MA Experiment 20001247 PARAMETER Experiment Name: At_Far-red-induction_P Parameter: Timepoint (hr) Value: 1
  misc_feature: MA Experiment 20001247 PARAMETER Experiment Name: At_Far-red-induction_P Parameter: Tissue Value: Whole Plant
  misc_feature: MA Experiment ID: 20001557 Result: Down-regulated in Transcription
  misc_feature: MA Experiment 20001557 PARAMETER Experiment Name: At_Drought_Soil_Dry_P Parameter: Age (day) Value: 27
  misc_feature: MA Experiment 20001557 PARAMETER Experiment Name: At_Drought_Soil_Dry_P Parameter: Organism Value: A. thaliana
  misc_feature: MA Experiment 20001557 PARAMETER Experiment Name: At_Drought_Soil_Dry_P Parameter: Plant Line Value: WS
  misc_feature: MA Experiment 20001557 PARAMETER Experiment Name: At_Drought_Soil_Dry_P Parameter: Post Timepoint (hr) Value: 3
  misc_feature: MA Experiment 20001557 PARAMETER Experiment Name: At_Drought_Soil_Dry_P Parameter: Post-Treatment Value: Re-Water vs. No Drought
  misc_feature: MA Experiment 20001557 PARAMETER Experiment Name: At_Drought_Soil_Dry_P Parameter: Timepoint (day) Value: 13
  misc_feature: MA Experiment 20001557 PARAMETER Experiment Name: At_Drought_Soil_Dry_P Parameter: Treatment Value: Drought vs. No Drought
  misc_feature: MA Experiment ID: 20001904 Result: Down-regulated in Transcription
  misc_feature: MA Experiment 20001904 PARAMETER Experiment Name: At_Drought_Reproduction_P Parameter: Age (day) Value: 37
  misc_feature: MA Experiment 20001904 PARAMETER Experiment Name: At_Drought_Reproduction_P Parameter: Organism Value: A. thaliana
  misc_feature: MA Experiment 20001904 PARAMETER Experiment Name: At_Drought_Reproduction_P Parameter: Plant Line Value: WS
  misc_feature: MA Experiment 20001904 PARAMETER Experiment Name: At_Drought_Reproduction_P Parameter: Timepoint (day) Value: 7
  misc_feature: MA Experiment 20001904 PARAMETER Experiment Name: At_Drought_Reproduction_P Parameter: Tissue Value: Rosettes
  misc_feature: MA Experiment 20001904 PARAMETER Experiment Name: At_Drought_Reproduction_P Parameter: Treatment Value: Drought vs. No Drought
  misc_feature: MA Experiment ID: 20001905 Result: Down-regulated in Transcription
  misc_feature: MA Experiment 20001905 PARAMETER Experiment Name: At_Drought_Reproduction_P Parameter: Age (day) Value: 40
  misc_feature: MA Experiment 20001905 PARAMETER Experiment Name: At_Drought_Reproduction_P Parameter: Organism Value: A. thaliana
  misc_feature: MA Experiment 20001905 PARAMETER Experiment Name: At_Drought_Reproduction_P Parameter: Plant Line Value: WS
  misc_feature: MA Experiment 20001905 PARAMETER Experiment Name: At_Drought_Reproduction_P Parameter: Timepoint (day) Value: 10
  misc_feature: MA Experiment 20001905 PARAMETER Experiment Name: At_Drought_Reproduction_P Parameter: Tissue Value: Rosettes
  misc_feature: MA Experiment 20001905 PARAMETER Experiment Name: At_Drought_Reproduction_P Parameter: Treatment Value: Drought vs. No Drought
ataaggaaatcagggtttttctcttctttttttttttgtttaaaccaatctggttttacttttcaagtttggatataaacccaaatcgaatcgagaaaccataccaaaccactcagagattccgttatccatatttcccctgtttttccattaaggtaggattaatccatcaaataaaacattttgaaaatgtgctatgaatacatcaaatgagaggtttggttcatgttttattaatcaatccgaataacattacatatttgtctatattattgactcaaatatattttttcgtaatcctagagataagcttggtttacttgcaaatttcaagaggagcaccacacaaacacttgttgtgaaaataggaataagaatcaaatgtctgaagtttccctccagttgggatgtgtccacacagtttgttgtagctaacattgaagaactgaagaggagcttcagtccactgcaccggaatattcccagtgatcccattgtggttcaagtccaagataccaagtgttttagggatatcaacctttgagatatcgaactggaacatgtttcttgataagtcaatagaccaggttgttttgttggaaccaaacaacatcgaagcatcaccttggagcttgttgcgggataaatcgatccggttaaagtcgatgttgcctaatgatttgggtattggaccggagagctggttatgtgataggcgaaggtcagggactgttcctggaaacgacccaaatgactctggtatggaacctacaacataaagatcgttgtttagacaagacactgaatgatgtaataaaggaaaagatcgttctttacctgtaagtttgttcctgctaagttcaagagccaagattttaggtaacgtagagagagaacttggaatggaaccagagagatcattgaaggaaagttctaagaactcgagattcttgagctgacttataaagtcaggaattggacctgtcagattcgtccagctgagcctgagcattcggaggttcttgagtttggcgatggtgggttggattgtaccggtgaggttagagagtttgcggaagacaagggtctcaagatacggcaagtcaccgacttcagccgggatctgaccggagatctggccggagaatatggttaaggcggtaacacggtggttaacggtggcgtcgccgcactcaaggcagtaccaggagcaacagtcggtttgagggtcccatgaagcgaggtgataagggttgtttagagatttcttgatcttgaggagggtgtttttgtcattttggttacagagatctttagacaaacaggtcgtgaggaatgtgaacaagaacaagagacacaatgtcgctgtcttatccatggtgttggttttgaattttgatggaaagtgttagtgatacatatacatactatatagtgagtgatatagacttagagagacggattcgatttgatctctgtttccacatggaccgtaataatagtcaatacatatcatatag

SEQ ID NO: 69346 - protein, 72 aa, Arabidopsis thaliana; identical to SEQ ID NO: 301
  peptide (1)..(72): Ceres Seq. ID no. 4944076

SEQ ID NO: 69347 - protein, 65 aa, Arabidopsis thaliana
  peptide (1)..(65): Ceres Seq. ID no. 4944077
KEIRVFLFFFFLFKPIWFYFSSLDINPNRIEKPYQTTQRFRYPYFPCFSIKVGLIHQIKHFENVL

SEQ ID NO: 69348 - protein, 55 aa, Arabidopsis thaliana; identical to SEQ ID NO: 303
  peptide (1)..(55): Ceres Seq. ID no. 4944078

SEQ ID NO: 69349 - DNA, 650 bp, Arabidopsis thaliana
  misc_feature (1)..(650): Ceres Seq. ID no. 4955540
  misc_feature: MA Experiment ID: 108433 Result: Up-regulated in Transcription
  misc_feature: MA Experiment 108433 PARAMETER Experiment Name: At_rhl_Mutant2_cDNA_P Parameter: Age (day) Value: 7
  misc_feature: MA Experiment 108433 PARAMETER Experiment Name: At_rhl_Mutant2_cDNA_P Parameter: Organism Value: A. thaliana
  misc_feature: MA Experiment 108433 PARAMETER Experiment Name: At_rhl_Mutant2_cDNA_P Parameter: Plant Line Value: rhl Mutant vs. wt landsburg
  misc_feature: MA Experiment 108433 PARAMETER Experiment Name: At_rhl_Mutant2_cDNA_P Parameter: Tissue Value: Roots
  misc_feature: MA Experiment ID: 108461 Result: Up-regulated in Transcription
  misc_feature: MA Experiment 108461 PARAMETER Experiment Name: At_Germinating_Seeds_cDNA_P Parameter: Age (day) Value: 1 vs. 0
  misc_feature: MA Experiment 108461 PARAMETER Experiment Name: At_Germinating_Seeds_cDNA_P Parameter: Tissue Value: Germinating Seeds
  misc_feature: MA Experiment ID: 108464 Result: Up-regulated in Transcription
  misc_feature: MA Experiment 108464 PARAMETER Experiment Name: At_Germinating_Seeds_cDNA_P Parameter: Age (day) Value: 4 vs. 0
  misc_feature: MA Experiment 108464 PARAMETER Experiment Name: At_Germinating_Seeds_cDNA_P Parameter: Tissue Value: Germinating Seeds
  misc_feature: MA Experiment ID: 108561 Result: Down-regulated in Transcription
  misc_feature: MA Experiment 108561 PARAMETER Experiment Name: At_100uM_ABA_cDNA_P Parameter: Timepoint (hr) Value: 6
  misc_feature: MA Experiment 108561 PARAMETER Experiment Name: At_100uM_ABA_cDNA_P Parameter: Tissue Value: Aerial
  misc_feature: MA Experiment 108561 PARAMETER Experiment Name: At_100uM_ABA_cDNA_P Parameter: Treatment Value: 100uM ABA vs. No Treatment
  misc_feature: MA Experiment ID: 108576 Result: Down-regulated in Transcription
  misc_feature: MA Experiment 108576 PARAMETER Experiment Name: At_42deg_Heat_cDNA_P Parameter: Temperature (deg C) Value: 42 vs. 22
  misc_feature: MA Experiment 108576 PARAMETER Experiment Name: At_42deg_Heat_cDNA_P Parameter: Timepoint (hr) Value: 1
  misc_feature: MA Experiment 108576 PARAMETER Experiment Name: At_42deg_Heat_cDNA_P Parameter: Tissue Value: Aerial
  misc_feature: MA Experiment ID: 108579 Result: Up-regulated in Transcription
  misc_feature: MA Experiment 108579 PARAMETER Experiment Name: At_4deg_Cold_cDNA_P Parameter: Temperature (deg C) Value: 4 vs. 22
  misc_feature: MA Experiment 108579 PARAMETER Experiment Name: At_4deg_Cold_cDNA_P Parameter: Timepoint (hr) Value: 6
  misc_feature: MA Experiment 108579 PARAMETER Experiment Name: At_4deg_Cold_cDNA_P Parameter: Tissue Value: Aerial
  misc_feature: MA Experiment ID: 108595 Result: Down-regulated in Transcription
  misc_feature: MA Experiment 108595 PARAMETER Experiment Name: At_Ler-pi_Ovule_cDNA_P Parameter: Plant Line Value: null
  misc_feature: MA Experiment ID: 20000069 Result: Down-regulated in Transcription
  misc_feature: MA Experiment 20000069 PARAMETER Experiment Name: At_100uM_ABA_Mutants_cDNA_P Parameter: Plant Line Value: CS23
  misc_feature: MA Experiment 20000069 PARAMETER Experiment Name: At_100uM_ABA_Mutants_cDNA_P Parameter: Timepoint (hr) Value: 6
  misc_feature: MA Experiment 20000069 PARAMETER Experiment Name: At_100uM_ABA_Mutants_cDNA_P Parameter: Tissue Value: Aerial
  misc_feature: MA Experiment 20000069 PARAMETER Experiment Name: At_100uM_ABA_Mutants_cDNA_P Parameter: Treatment Value: 100uM ABA vs. No Treatment
  misc_feature: MA Experiment ID: 20000072 Result: Down-regulated in Transcription
  misc_feature: MA Experiment 20000072 PARAMETER Experiment Name: At_100uM_ABA_Mutants_cDNA_P Parameter: Plant Line Value: CS8105
  misc_feature: MA Experiment 20000072 PARAMETER Experiment Name: At_100uM_ABA_Mutants_cDNA_P Parameter: Timepoint (hr) Value: 6
  misc_feature: MA Experiment 20000072 PARAMETER Experiment Name: At_100uM_ABA_Mutants_cDNA_P Parameter: Tissue Value: Aerial
  misc_feature: MA Experiment 20000072 PARAMETER Experiment Name: At_100uM_ABA_Mutants_cDNA_P Parameter: Treatment Value: 100uM ABA vs. No Treatment
  misc_feature: MA Experiment ID: 20000184 Result: Up-regulated in Transcription
  misc_feature: MA Experiment 20000184 PARAMETER Experiment Name: At_Shoots__P Parameter: Age (day) Value: 7
  misc_feature: MA Experiment 20000184 PARAMETER Experiment Name: At_Shoots__P Parameter: Tissue Value: Shoots vs. Whole Plant
  misc_feature: MA Experiment ID: 20000234 Result: Up-regulated in Transcription
  misc_feature: MA Experiment 20000234 PARAMETER Experiment Name: At_Siliques_P Parameter: Age (day) Value: 21
  misc_feature: MA Experiment 20000234 PARAMETER Experiment Name: At_Siliques_P Parameter: Organism Value: A. thaliana
  misc_feature: MA Experiment 20000234 PARAMETER Experiment Name: At_Siliques_P Parameter: Plant Line Value: WS
  misc_feature: MA Experiment 20000234 PARAMETER Experiment Name: At_Siliques_P Parameter: Tissue Value: Less Than 5mm Siliques vs. Whole Plant
  misc_feature: MA Experiment ID: 20000235 Result: Up-regulated in Transcription
  misc_feature: MA Experiment 20000235 PARAMETER Experiment Name: At_Siliques_P Parameter: Age (day) Value: 21
  misc_feature: MA Experiment 20000235 PARAMETER Experiment Name: At_Siliques_P Parameter: Organism Value: A. thaliana
  misc_feature: MA Experiment 20000235 PARAMETER Experiment Name: At_Siliques_P Parameter: Plant Line Value: WS
  misc_feature: MA Experiment 20000235 PARAMETER Experiment Name: At_Siliques_P Parameter: Tissue Value: 5-10mm Siliques vs. Whole Plant
  misc_feature: MA Experiment ID: 20000264 Result: Up-regulated in Transcription
  misc_feature: MA Experiment 20000264 PARAMETER Experiment Name: At_Open_Flower_P Parameter: Age (day) Value: 21
  misc_feature: MA Experiment 20000264 PARAMETER Experiment Name: At_Open_Flower_P Parameter: Plant Line Value: WS
  misc_feature: MA Experiment 20000264 PARAMETER Experiment Name: At_Open_Flower_P Parameter: Tissue Value: Open Flower vs. Whole Plant
  misc_feature: MA Experiment ID: 20000286 Result: Up-regulated in Transcription
  misc_feature: MA Experiment 20000286 PARAMETER Experiment Name: At_Open_Flower_P Parameter: Age (day) Value: 21
  misc_feature: MA Experiment 20000286 PARAMETER Experiment Name: At_Open_Flower_P Parameter: Plant Line Value: WS
  misc_feature: MA Experiment 20000286 PARAMETER Experiment Name: At_Open_Flower_P Parameter: Tissue Value: Half Open vs. Whole Plant
  misc_feature: MA Experiment ID: 20000451 Result: Down-regulated in Transcription
  misc_feature: MA Experiment 20000451 PARAMETER Experiment Name: At_CS6879_Shoots-Roots_P Parameter: Age (day) Value: 14
  misc_feature: MA Experiment 20000451 PARAMETER Experiment Name: At_CS6879_Shoots-Roots_P Parameter: Organism Value: A. thaliana
  misc_feature: MA Experiment 20000451 PARAMETER Experiment Name: At_CS6879_Shoots-Roots_P Parameter: Plant Line Value: CS6879 vs. WS
  misc_feature: MA Experiment 20000451 PARAMETER Experiment Name: At_CS6879_Shoots-Roots_P Parameter: Tissue Value: Roots
  misc_feature: MA Experiment ID: 20000452 Result: Down-regulated in Transcription
  misc_feature: MA Experiment 20000452 PARAMETER Experiment Name: At_CS6879_Shoots-Roots_P Parameter: Age (day) Value: 14
  misc_feature: MA Experiment 20000452 PARAMETER Experiment Name: At_CS6879_Shoots-Roots_P Parameter: Organism Value: A. thaliana
  misc_feature: MA Experiment 20000452 PARAMETER Experiment Name: At_CS6879_Shoots-Roots_P Parameter: Plant Line Value: CS6879 vs. WS
  misc_feature: MA Experiment 20000452 PARAMETER Experiment Name: At_CS6879_Shoots-Roots_P Parameter: Tissue Value: Shoots
aaaataatattaattttctcggcgaggcttgcagcgtggtcggcagtcagcttctccaatgagagttgtttgcttgggactccgagatctgtggatctattggatgctctgtcttataaagtgtcggcgaaggctctggtctcattatgtttcctgttgcttgtagcggatccgtggttgtttgtctcactctgttttgctagtccggtgtaaaatgtcgccttgtctccgacgtcaccgtatccggaagaaagtgtgaggttccatgtgtggttctgtctttgcggattatgaagattagcataggagttctgttacttttaggcagtttggcatctttagaggaggattagattatcgatggttggccacgggcatcttcgatatgtactatcaaaggatctcttgaagtatgctttccttgttgggttggtttatggtcccatttggtcgagtgttttgttttggtctgttcttgtagtggggttcttctgctttcattatatgtttgtatcggtttgtagccttgtagtattgtttctttgcttcccttacatagggctttagactccagagatatctttgttttctgctagcatatggttgtaatcttccaaatatccttcatggtttttaataaaatctagatg

SEQ ID NO: 69350 - protein, 70 aa, Arabidopsis thaliana
  peptide (1)..(70): Ceres Seq. ID no. 4955541
KIILIFSARLAAWSAVSFSNESCLLGTPRSVDLLDALSYKVSAKALVSLCFLLLVADPWLFVSLCFASPV

SEQ ID NO: 69351 - protein, 68 aa, Arabidopsis thaliana
  peptide (1)..(68): Ceres Seq. ID no. 4955542
MVGHGHLRYVLSKDLLKYAFLVGLVYGPIWSSVLFWSVLVVGFFCFHYMFVSVCSLVVLFLCFPYIGL

SEQ ID NO: 69352 - protein, 35 aa, Arabidopsis thaliana
  peptide (1)..(35): Ceres Seq. ID no. 4955543
MRVVCLGLRDLWIYWMLCLIKCRRRLWSHYVSCCL

SEQ ID NO: 69353 - DNA, 673 bp, Arabidopsis thaliana
  misc_feature (1)..(673): Ceres Seq. ID no. 4975571
  misc_feature: MA Experiment ID: 108434 Result: Up-regulated in Transcription
  misc_feature: MA Experiment 108434 PARAMETER Experiment Name: At_Root_Tips_cDNA_P Parameter: Tissue Value: Root Tips
  misc_feature: MA Experiment ID: 108462 Result: Down-regulated in Transcription
  misc_feature: MA Experiment 108462 PARAMETER Experiment Name: At_Germinating_Seeds_cDNA_P Parameter: Age (day) Value: 2 vs. 0
  misc_feature: MA Experiment 108462 PARAMETER Experiment Name: At_Germinating_Seeds_cDNA_P Parameter: Tissue Value: Germinating Seeds
  misc_feature: MA Experiment ID: 108463 Result: Down-regulated in Transcription
  misc_feature: MA Experiment 108463 PARAMETER Experiment Name: At_Germinating_Seeds_cDNA_P Parameter: Age (day) Value: 3 vs. 0
  misc_feature: MA Experiment 108463 PARAMETER Experiment Name: At_Germinating_Seeds_cDNA_P Parameter: Tissue Value: Germinating Seeds
  misc_feature: MA Experiment ID: 108464 Result: Down-regulated in Transcription
  misc_feature: MA Experiment 108464 PARAMETER Experiment Name: At_Germinating_Seeds_cDNA_P Parameter: Age (day) Value: 4 vs. 0
  misc_feature: MA Experiment 108464 PARAMETER Experiment Name: At_Germinating_Seeds_cDNA_P Parameter: Tissue Value: Germinating Seeds
  misc_feature: MA Experiment ID: 20000068 Result: Up-regulated in Transcription
  misc_feature: MA Experiment ID: 20000573 Result: Down-regulated in Transcription
  misc_feature: MA Experiment 20000573 PARAMETER Experiment Name: At_100uM_ABA_Mutants__P Parameter: Organism Value: A. thaliana
  misc_feature: MA Experiment 20000573 PARAMETER Experiment Name: At_100uM_ABA_Mutants__P Parameter: Plant Line Value: CS22 vs. Ler wt
  misc_feature: MA Experiment 20000573 PARAMETER Experiment Name: At_100uM_ABA_Mutants__P Parameter: Timepoint (hr) Value: N/A
  misc_feature: MA Experiment 20000573 PARAMETER Experiment Name: At_100uM_ABA_Mutants__P Parameter: Tissue Value: Whole Plant
  misc_feature: MA Experiment 20000573 PARAMETER Experiment Name: At_100uM_ABA_Mutants__P Parameter: Treatment Value: None
  misc_feature: MA Experiment ID: 20001451 Result: Up-regulated in Transcription
  misc_feature: MA Experiment 20001451 PARAMETER Experiment Name: At_Far-red-induction_P Parameter: Age (day) Value: 7
  misc_feature: MA Experiment 20001451 PARAMETER Experiment Name: At_Far-red-induction_P Parameter: Light Value: Far-red vs. White
  misc_feature: MA Experiment 20001451 PARAMETER Experiment Name: At_Far-red-induction_P Parameter: Organism Value: A. thaliana
  misc_feature: MA Experiment 20001451 PARAMETER Experiment Name: At_Far-red-induction_P Parameter: Plant Line Value: Columbia
  misc_feature: MA Experiment 20001451 PARAMETER Experiment Name: At_Far-red-induction_P Parameter: Timepoint (hr) Value: 24
  misc_feature: MA Experiment 20001451 PARAMETER Experiment Name: At_Far-red-induction_P Parameter: Tissue Value: Whole Plant
  misc_feature: MA Experiment ID: 20001556 Result: Up-regulated in Transcription
  misc_feature: MA Experiment 20001556 PARAMETER Experiment Name: At_Drought_Soil_Dry_P Parameter: Age (day) Value: 26
  misc_feature: MA Experiment 20001556 PARAMETER Experiment Name: At_Drought_Soil_Dry_P Parameter: Organism Value: A. thaliana
  misc_feature: MA Experiment 20001556 PARAMETER Experiment Name: At_Drought_Soil_Dry_P Parameter: Plant Line Value: WS
  misc_feature: MA Experiment 20001556 PARAMETER Experiment Name: At_Drought_Soil_Dry_P Parameter: Post Timepoint (hr) Value: None
  misc_feature: MA Experiment 20001556 PARAMETER Experiment Name: At_Drought_Soil_Dry_P Parameter: Post-Treatment Value: None
  misc_feature: MA Experiment 20001556 PARAMETER Experiment Name: At_Drought_Soil_Dry_P Parameter: Timepoint (day) Value: 12
  misc_feature: MA Experiment 20001556 PARAMETER Experiment Name: At_Drought_Soil_Dry_P Parameter: Treatment Value: Drought vs. No Drought
  misc_feature: MA Experiment ID: 20001557 Result: Up-regulated in Transcription
  misc_feature: MA Experiment 20001557 PARAMETER Experiment Name: At_Drought_Soil_Dry_P Parameter: Age (day) Value: 27
  misc_feature: MA Experiment 20001557 PARAMETER Experiment Name: At_Drought_Soil_Dry_P Parameter: Organism Value: A. thaliana
  misc_feature: MA Experiment 20001557 PARAMETER Experiment Name: At_Drought_Soil_Dry_P Parameter: Plant Line Value: WS
  misc_feature: MA Experiment 20001557 PARAMETER Experiment Name: At_Drought_Soil_Dry_P Parameter: Post Timepoint (hr) Value: 3
  misc_feature: MA Experiment 20001557 PARAMETER Experiment Name: At_Drought_Soil_Dry_P Parameter: Post-Treatment Value: Re-Water vs. No Drought
  misc_feature: MA Experiment 20001557 PARAMETER Experiment Name: At_Drought_Soil_Dry_P Parameter: Timepoint (day) Value: 13
  misc_feature: MA Experiment 20001557 PARAMETER Experiment Name: At_Drought_Soil_Dry_P Parameter: Treatment Value: Drought vs. No Drought
  misc_feature: MA Experiment ID: 20001558 Result: Up-regulated in Transcription
  misc_feature: MA Experiment 20001558 PARAMETER Experiment Name: At_Drought_Soil_Dry_P Parameter: Age (day) Value: 27
  misc_feature: MA Experiment 20001558 PARAMETER Experiment Name: At_Drought_Soil_Dry_P Parameter: Organism Value: A. thaliana
  misc_feature: MA Experiment 20001558 PARAMETER Experiment Name: At_Drought_Soil_Dry_P Parameter: Plant Line Value: WS
  misc_feature: MA Experiment 20001558 PARAMETER Experiment Name: At_Drought_Soil_Dry_P Parameter: Post Timepoint (hr) Value: 6
  misc_feature: MA Experiment 20001558 PARAMETER Experiment Name: At_Drought_Soil_Dry_P Parameter: Post-Treatment Value: Re-Water vs. No Drought
  misc_feature: MA Experiment 20001558 PARAMETER Experiment Name: At_Drought_Soil_Dry_P Parameter: Timepoint (day) Value: 13
  misc_feature: MA Experiment 20001558 PARAMETER Experiment Name: At_Drought_Soil_Dry_P Parameter: Treatment Value: Drought vs. No Drought
aatgatgggcgactgtgaatcatatagggtgaccattgccagcgtttgagctcgtcgtgtgccgtcgacgttcccagcggaagaagcacatctgatggtccaagagatactcctgccatcaacgaaaaccggtgagaagaaaccaaaggtggtgttggtgctagtccagatctagagctttttgataagttgatgaagtcttgctctgatgtttgagaagaggagctgttggactgttgtgaattttcttgttttgggttcgaagacagagatgcatccaagatctgagtcagatcggagccaatagagcatcgatatactcttccgtcacaaagaaaactttcagtgaagaagctcacataaaaaaggagatttagatattttgagagatttgagataacggaggaagattcaatgaagataaagcttatatagaacacatgaaggttgatgggagttgataagtcccgacgccggcaatcggaaccacccccggcgtcagagagcatggttgtcgagagtgtctcgatttcggtgcctaggagctttttaagtcaccaagactagaaaaaaaaattcacatgttatttttgtacaaatactaaaatgtaatactagttgaactttacatatatgtttatgaaggcaaatcttaacaaactcaaagatttgt

SEQ ID NO: 69354 - protein, 38 aa, Arabidopsis thaliana
  peptide (1)..(38): Ceres Seq. ID no. 4975572
MGVDKSRRRQSEPPPASESMVVESVSISVPRSFLSHQD

SEQ ID NO: 69355 - protein, 32 aa, Arabidopsis thaliana
  peptide (1)..(32): Ceres Seq. ID no. 4975573
MFEKRSCWTVVNFLVLGSKTEMHPRSESDRSQ

SEQ ID NO: 69356 - DNA, 819 bp, Arabidopsis thaliana
  misc_feature (1)..(819): Ceres Seq. ID no. 4996238
  misc_feature: MA Experiment ID: 20000113 Result: Up-regulated in Transcription
  misc_feature: MA Experiment 20000113 PARAMETER Experiment Name: At_42deg_Heat_cDNA_P Parameter: Temperature (deg C) Value: 42 vs. 22
  misc_feature: MA Experiment 20000113 PARAMETER Experiment Name: At_42deg_Heat_cDNA_P Parameter: Timepoint (hr) Value: 8
  misc_feature: MA Experiment 20000113 PARAMETER Experiment Name: At_42deg_Heat_cDNA_P Parameter: Tissue Value: Aerial
acatcatctgcaataacttgagcttctttagtcgttgggaaaacacctcctccttcaatacatttatcaacatcaaattcatctctccgactaaaataagcattccctttcttacctacacttatcacaacacagtctattcctctctgcttcaactcttgaactcgcagagtagctttcttggtcactgcattgttgaaaccaccacacaatcctttatcgccagtaacaacaaccaaagcaactctcttcacgggtctaacaatgctcagaggaaaatcaatgtcttctaattgagcagattggttaattgagtagagaatctccacaagagtttcagtgaaaggtctaccctttatgactgcatcttgagctcgacgaactctagctgccgccacgagtctcatcgcttccgttatcttctgggtattcttcacactgtcgattcgttctcgtaactctcggattccagctcgaatttgaattgagggcaacggagatctcgacgaaatccggtttggtgtcagtgattgaaacggataataacgaactggtttcaaggtagctatgaaagagtaggactctgagctcgaagccgaattcgaattcgaaggagacgacaagagccaagaggtcgagatcgaacctgtcattttcgtttgggaaagaagaccctgaacttgagaggtttaagatttcatcttctcgtgaagaaatgagcaaagaaagagaacttgaggggttttctgtaattatcatgtttattaggggtcagtatataaaaattactacaaaagtcaaaattagagtttttgtttt

SEQ ID NO: 69357 - protein, 96 aa, Arabidopsis thaliana
  peptide (1)..(96): Ceres Seq. ID no. 4996239
IICNNLSFFSRWENTSSFNTFINIKFISPTKISIPFLTYTYHNTVYSSLLQLLNSQSSFLGHCIVETTTQSFIASNNNQSNSLHGSNNAQRKINVF

SEQ ID NO: 69358 - DNA, 1400 bp, Arabidopsis thaliana
  misc_feature (1)..(1400): Ceres Seq. ID no. 5671021
  misc_feature: MA Experiment ID: 20000171 Result: Down-regulated in Transcription
  misc_feature: MA Experiment 20000171 PARAMETER Experiment Name: At_42deg_Heat_P Parameter: Age (day) Value: 14
  misc_feature: MA Experiment 20000171 PARAMETER Experiment Name: At_42deg_Heat_P Parameter: Organism Value: A. thaliana
  misc_feature: MA Experiment 20000171 PARAMETER Experiment Name: At_42deg_Heat_P Parameter: Plant Line Value: WS
  misc_feature: MA Experiment 20000171 PARAMETER Experiment Name: At_42deg_Heat_P Parameter: Temperature (deg C) Value: 42 vs. 22
  misc_feature: MA Experiment 20000171 PARAMETER Experiment Name: At_42deg_Heat_P Parameter: Timepoint (hr) Value: 1
  misc_feature: MA Experiment 20000171 PARAMETER Experiment Name: At_42deg_Heat_P Parameter: Tissue Value: Aerial
  misc_feature: MA Experiment ID: 20000173 Result: Down-regulated in Transcription
  misc_feature: MA Experiment 20000173 PARAMETER Experiment Name: At_42deg_Heat_P Parameter: Age (day) Value: 14
  misc_feature: MA Experiment 20000173 PARAMETER Experiment Name: At_42deg_Heat_P Parameter: Organism Value: A. thaliana
  misc_feature: MA Experiment 20000173 PARAMETER Experiment Name: At_42deg_Heat_P Parameter: Plant Line Value: WS
  misc_feature: MA Experiment 20000173 PARAMETER Experiment Name: At_42deg_Heat_P Parameter: Temperature (deg C) Value: 42 vs. 22
  misc_feature: MA Experiment 20000173 PARAMETER Experiment Name: At_42deg_Heat_P Parameter: Timepoint (hr) Value: 6
  misc_feature: MA Experiment 20000173 PARAMETER Experiment Name: At_42deg_Heat_P Parameter: Tissue Value: Aerial
  misc_feature: MA Experiment ID: 20000495 Result: Up-regulated in Transcription
  misc_feature: MA Experiment 20000495 PARAMETER Experiment Name: At_Guard_Cells_P Parameter: Harvest Date Value: 8/2/2002
  misc_feature: MA Experiment 20000495 PARAMETER Experiment Name: At_Guard_Cells_P Parameter: Organism Value: A. thaliana
  misc_feature: MA Experiment 20000495 PARAMETER Experiment Name: At_Guard_Cells_P Parameter: Tissue Value: Guard Cells vs. Leaves
  misc_feature: MA Experiment ID: 20000573 Result: Down-regulated in Transcription
  misc_feature: MA Experiment 20000573 PARAMETER Experiment Name: At_100uM_ABA_Mutants__P Parameter: Organism Value: A. thaliana
  misc_feature: MA Experiment 20000573 PARAMETER Experiment Name: At_100uM_ABA_Mutants__P Parameter: Plant Line Value: CS22 vs. Ler wt
  misc_feature: MA Experiment 20000573 PARAMETER Experiment Name: At_100uM_ABA_Mutants__P Parameter: Timepoint (hr) Value: N/A
  misc_feature: MA Experiment 20000573 PARAMETER Experiment Name: At_100uM_ABA_Mutants__P Parameter: Tissue Value: Whole Plant
  misc_feature: MA Experiment 20000573 PARAMETER Experiment Name: At_100uM_ABA_Mutants__P Parameter: Treatment Value: None
  misc_feature: MA Experiment ID: 20001451 Result: Up-regulated in Transcription
  misc_feature: MA Experiment 20001451 PARAMETER Experiment Name: At_Far-red-induction_P Parameter: Age (day) Value: 7
  misc_feature: MA Experiment 20001451 PARAMETER Experiment Name: At_Far-red-induction_P Parameter: Light Value: Far-red vs. White
  misc_feature: MA Experiment 20001451 PARAMETER Experiment Name: At_Far-red-induction_P Parameter: Organism Value: A. thaliana
  misc_feature: MA Experiment 20001451 PARAMETER Experiment Name: At_Far-red-induction_P Parameter: Plant Line Value: Columbia
  misc_feature: MA Experiment 20001451 PARAMETER Experiment Name: At_Far-red-induction_P Parameter: Timepoint (hr) Value: 24
  misc_feature: MA Experiment 20001451 PARAMETER Experiment Name: At_Far-red-induction_P Parameter: Tissue Value: Whole Plant
  misc_feature: MA Experiment ID: 20001757 Result: Down-regulated in Transcription
  misc_feature: MA Experiment 20001757 PARAMETER Experiment Name: At_50mM_NH4NO3_L-to-H_P Parameter: Timepoint (hr) Value: 6
  misc_feature: MA Experiment 20001757 PARAMETER Experiment Name: At_50mM_NH4NO3_L-to-H_P Parameter: Tissue Value: Leaf
  misc_feature: MA Experiment 20001757 PARAMETER Experiment Name: At_50mM_NH4NO3_L-to-H_P Parameter: Treatment Value: 50mM NH4NO3 vs 100mM Mannitol
  misc_feature: MA Experiment ID: 20001911 Result: Up-regulated in Transcription
  misc_feature: MA Experiment 20001911 PARAMETER Experiment Name: At_Drought_Reproduction_P Parameter: Age (day) Value: 40
  misc_feature: MA Experiment 20001911 PARAMETER Experiment Name: At_Drought_Reproduction_P Parameter: Organism Value: A. thaliana
  misc_feature: MA Experiment 20001911 PARAMETER Experiment Name: At_Drought_Reproduction_P Parameter: Plant Line Value: WS
  misc_feature: MA Experiment 20001911 PARAMETER Experiment Name: At_Drought_Reproduction_P Parameter: Timepoint (day) Value: 10
  misc_feature: MA Experiment 20001911 PARAMETER Experiment Name: At_Drought_Reproduction_P Parameter: Tissue Value: Flowers
  misc_feature: MA Experiment 20001911 PARAMETER Experiment Name: At_Drought_Reproduction_P Parameter: Treatment Value: Drought vs. No Drought
gtggcatcttaatcaaattcttcttcgccttcactttcaattgtctctccaatatcctcaccagatctgaaaccggcaccggcgacgtgtttccgaggttaaacactctcaattgcgccggacctctcttcttccctccactccctgtactcttctccgccgtatctagcgccgctaaacatcccttcactatatcgtctatgtaagtgaaatccctagccaccgttccgtgattcgccgattcgaatatcgaaatcgatttgccttttagaatatctttagtgaagaagaaatacgccatgtctggtcttccccaaggtccatacacggtgaaaaatcttaatccggttagagataatccatagatgtggttgtaggtatgtgcgatctcttcgccggcttttttagtggcggcgtataaactcgccggttgatctgttttatctttctccgagaacggaactttggtgttgagtccgtagacggagctagacgaagcccagactatagcaggttgtggattcacagatttgcagatctcgaggagattgacgaatccggcgatgttgctatgaacgtacgagctagggttttccattgcgtaccgtacaccagcttgagctgctaaatgcataacgtgtgtgaaggagacgatcttgaatagcttacggagtaattcgacgtcgtttatgtctccttctacgatgaagatcccacttctctcgagtaaagctcgtcttgctcgtttcagagatggatcgtagtaatcgttgaagttgtcgaggccgattacgccgtctccgcggcgttttaatgcggcggagacgtgtgttccgacgaaaccagctgctccggttactaaaactgtgattccgttgtttgttgaggttcggattcgagctgaggatctgagacgtttttcccaagctggtcctccgtaggtgttggttcggagtgaacggcgagatggatcggacggtgaagaagggttaatggacggtggagatcggaggaagagtagagagatgagacagaggaggaagaaggagaaaaatgcaaactttgtgagagaagattggaatctgagacgatgcaagtaggaagatttctccatcttgaatttgcctgggcttgaagaacatggggattgaagattttagagatccaaatcatagggaaaatatgaagaagagagtcaaaaaaattactgtaaaaatttgttgactcttctaaagatttgttgtcgagtcttgaaatttgattggtgagatactaatactccaagattttcgggaagccactcgtcccaaaagttttgaatttgaaccaaagttttaaacttttgttaatagatttgttttgcggatagttgctaaatacaaaaatggactctaaatttg

SEQ ID NO: 69359 - protein, 67 aa, Arabidopsis thaliana; identical to SEQ ID NO: 250
  peptide (1)..(67): Ceres Seq. ID no. 5671022

SEQ ID NO: 69360 - protein, 35 aa, Arabidopsis thaliana
  peptide (1)..(35): Ceres Seq. ID no. 5671023
MDGGDRRKSREMRQRRKKEKNANFVREDWNLRRCK

SEQ ID NO: 69361 - DNA, 524 bp, Arabidopsis thaliana
  misc_feature (1)..(524): Ceres Seq. ID no. 5677702
  misc_feature: MA Experiment ID: 108462 Result: Up-regulated in Transcription
  misc_feature: MA Experiment 108462 PARAMETER Experiment Name: At_Germinating_Seeds_cDNA_P Parameter: Age (day) Value: 2 vs. 0
  misc_feature: MA Experiment 108462 PARAMETER Experiment Name: At_Germinating_Seeds_cDNA_P Parameter: Tissue Value: Germinating Seeds
  misc_feature: MA Experiment ID: 108464 Result: Up-regulated in Transcription
  misc_feature: MA Experiment 108464 PARAMETER Experiment Name: At_Germinating_Seeds_cDNA_P Parameter: Age (day) Value: 4 vs. 0
  misc_feature: MA Experiment 108464 PARAMETER Experiment Name: At_Germinating_Seeds_cDNA_P Parameter: Tissue Value: Germinating Seeds
  misc_feature: MA Experiment ID: 20000436 Result: Up-regulated in Transcription
  misc_feature: MA Experiment 20000436 PARAMETER Experiment Name: At_Drought_P Parameter: Age (day) Value: 7
  misc_feature: MA Experiment 20000436 PARAMETER Experiment Name: At_Drought_P Parameter: Organism Value: A. thaliana
  misc_feature: MA Experiment 20000436 PARAMETER Experiment Name: At_Drought_P Parameter: Plant Line Value: WS
  misc_feature: MA Experiment 20000436 PARAMETER Experiment Name: At_Drought_P Parameter: Timepoint (hr) Value: 12
  misc_feature: MA Experiment 20000436 PARAMETER Experiment Name: At_Drought_P Parameter: Tissue Value: Whole Plant
  misc_feature: MA Experiment 20000436 PARAMETER Experiment Name: At_Drought_P Parameter: Treatment Value: Drought vs. No Drought
  misc_feature: MA Experiment ID: 20000437 Result: Up-regulated in Transcription
  misc_feature: MA Experiment 20000437 PARAMETER Experiment Name: At_Drought_P Parameter: Age (day) Value: 8
  misc_feature: MA Experiment 20000437 PARAMETER Experiment Name: At_Drought_P Parameter: Organism Value: A. thaliana
  misc_feature: MA Experiment 20000437 PARAMETER Experiment Name: At_Drought_P Parameter: Plant Line Value: WS
  misc_feature: MA Experiment 20000437 PARAMETER Experiment Name: At_Drought_P Parameter: Timepoint (hr) Value: 24
  misc_feature: MA Experiment 20000437 PARAMETER Experiment Name: At_Drought_P Parameter: Tissue Value: Whole Plant
  misc_feature: MA Experiment 20000437 PARAMETER Experiment Name: At_Drought_P Parameter: Treatment Value: Drought vs. No Drought
  misc_feature: MA Experiment ID: 20001450 Result: Up-regulated in Transcription
  misc_feature: MA Experiment 20001450 PARAMETER Experiment Name: At_Far-red-induction_P Parameter: Age (day) Value: 7
  misc_feature: MA Experiment 20001450 PARAMETER Experiment Name: At_Far-red-induction_P Parameter: Light Value: Far-red vs. White
  misc_feature: MA Experiment 20001450 PARAMETER Experiment Name: At_Far-red-induction_P Parameter: Organism Value: A. thaliana
  misc_feature: MA Experiment 20001450 PARAMETER Experiment Name: At_Far-red-induction_P Parameter: Plant Line Value: Columbia
  misc_feature: MA Experiment 20001450 PARAMETER Experiment Name: At_Far-red-induction_P Parameter: Timepoint (hr) Value: 8
  misc_feature: MA Experiment 20001450 PARAMETER Experiment Name: At_Far-red-induction_P Parameter: Tissue Value: Whole Plant
  misc_feature: MA Experiment ID: 20001557 Result: Down-regulated in Transcription
  misc_feature: MA Experiment 20001557 PARAMETER Experiment Name: At_Drought_Soil_Dry_P Parameter: Age (day) Value: 27
  misc_feature: MA Experiment 20001557 PARAMETER Experiment Name: At_Drought_Soil_Dry_P Parameter: Organism Value: A. thaliana
  misc_feature: MA Experiment 20001557 PARAMETER Experiment Name: At_Drought_Soil_Dry_P Parameter: Plant Line Value: WS
  misc_feature: MA Experiment 20001557 PARAMETER Experiment Name: At_Drought_Soil_Dry_P Parameter: Post Timepoint (hr) Value: 3
  misc_feature: MA Experiment 20001557 PARAMETER Experiment Name: At_Drought_Soil_Dry_P Parameter: Post-Treatment Value: Re-Water vs. No Drought
  misc_feature: MA Experiment 20001557 PARAMETER Experiment Name: At_Drought_Soil_Dry_P Parameter: Timepoint (day) Value: 13
  misc_feature: MA Experiment 20001557 PARAMETER Experiment Name: At_Drought_Soil_Dry_P Parameter: Treatment Value: Drought vs. No Drought
  misc_feature: MA Experiment ID: 20001558 Result: Down-regulated in Transcription
  misc_feature: MA Experiment 20001558 PARAMETER Experiment Name: At_Drought_Soil_Dry_P Parameter: Age (day) Value: 27
  misc_feature: MA Experiment 20001558 PARAMETER Experiment Name: At_Drought_Soil_Dry_P Parameter: Organism Value: A. thaliana
  misc_feature: MA Experiment 20001558 PARAMETER Experiment Name: At_Drought_Soil_Dry_P Parameter: Plant Line Value: WS
  misc_feature: MA Experiment 20001558 PARAMETER Experiment Name: At_Drought_Soil_Dry_P Parameter: Post Timepoint (hr) Value: 6
  misc_feature: MA Experiment 20001558 PARAMETER Experiment Name: At_Drought_Soil_Dry_P Parameter: Post-Treatment Value: Re-Water vs. No Drought
  misc_feature: MA Experiment 20001558 PARAMETER Experiment Name: At_Drought_Soil_Dry_P Parameter: Timepoint (day) Value: 13
  misc_feature: MA Experiment 20001558 PARAMETER Experiment Name: At_Drought_Soil_Dry_P Parameter: Treatment Value: Drought vs. No Drought
  misc_feature: MA Experiment ID: 20001560 Result: Down-regulated in Transcription
  misc_feature: MA Experiment 20001560 PARAMETER Experiment Name: At_Drought_Soil_Dry_P Parameter: Age (day) Value: 28
  misc_feature: MA Experiment 20001560 PARAMETER Experiment Name: At_Drought_Soil_Dry_P Parameter: Organism Value: A. thaliana
  misc_feature: MA Experiment 20001560 PARAMETER Experiment Name: At_Drought_Soil_Dry_P Parameter: Plant Line Value: WS
  misc_feature: MA Experiment 20001560 PARAMETER Experiment Name: At_Drought_Soil_Dry_P Parameter: Post Timepoint (hr) Value: None
  misc_feature: MA Experiment 20001560 PARAMETER Experiment Name: At_Drought_Soil_Dry_P Parameter: Post-Treatment Value: None
  misc_feature: MA Experiment 20001560 PARAMETER Experiment Name: At_Drought_Soil_Dry_P Parameter: Timepoint (day) Value: 14
  misc_feature: MA Experiment 20001560 PARAMETER Experiment Name: At_Drought_Soil_Dry_P Parameter: Treatment Value: Drought vs. No Drought
  misc_feature: Pfam Name: DSBA Pfam Description: DSBA-like thioredoxin domain
atttatctgcagttgctggttattgtttgcatgtattcaataatgtttatctggttcactgaaactgtttttttttttggcagtcattgttttacaacgcgcaaacacaactcctttcaagacctgcagttgtggagaaaatagtcgaacttggaacagtctcgttggggaactcatatcaatcggttcttaaatccggcttcagcgacaaaaaatcggatcgtgcaaccagagtttccttcaagtatagcgcttcaagaggggtttatggtacaccaaccttctacgttaacgggtttgtattgtctgatgctgcttccccttcaaattttggaggatggaagaaaatcattgatcctctggttcaagcacatgagatggaagataacttcattcccttcctttgaagattttaagtgcttttgctgtgtcaattgtcatggtataatactatctgtaatgtatagactttctcaaaacctgtatgttgctcattgtaaatttgtaataaaggaaagtgatcc

SEQ ID NO: 69362 - protein, 85 aa, Arabidopsis thaliana; identical to SEQ ID NO: 261
  peptide (1)..(85): Ceres Seq. ID no. 5677703
  misc_feature: Pfam Name: DSBA Pfam Description: DSBA-like thioredoxin domain

SEQ ID NO: 69363 - protein, 71 aa, Arabidopsis thaliana; identical to SEQ ID NO: 262
  peptide (1)..(71): Ceres Seq. ID no. 5677704
  misc_feature: Pfam Name: DSBA Pfam Description: DSBA-like thioredoxin domain

SEQ ID NO: 69364 - protein, 50 aa, Arabidopsis thaliana; identical to SEQ ID NO: 263
  peptide (1)..(50): Ceres Seq. ID no. 5677705
  misc_feature: Pfam Name: DSBA Pfam Description: DSBA-like thioredoxin domain

SEQ ID NO: 69365 - DNA, 1678 bp, Arabidopsis thaliana
  misc_feature (1)..(1678): Ceres Seq. ID no. 5678455
  misc_feature: MA Experiment ID: 20000173 Result: Down-regulated in Transcription
  misc_feature: MA Experiment 20000173 PARAMETER Experiment Name: At_42deg_Heat_P Parameter: Age (day) Value: 14
  misc_feature: MA Experiment 20000173 PARAMETER Experiment Name: At_42deg_Heat_P Parameter: Organism Value: A. thaliana
  misc_feature: MA Experiment 20000173 PARAMETER Experiment Name: At_42deg_Heat_P Parameter: Plant Line Value: WS
  misc_feature: MA Experiment 20000173 PARAMETER Experiment Name: At_42deg_Heat_P Parameter: Temperature (deg C) Value: 42 vs. 22
  misc_feature: MA Experiment 20000173 PARAMETER Experiment Name: At_42deg_Heat_P Parameter: Timepoint (hr) Value: 6
  misc_feature: MA Experiment 20000173 PARAMETER Experiment Name: At_42deg_Heat_P Parameter: Tissue Value: Aerial
  misc_feature: MA Experiment ID: 20000234 Result: Up-regulated in Transcription
  misc_feature: MA Experiment 20000234 PARAMETER Experiment Name: At_Siliques_P Parameter: Age (day) Value: 21
  misc_feature: MA Experiment 20000234 PARAMETER Experiment Name: At_Siliques_P Parameter: Organism Value: A. thaliana
  misc_feature: MA Experiment 20000234 PARAMETER Experiment Name: At_Siliques_P Parameter: Plant Line Value: WS
  misc_feature: MA Experiment 20000234 PARAMETER Experiment Name: At_Siliques_P Parameter: Tissue Value: Less Than 5mm Siliques vs. Whole Plant
  misc_feature: MA Experiment ID: 20000235 Result: Up-regulated in Transcription
  misc_feature: MA Experiment 20000235 PARAMETER Experiment Name: At_Siliques_P Parameter: Age (day) Value: 21
  misc_feature: MA Experiment 20000235 PARAMETER Experiment Name: At_Siliques_P Parameter: Organism Value: A. thaliana
  misc_feature: MA Experiment 20000235 PARAMETER Experiment Name: At_Siliques_P Parameter: Plant Line Value: WS
  misc_feature: MA Experiment 20000235 PARAMETER Experiment Name: At_Siliques_P Parameter: Tissue Value: 5-10mm Siliques vs. Whole Plant
  misc_feature: MA Experiment ID: 20000264 Result: Up-regulated in Transcription
  misc_feature: MA Experiment 20000264 PARAMETER Experiment Name: At_Open_Flower_P Parameter: Age (day) Value: 21
  misc_feature: MA Experiment 20000264 PARAMETER Experiment Name: At_Open_Flower_P Parameter: Plant Line Value: WS
  misc_feature: MA Experiment 20000264 PARAMETER Experiment Name: At_Open_Flower_P Parameter: Tissue Value: Open Flower vs. Whole Plant
  misc_feature: MA Experiment ID: 20000265 Result: Up-regulated in Transcription
  misc_feature: MA Experiment 20000265 PARAMETER Experiment Name: At_Open_Flower_P Parameter: Age (day) Value: 21
  misc_feature: MA Experiment 20000265 PARAMETER Experiment Name: At_Open_Flower_P Parameter: Plant Line Value: WS
  misc_feature: MA Experiment 20000265 PARAMETER Experiment Name: At_Open_Flower_P Parameter: Tissue Value: Closed Flower vs. Whole Plant
  misc_feature: MA Experiment ID: 20000286 Result: Up-regulated in Transcription
  misc_feature: MA Experiment 20000286 PARAMETER Experiment Name: At_Open_Flower_P Parameter: Age (day) Value: 21
  misc_feature: MA Experiment 20000286 PARAMETER Experiment Name: At_Open_Flower_P Parameter: Plant Line Value: WS
  misc_feature: MA Experiment 20000286 PARAMETER Experiment Name: At_Open_Flower_P Parameter: Tissue Value: Half Open vs. Whole Plant
  misc_feature: MA Experiment ID: 20000794 Result: Up-regulated in Transcription
  misc_feature: MA Experiment 20000794 PARAMETER Experiment Name: At_Petals_P Parameter: Age (day) Value: 23-25 days
  misc_feature: MA Experiment 20000794 PARAMETER Experiment Name: At_Petals_P Parameter: Plant Line Value: WS
  misc_feature: MA Experiment 20000794 PARAMETER Experiment Name: At_Petals_P Parameter: Tissue Value: Petals vs. Whole plant
  misc_feature: MA Experiment ID: 20001247 Result: Down-regulated in Transcription
  misc_feature: MA Experiment 20001247 PARAMETER Experiment Name: At_Far-red-induction_P Parameter: Age (day) Value: 7
  misc_feature: MA Experiment 20001247 PARAMETER Experiment Name: At_Far-red-induction_P Parameter: Light Value: Far-red vs. White
  misc_feature: MA Experiment 20001247 PARAMETER Experiment Name: At_Far-red-induction_P Parameter: Organism Value: A. thaliana
  misc_feature: MA Experiment 20001247 PARAMETER Experiment Name: At_Far-red-induction_P Parameter: Plant Line Value: Columbia
  misc_feature: MA Experiment 20001247 PARAMETER Experiment Name: At_Far-red-induction_P Parameter: Timepoint (hr) Value: 1
  misc_feature: MA Experiment 20001247 PARAMETER Experiment Name: At_Far-red-induction_P Parameter: Tissue Value: Whole Plant
  misc_feature: MA Experiment ID: 20001450 Result: Down-regulated in Transcription
  misc_feature: MA Experiment 20001450 PARAMETER Experiment Name: At_Far-red-induction_P Parameter: Age (day) Value: 7
  misc_feature: MA Experiment 20001450 PARAMETER Experiment Name: At_Far-red-induction_P Parameter: Light Value: Far-red vs. White
  misc_feature: MA Experiment 20001450 PARAMETER Experiment Name: At_Far-red-induction_P Parameter: Organism Value: A. thaliana
  misc_feature: MA Experiment 20001450 PARAMETER Experiment Name: At_Far-red-induction_P Parameter: Plant Line Value: Columbia
  misc_feature: MA Experiment 20001450 PARAMETER Experiment Name: At_Far-red-induction_P Parameter: Timepoint (hr) Value: 8
  misc_feature: MA Experiment 20001450 PARAMETER Experiment Name: At_Far-red-induction_P Parameter: Tissue Value: Whole Plant
  misc_feature: MA Experiment ID: 20001757 Result: Down-regulated in Transcription
  misc_feature: MA Experiment 20001757 PARAMETER Experiment Name: At_50mM_NH4NO3_L-to-H_P Parameter: Timepoint (hr) Value: 6
  misc_feature: MA Experiment 20001757 PARAMETER Experiment Name: At_50mM_NH4NO3_L-to-H_P Parameter: Tissue Value: Leaf
  misc_feature: MA Experiment 20001757 PARAMETER Experiment Name: At_50mM_NH4NO3_L-to-H_P Parameter: Treatment Value: 50mM NH4NO3 vs 100mM Mannitol
  misc_feature: MA Experiment ID: 20001905 Result: Down-regulated in Transcription
  misc_feature: MA Experiment 20001905 PARAMETER Experiment Name: At_Drought_Reproduction_P Parameter: Age (day) Value: 40
  misc_feature: MA Experiment 20001905 PARAMETER Experiment Name: At_Drought_Reproduction_P Parameter: Organism Value: A. thaliana
  misc_feature: MA Experiment 20001905 PARAMETER Experiment Name: At_Drought_Reproduction_P Parameter: Plant Line Value: WS
  misc_feature: MA Experiment 20001905 PARAMETER Experiment Name: At_Drought_Reproduction_P Parameter: Timepoint (day) Value: 10
  misc_feature: MA Experiment 20001905 PARAMETER Experiment Name: At_Drought_Reproduction_P Parameter: Tissue Value: Rosettes
  misc_feature: MA Experiment 20001905 PARAMETER Experiment Name: At_Drought_Reproduction_P Parameter: Treatment Value: Drought vs. No Drought
atcttagattcaagagatattcttagtgacgtcttgaataaactttagaagagcaacgtgcgaagatccaccgtccattaaagctacgtgactcttctcgctcatctccttcactctactcctcacgtcactatcctgctccatcaaacaccggatccctctctctatctcctctgccgtcatcaactcatcatccgccgccatgaaatctcctcggaaactatttcggacctccaccgctagccctagctcctcaaccatctcgaacgcgttaacttgttgctctgcgtaaagcggccacgtagccatcggaactccgaaccatagactctctagcgtcgagttccatccacaatgcgacacgaaccctccgatcgcaggatttgctagaatggcgctttgtggagcccaacctacaatctttcctatctctgccgtccgttccaagaatccttccgggagaatttcctcaagattcgtaaattcttcgggaggtcctatcgatccttttggttgagcacgacgaagagaccagacaaagcggtgaccacttcgctcaagcgcgattgcgatttctttagcttggccctcacggaaacctcccatgcttccgaaacagaggaaaacaacggatttacgtggctgctcgtctagccaccgtaggatctccgattgcttatcgtcagatgaatttggaccgttgattttaagattcataaccggtccaactgtgtacaccgtaggcagaggactatctacgccggagaaaaacttcatagcttgaggctcaagctcagcgaatgtatttaccaaaatacctttagtttctcggaatcttctggtttgtctaaacataaccggtaaccactccttggttaatagaaccgaggggaaacacttaaccggtaaaggacgagtcaaacaaggaacttccagctcagtagtgtccgagtccttgaggtcactaacgtcatagttcttaacgtcgtaaaggtattcaacatgaacttgcaatccaagaaacgttgcgttggatgtgtaaaacatgtaactgggaacaccaaactcattagcgacatcaatcatcatcatgcaaaacatatccaccacgaatccagcaagacgcgacggcgaatctggtggacccgggtcagtaagtttttccaccgtggctttgacctgcggcttgaagttatcaatgtagtcgaaaaaatgtggtttggtgtcatcggagtctggtttatcagggacggagagaacgttgtagctaagacgttcttcagaatcagaggagagagaagcgatgtaagaagaagagttactgctactaaatccatgcatctgagggatgatgatgatggtgatggagagatggtcgtcacggtcaacatgaagcttagctacctccactaatggccggagatgtccgtcaccaggtgatggttgaagatgtttcggtgaagagataagattcgtctttagcatacatgacatgtggtacttggacatctactgatgttagtttaacttttgtcacaggccatacaatcttgatcttcagacttcaacgttagtacgttacgttagtatttttttcttttaattgtcagctatatactgcactatcatacaattaaaggtaaccgacgtttaattcattgagattttgttggcatgt

SEQ ID NO: 69366 - protein, 136 aa, Arabidopsis thaliana
  peptide (1)..(136): Ceres Seq. ID no. 5678456
MNLQSKKRCVGCVKHVTGNTKLISDINHHHAKHIHHESSKTRRRIWWTRVSKFFHRGFDLRLEVINVVEKMWFGVIGVWFIRDGENVVAKTFFRIRGERSDVRRRVTATKSMHLRDDDDGDGEMVVTVNMKLSYLH

SEQ ID NO: 69367 - DNA, 1135 bp, Arabidopsis thaliana
  misc_feature (1)..(1135): Ceres Seq. ID no. 5679824
  misc_feature: MA Experiment ID: 108434 Result: Down-regulated in Transcription
  misc_feature: MA Experiment 108434 PARAMETER Experiment Name: At_Root_Tips_cDNA_P Parameter: Tissue Value: Root Tips
  misc_feature: MA Experiment ID: 108461 Result: Down-regulated in Transcription
  misc_feature: MA Experiment 108461 PARAMETER Experiment Name: At_Germinating_Seeds_cDNA_P Parameter: Age (day) Value: 1 vs. 0
  misc_feature: MA Experiment 108461 PARAMETER Experiment Name: At_Germinating_Seeds_cDNA_P Parameter: Tissue Value: Germinating Seeds
  misc_feature: MA Experiment ID: 108488 Result: Down-regulated in Transcription
  misc_feature: MA Experiment ID: 108668 Result: Up-regulated in Transcription
  misc_feature: MA Experiment 108668 PARAMETER Experiment Name: At_2mM_SA_cDNA_P Parameter: Plant Line Value: WS
  misc_feature: MA Experiment 108668 PARAMETER Experiment Name: At_2mM_SA_cDNA_P Parameter: Timepoint (hr) Value: 6
  misc_feature: MA Experiment 108668 PARAMETER Experiment Name: At_2mM_SA_cDNA_P Parameter: Treatment Value: 2mM SA vs. No Treatment
  misc_feature: MA Experiment ID: 20000070 Result: Up-regulated in Transcription
  misc_feature: MA Experiment 20000070 PARAMETER Experiment Name: At_100uM_ABA_Mutants_cDNA_P Parameter: Plant Line Value: CS24
  misc_feature: MA Experiment 20000070 PARAMETER Experiment Name: At_100uM_ABA_Mutants_cDNA_P Parameter: Timepoint (hr) Value: 6
  misc_feature: MA Experiment 20000070 PARAMETER Experiment Name: At_100uM_ABA_Mutants_cDNA_P Parameter: Tissue Value: Aerial
  misc_feature: MA Experiment 20000070 PARAMETER Experiment Name: At_100uM_ABA_Mutants_cDNA_P Parameter: Treatment Value: 100uM ABA vs. No Treatment
  misc_feature: MA Experiment ID: 20000071 Result: Up-regulated in Transcription
  misc_feature: MA Experiment 20000071 PARAMETER Experiment Name: At_100uM_ABA_Mutants_cDNA_P Parameter: Plant Line Value: CS8104
  misc_feature: MA Experiment 20000071 PARAMETER Experiment Name: At_100uM_ABA_Mutants_cDNA_P Parameter: Timepoint (hr) Value: 6
  misc_feature: MA Experiment 20000071 PARAMETER Experiment Name: At_100uM_ABA_Mutants_cDNA_P Parameter: Tissue Value: Aerial
  misc_feature: MA Experiment 20000071 PARAMETER Experiment Name: At_100uM_ABA_Mutants_cDNA_P Parameter: Treatment Value: 100uM ABA vs. No Treatment
  misc_feature: MA Experiment ID: 20000089 Result: Up-regulated in Transcription
  misc_feature: MA Experiment ID: 20000113 Result: Down-regulated in Transcription
  misc_feature: MA Experiment 20000113 PARAMETER Experiment Name: At_42deg_Heat_cDNA_P Parameter: Temperature (deg C) Value: 42 vs. 22
  misc_feature: MA Experiment 20000113 PARAMETER Experiment Name: At_42deg_Heat_cDNA_P Parameter: Timepoint (hr) Value: 8
  misc_feature: MA Experiment 20000113 PARAMETER Experiment Name: At_42deg_Heat_cDNA_P Parameter: Tissue Value: Aerial
  misc_feature: MA Experiment ID: 20000173 Result: Down-regulated in Transcription
  misc_feature: MA Experiment 20000173 PARAMETER Experiment Name: At_42deg_Heat_P Parameter: Age (day) Value: 14
  misc_feature: MA Experiment 20000173 PARAMETER Experiment Name: At_42deg_Heat_P Parameter: Organism Value: A. thaliana
  misc_feature: MA Experiment 20000173 PARAMETER Experiment Name: At_42deg_Heat_P Parameter: Plant Line Value: WS
  misc_feature: MA Experiment 20000173 PARAMETER Experiment Name: At_42deg_Heat_P Parameter: Temperature (deg C) Value: 42 vs. 22
  misc_feature: MA Experiment 20000173 PARAMETER Experiment Name: At_42deg_Heat_P Parameter: Timepoint (hr) Value: 6
  misc_feature: MA Experiment 20000173 PARAMETER Experiment Name: At_42deg_Heat_P Parameter: Tissue Value: Aerial
  misc_feature: MA Experiment ID: 20000184 Result: Down-regulated in Transcription
  misc_feature: MA Experiment 20000184 PARAMETER Experiment Name: At_Shoots__P Parameter: Age (day) Value: 7
  misc_feature: MA Experiment 20000184 PARAMETER Experiment Name: At_Shoots__P Parameter: Tissue Value: Shoots vs. Whole Plant
  misc_feature: MA Experiment ID: 20000185 Result: Down-regulated in Transcription
  misc_feature: MA Experiment 20000185 PARAMETER Experiment Name: At_Roots__P Parameter: Age (day) Value: 7 vs. 21
  misc_feature: MA Experiment 20000185 PARAMETER Experiment Name: At_Roots__P Parameter: Organism Value: A. thaliana
  misc_feature: MA Experiment 20000185 PARAMETER Experiment Name: At_Roots__P Parameter: Tissue Value: Roots vs. Whole Plant
  misc_feature: MA Experiment ID: 20000224 Result: Up-regulated in Transcription
  misc_feature: MA Experiment ID: 20000495 Result: Up-regulated in Transcription
  misc_feature: MA Experiment 20000495 PARAMETER Experiment Name: At_Guard_Cells_P Parameter: Harvest Date Value: 8/2/2002
  misc_feature: MA Experiment 20000495 PARAMETER Experiment Name: At_Guard_Cells_P Parameter: Organism Value: A. thaliana
  misc_feature: MA Experiment 20000495 PARAMETER Experiment Name: At_Guard_Cells_P Parameter: Tissue Value: Guard Cells vs. Leaves
  misc_feature: MA Experiment ID: 20001248 Result: Up-regulated in Transcription
  misc_feature: MA Experiment 20001248 PARAMETER Experiment Name: At_Far-red-induction_P Parameter: Age (day) Value: 7
  misc_feature: MA Experiment 20001248 PARAMETER Experiment Name: At_Far-red-induction_P Parameter: Light Value: Far-red vs. White
  misc_feature: MA Experiment 20001248 PARAMETER Experiment Name: At_Far-red-induction_P Parameter: Organism Value: A. thaliana
  misc_feature: MA Experiment 20001248 PARAMETER Experiment Name: At_Far-red-induction_P Parameter: Plant Line Value: Columbia
  misc_feature: MA Experiment 20001248 PARAMETER Experiment Name: At_Far-red-induction_P Parameter: Timepoint (hr) Value: 4
  misc_feature: MA Experiment 20001248 PARAMETER Experiment Name: At_Far-red-induction_P Parameter: Tissue Value: Whole Plant
atgcgtcttcatcgctgctcgccatcgccggccaccggggttgccgctgatgcgattcgatccagtgggaacttttgtcaccttgcctcttctctctttcctaacactcaaatctctcctcagccttcagatagatagtctttgaagcaaaccaaaggtgaaaactgttctgcagttggtgatgacaagaagaatcacaagcttttgacttatgtttgagaatcatcatgggacaaggcttccgcaatcgaaatgggactttttcagcagcatcctagaaagactctttgcctttatcgcttcacctagacaacgagcaaggataactccatcctccatggctgagcaacctccttgtccgatatcaggagtcattgggtgaagtgcatctcctgcaacgcacacgttgtcttttgtgatgtttgaccatagcagttcccatggaggtcggtacttcagttgagacatcaccatgctatcaagatcagtggtctccaccacattcttaatgttttcagagaagaagaaacatactcggattctggaaacagcatctctgtgggaggagttcctgcagaaattgttccaaccacccatctgcagcaaaatcaaagatgagtccccttttttactgagctgattatatatgaatagtaataatagtgttagtttgatacccttcaaggcgatcatggagactgcgaatatgctgagaaacgccgagagcttccatggccttccaagcattgaaccaagtggtaaatgcaaatcctgtcgctctcagtgtctccgaagattccagcaccatgcttctgatcccaagcctgtgacacacaccactttagttaacttactctgcttaataacaactcaaaaggcacgccacacacacctgtgtagtccaacagcggtggaaaggccggagataccggcgccaacgatgatgatatctgggctgccttcttcttccatggtgcgttgatgatcttagaaagaaagctctgtttttcttcctctctagtatttatttttaactttcaagtaaacaaaaagaaatgtggttgaagttggcaagtcaaacaaggcaccccgttctaggcaggcggctacagtcatcaaatatcgaatctttaat

SEQ ID NO: 69368 - protein, 111 aa, Arabidopsis thaliana; identical to SEQ ID NO: 295
  peptide (1)..(111): Ceres Seq. ID no. 5679825

SEQ ID NO: 69369 - protein, 96 aa, Arabidopsis thaliana; identical to SEQ ID NO: 296
  peptide (1)..(96): Ceres Seq. ID no. 5679826

SEQ ID NO: 69370 - protein, 91 aa, Arabidopsis thaliana; identical to SEQ ID NO: 297
  peptide (1)..(91): Ceres Seq. ID no. 5679827

SEQ ID NO: 69371 - DNA, 1627 bp, Arabidopsis thaliana
  misc_feature (1)..(1627): Ceres Seq. ID no. 6432518
  misc_feature: MA Experiment ID: 108461 Result: Up-regulated in Transcription
  misc_feature: MA Experiment 108461 PARAMETER Experiment Name: At_Germinating_Seeds_cDNA_P Parameter: Age (day) Value: 1 vs. 0
  misc_feature: MA Experiment 108461 PARAMETER Experiment Name: At_Germinating_Seeds_cDNA_P Parameter: Tissue Value: Germinating Seeds
  misc_feature: MA Experiment ID: 108572 Result: Up-regulated in Transcription
  misc_feature: MA Experiment 108572 PARAMETER Experiment Name: At_Drought_cDNA_P Parameter: Timepoint (hr) Value: 1
  misc_feature: MA Experiment 108572 PARAMETER Experiment Name: At_Drought_cDNA_P Parameter: Tissue Value: Aerial
  misc_feature: MA Experiment 108572 PARAMETER Experiment Name: At_Drought_cDNA_P Parameter: Treatment Value: Drought vs. No Drought
  misc_feature: MA Experiment ID: 108573 Result: Up-regulated in Transcription
  misc_feature: MA Experiment 108573 PARAMETER Experiment Name: At_Drought_cDNA_P Parameter: Timepoint (hr) Value: 6
  misc_feature: MA Experiment 108573 PARAMETER Experiment Name: At_Drought_cDNA_P Parameter: Tissue Value: Aerial
  misc_feature: MA Experiment 108573 PARAMETER Experiment Name: At_Drought_cDNA_P Parameter: Treatment Value: Drought vs. No Drought
  misc_feature: MA Experiment ID: 108579 Result: Down-regulated in Transcription
  misc_feature: MA Experiment 108579 PARAMETER Experiment Name: At_4deg_Cold_cDNA_P Parameter: Temperature (deg C) Value: 4 vs. 22
  misc_feature: MA Experiment 108579 PARAMETER Experiment Name: At_4deg_Cold_cDNA_P Parameter: Timepoint (hr) Value: 6
  misc_feature: MA Experiment 108579 PARAMETER Experiment Name: At_4deg_Cold_cDNA_P Parameter: Tissue Value: Aerial
  misc_feature: MA Experiment ID: 108585 Result: Up-regulated in Transcription
  misc_feature: MA Experiment 108585 PARAMETER Experiment Name: At_5mM_NaNP_cDNA_P Parameter: Timepoint (hr) Value: 6
  misc_feature: MA Experiment 108585 PARAMETER Experiment Name: At_5mM_NaNP_cDNA_P Parameter: Tissue Value: Aerial
  misc_feature: MA Experiment 108585 PARAMETER Experiment Name: At_5mM_NaNP_cDNA_P Parameter: Treatment Value: null
  misc_feature: MA Experiment ID: 108595 Result: Down-regulated in Transcription
  misc_feature: MA Experiment 108595 PARAMETER Experiment Name: At_Ler-pi_Ovule_cDNA_P Parameter: Plant Line Value: null
  misc_feature: MA Experiment ID: 20000087 Result: Down-regulated in Transcription
  misc_feature: MA Experiment 20000087 PARAMETER Experiment Name: At_100uM_ABA_Mutants_cDNA_P Parameter: Plant Line Value: WS
  misc_feature: MA Experiment 20000087 PARAMETER Experiment Name: At_100uM_ABA_Mutants_cDNA_P Parameter: Timepoint (hr) Value: 6
  misc_feature: MA Experiment 20000087 PARAMETER Experiment Name: At_100uM_ABA_Mutants_cDNA_P Parameter: Tissue Value: Aerial
  misc_feature: MA Experiment 20000087 PARAMETER Experiment Name: At_100uM_ABA_Mutants_cDNA_P Parameter: Treatment Value: 100uM ABA vs. No Treatment
  misc_feature: MA Experiment ID: 20000089 Result: Down-regulated in Transcription
aaacaaaaaaaaaaacagagagagagatacttacggcttgggggataccgaggatggcgaagagagttaaagcaccagctgtgacgttaccaggtggacctgttttagcgccgccgtgatctcgtcggtgattctcagcttgtttcgtaaccacaaccgtcatggccaagcaaatggcgaggatgaagttaacaataccccaaagccttttagctcctcccaatttccgaccaatccattcaacaccaagagacatgaaaccaagaacaatagcgttaagcataagccccaaagcaccagctctgactccgtcgttgtaaagcttcttagaggctgcggttgcggttgcgtctgagtttcctccgtacacctcacggcccatccaatcagtgtcgaagagaaggaaagggaaccaagcgatccagtttagtgcagtgactataagaagcatccacatgggtctttttagttccttgaaagctccgaagatttctccgaaaaacggaacgttggaggcttttccatcggctgttggctctggcgtccatggcttctccttcacgtaacagagagatacgaaagtgactatgaggagaagcgttatggataggaaaaaacacgttttgaggtttgcgcagtagagatcgcatgactcagtcatcgtgaaaggcacaactttgtagagatttctgtaagatcccgcagcgtaacccaaaacgtttccaaccgccatgaaaaacgagaaaaacgcgtttgcggttcgcgttttcttagcgttccctgctgataaatcagccaagaaagctctgcagggtccttgtaaggtgttgttagccacgtcaagaatccaaaacccgagagcgaatatcgctatggctcgcgttttcggcggtttgtcaagctgatcgcccatgctgtgacctatatcggcagcgtaaccgataaggaaaacagcaacggtgactaaaccagctccagcgacgatgaagggacgacgacggccgaatcttgaggtgcaacggtcactgtggtaaccgacgataggctgaacaagcataccggagattggaccacagagccaaatcagagaagcccatttatgtgggattccgagtagctgcacgtaaggagtcaacagagataactgtaaagcccaaccgaactgtacaccggcggcaatggaagacaccgatatgatcttacgaagccgttccggctgatctaactcacccgtctgcgtttccaacgcagacgcaccatttgcagctttctccattggatggctgaccatatttgacaaaccaagaaagtaagaaaaaaaagaaatttctttgagagggtttttggtggttgttgcggtggttgtagtggtggaggaagaggaagagtggagaggtatttataggaagagaaggataggattatccgaagaggagacagtgaagttaagagagccttgaggcatagaaaagagaaaacagagctgtgtctatagcgtagggtatcttcgtgacacgtgtctgtcgtatattatttttttctgttttgtatttaattattttcttcttttttagcgtaatatattattttctgtttttggaacttaaatcttttagattttaccttc

SEQ ID NO: 69372 - protein, 57 aa, Arabidopsis thaliana
  peptide (1)..(57): Ceres Seq. ID no. 6432519
MKNEKNAFAVRVFLAFPADKSAKKALQGPCKVLLATSRIQNPRANIAMARVFGGLSS

SEQ ID NO: 69373 - protein, 52 aa, Arabidopsis thaliana
  peptide (1)..(52): Ceres Seq. ID no. 6432520
MAKQMARMKLTIPQSLLAPPNFRPIHSTPRDMKPRTIALSISPKAPALTPSL

SEQ ID NO: 69374 - protein, 48 aa, Arabidopsis thaliana
  peptide (1)..(48): Ceres Seq. ID no. 6432521
MARMKLTIPQSLLAPPNFRPIHSTPRDMKPRTIALSISPKAPALTPSL

SEQ ID NO: 69375 - DNA, 1169 bp, Arabidopsis thaliana
  misc_feature (1)..(1169): Ceres Seq. ID no. 6432908
  misc_feature: MA Experiment ID: 108605 Result: Down-regulated in Transcription
  misc_feature: MA Experiment 108605 PARAMETER Experiment Name: At_100uM_ABA_cDNA_P Parameter: Timepoint (hr) Value: 6
  misc_feature: MA Experiment 108605 PARAMETER Experiment Name: At_100uM_ABA_cDNA_P Parameter: Tissue Value: Aerial
  misc_feature: MA Experiment 108605 PARAMETER Experiment Name: At_100uM_ABA_cDNA_P Parameter: Treatment Value: 100uM ABA vs. No Treatment
  misc_feature: MA Experiment ID: 20000069 Result: Down-regulated in Transcription
  misc_feature: MA Experiment 20000069 PARAMETER Experiment Name: At_100uM_ABA_Mutants_cDNA_P Parameter: Plant Line Value: CS23
  misc_feature: MA Experiment 20000069 PARAMETER Experiment Name: At_100uM_ABA_Mutants_cDNA_P Parameter: Timepoint (hr) Value: 6
  misc_feature: MA Experiment 20000069 PARAMETER Experiment Name: At_100uM_ABA_Mutants_cDNA_P Parameter: Tissue Value: Aerial
  misc_feature: MA Experiment 20000069 PARAMETER Experiment Name: At_100uM_ABA_Mutants_cDNA_P Parameter: Treatment Value: 100uM ABA vs. No Treatment
  misc_feature: MA Experiment ID: 20000113 Result: Down-regulated in Transcription
  misc_feature: MA Experiment 20000113 PARAMETER Experiment Name: At_42deg_Heat_cDNA_P Parameter: Temperature (deg C) Value: 42 vs. 22
  misc_feature: MA Experiment 20000113 PARAMETER Experiment Name: At_42deg_Heat_cDNA_P Parameter: Timepoint (hr) Value: 8
  misc_feature: MA Experiment 20000113 PARAMETER Experiment Name: At_42deg_Heat_cDNA_P Parameter: Tissue Value: Aerial
  misc_feature: MA Experiment ID: 20000440 Result: Up-regulated in Transcription
  misc_feature: MA Experiment 20000440 PARAMETER Experiment Name: At_Closed-Flower__Sub_P Parameter: Tissue Value: Closed Flower vs. Whole Plant
aagtcttggaatcttcgggacgtttcttgttgctctctttgactttcttgaagtatttgtttatgttttcccatttctctttgcatctctttgagttcctgttgaatcctaaccttctcattcccgctgatatctcttcccacaatggtccttttggtccgttttcttgatatttcgaatcaagattcgtcctcagctttatcaatgcttctatctccactttcggccaccgcgacgagctcgctgaagctgcaggagtcatattctgatcaccaccattgtccgttttcgttgtgtctaacgtcgacacaaccgcttgaattggctgcggaagcggagcaggaggttgcggtggaggagaccgttgaggcggttgctgctgattgttgttattaagctgcattgatggtcgaacttgttgcggctgaggctgcggttgtggctgattcggttgtttctctgacagtttttgaagaaaggccataacagcagcgtcttttgcagcggacatagagcgttcttgagctaagatctcgtgctcgcggttgattctggcaatctcttgaactctccaagactcttctctaaccaatctctcgtgttctcgcttttcaacagcttccaagaatttgcgttgaagctcttcctgtttatcaactacttgtttcatcaaccgctcgaaaaacaccttccatttcctcttccttttcttccttgtagtcgcagttccaccacccatctccatgtcagaagaagtcgaataagaagacgaagacgatgtagaattatccgatagaaaatcaccggagatgtttggaaacgaaggtacattaatctgctgagtatacggaggaattgatgaagaaggaagcgtcggcataactgtcgttaccggaggaggagttgaaaatatggagctgttgttgttgttgttgttgttgttgttgttgttttgctgtggtcgaagaggcgtttgttgttgatgatggtggagtgaggttgtagattgagactcgagagcttctaattgatcaaagaagcgataagttttgccttcggattttccggtacgaccttctttggttcgtttgtggtatttgtaaacgttctcgaatttctctttgcatttctttgcgtttcttatgtaaccatgctccgccattttccta

SEQ ID NO: 69376 - protein, 83 aa, Arabidopsis thaliana; identical to SEQ ID NO: 253
  peptide (1)..(83): Ceres Seq. ID no. 6432909

SEQ ID NO: 69377 - protein, 63 aa, Arabidopsis thaliana; identical to SEQ ID NO: 254
  peptide (1)..(63): Ceres Seq. ID no. 6432910

SEQ ID NO: 69378 - protein, 55 aa, Arabidopsis thaliana; identical to SEQ ID NO: 255
  peptide (1)..(55): Ceres Seq. ID no. 6432911

SEQ ID NO: 69379 - DNA, 264 bp, Arabidopsis thaliana
  misc_feature (1)..(264): Ceres Seq. ID no. 6437954
  misc_feature: MA Experiment ID: 20000355 Result: Up-regulated in Transcription
  misc_feature: MA Experiment 20000355 PARAMETER Experiment Name: At_Siliques_Sub_P Parameter: Age (day) Value: 21
  misc_feature: MA Experiment 20000355 PARAMETER Experiment Name: At_Siliques_Sub_P Parameter: Organism Value: A. thaliana
  misc_feature: MA Experiment 20000355 PARAMETER Experiment Name: At_Siliques_Sub_P Parameter: Plant Line Value: WS
  misc_feature: MA Experiment 20000355 PARAMETER Experiment Name: At_Siliques_Sub_P Parameter: Tissue Value: Less Than 5mm Siliques vs. Whole Plant
atggtgaacacaaaaattgtagccttgttaatggtggtgatgatggtaacaatgggaatggagaacattttggttcaggcaaatcgtcgtcatcatcattctccttccccttttccttcatctgattttgatgatagtggttcaaaatctccttctccttcaccaaaatcaaaagaaaagtcatcaacatattgcatgattggctgttcttttgagaagtgctttcaccatggaaaaagctcaagtaagtttggatctgcttag

SEQ ID NO: 69380 - protein, 87 aa, Arabidopsis thaliana
  peptide (1)..(87): Ceres Seq. ID no. 6437955
MVNTKIVALLMVVMMVTMGMENILVQANRRHHHSPSPFPSSDFDDSGSKSPSPSPKSKEKSSTYCMIGCSFEKCFHHGKSSSKFGSA

SEQ ID NO: 69381 - protein, 77 aa, Arabidopsis thaliana
  peptide (1)..(77): Ceres Seq. ID no. 6437956
MVVMMVTMGMENILVQANRRHHHSPSPFPSSDFDDSGSKSPSPSPKSKEKSSTYCMIGCSFEKCFHHGKSSSKFGSA

SEQ ID NO: 69382 - protein, 74 aa, Arabidopsis thaliana
  peptide (1)..(74): Ceres Seq. ID no. 6437957
MMVTMGMENILVQANRRHHHSPSPFPSSDFDDSGSKSPSPSPKSKEKSSTYCMIGCSFEKCFHHGKSSSKFGSA

SEQ ID NO: 69383 - DNA, 2082 bp, Arabidopsis thaliana
  misc_feature (1)..(2082): Ceres Seq. ID no. 12658521
  misc_feature: MA Experiment ID: 20000180 Result: Down-regulated in Transcription
  misc_feature: MA Experiment 20000180 PARAMETER Experiment Name: At_Germinating_Seeds_P Parameter: Age (hr) Value: 24 vs. 0
  misc_feature: MA Experiment 20000180 PARAMETER Experiment Name: At_Germinating_Seeds_P Parameter: Tissue Value: Germinating Seeds
  misc_feature: MA Experiment ID: 20000495 Result: Up-regulated in Transcription
  misc_feature: MA Experiment 20000495 PARAMETER Experiment Name: At_Guard_Cells_P Parameter: Harvest Date Value: 8/2/2002
  misc_feature: MA Experiment 20000495 PARAMETER Experiment Name: At_Guard_Cells_P Parameter: Organism Value: A. thaliana
  misc_feature: MA Experiment 20000495 PARAMETER Experiment Name: At_Guard_Cells_P Parameter: Tissue Value: Guard Cells vs. Leaves
atggattctgatgtgaggaggaagattaacaacactactcagggttcgtccccttctccgaagccctccaagttctctgtgtaccggaaccctgctctcgccgccgcttccaccgccaacagcatccgtccttcgaaatccgttcttctattcatattcttgctctctatcgcttccgctttctctctcatctccttcatggccggggagaaatggttgaccaatgctttaacattcgggaaaatatcccaagaggcagcttatgtcactgtaaaagcgtggcaggggctggtgactttgttttgtattggagcaatgatggctttgtccaaaggcatatctttgcacagagcaaagtttgctgctcgaggagaaactaaatctttctctaaagaaaccaaagatcagttttctttatcaaatcgtcagcttgaacttcttgggataaagaaaaaagctgaccagagtgtatcagaatttccaaagagtcgtcctgcattgaaacctgcacagtcattggagccgcttgtcccaatacaccatcaaactcttactggttcagctcataagtcttctggtggtggtgataagctgaattcccgtaatggaagccagattagttcatttagcactccctcaaaacaaatgggttcaccgtctatgtatcttgtcccttctagctcaccagtttcttctaaccgtctttcgtcgggtcaggataaggctgtctctagtccttggtctggtagacgaagttctgcaaaagacataactaccgaggagcagcttgagcagcttttggcagaaatagatgagaaaatcactgagtcggctgggaagatgcgtacgcctccaccaacagttgggagttttgccatggctagcccgagtacagttggtggttcaactggtgcatctggggctactaggagtacaccactaagacctgtcaggatgtctcctggcgctcagaaatttacgactcccccaaagaaaggagagggtgatttccccaacccaatgtccttagaaagggctatcgaaggttttattcatctaggtgtctatcctcagatagaagactggcgtgaccgactaaggcaatggtgttcctcagtgttgctcaaacctctgcttaacaaggttgaaaccagtcatattcaggtaatgcaaacagcatcaaagcttggtgttaatgtcacagttagtcaagttggaagtgatttgccaacaaatggaaccgctacaactgccttaccggttgatcgaacgaaggggtggcagccatcttactctctcgatgaagatgctcttcttcaccaattacgcgctaatcttgtacaggctattgatgcttccatgcaaaagctgcgtacagagaaccagcagtttcagcaacagcaacaacaacagcaacagcaagcggcactaatccctgtcatgcaggaatgtgttgatgctataagtgaacatcggaggcttcagggcttaatgaaaggagagtgggttaagggcctacttccgcgcagcagtattccagcagattacacagtgcaaagaatccgagcactcgcggaaggaacttgtgtgaagaactatgagtacaatggaggggcagatactcgtgagaaaaacaagaaatggagcctggagcctccaaccgattctcatctgcttctgtacttgttttgtgccttcttggaacacccaaagtggatgttacatttggaccctagctcttatacagggactcaggcgagcaagaaccctttattcttaggggttctgcctccaaaagagagattcccagagaagtacattgctgtggtatcgggtgtaccttcgacacttcatcctggtgcatgtgtgcttgcagtagacaagcaaagcccacccacatttgccttgtactgggataagaaagtgcagtttactcttcagggaagaacagcgctatgggactctatgttgttgatatgccacagaatcaaggtgggatacggaggtgttgttcgtgggatgaatctgggttcttcagcccttaacatcctccaagttgttgattccgacactgacgattaa

SEQ ID NO: 69384 - protein, 693 aa, Arabidopsis thaliana
  peptide (1)..(693): Ceres Seq. ID no. 12658522
MDSDVRRKINNTTQGSSPSPKPSKFSVYRNPALAAASTANSIRPSKSVLLFIFLLSIASAFSLISFMAGEKWLTNALTFGKISQEAAYVTVKAWQGLVTLFCIGAMMALSKGISLHRAKFAARGETKSFSKETKDQFSLSNRQLELLGIKKKADQSVSEFPKSRPALKPAQSLEPLVPIHHQTLTGSAHKSSGGGDKLNSRNGSQISSFSTPSKQMGSPSMYLVPSSSPVSSNRLSSGQDKAVSSPWSGRRSSAKDITTEEQLEQLLAEIDEKITESAGKMRTPPPTVGSFAMASPSTVGGSTGASGATRSTPLRPVRMSPGAQKFTTPPKKGEGDFPNPMSLERAIEGFIHLGVYPQIEDWRDRLRQWCSSVLLKPLLNKVETSHIQVMQTASKLGVNVTVSQVGSDLPTNGTATTALPVDRTKGWQPSYSLDEDALLHQLRANLVQAIDASMQKLRTENQQFQQQQQQQQQQAALIPVMQECVDAISEHRRLQGLMKGEWVKGLLPRSSIPADYTVQRIRALAEGTCVKNYEYNGGADTREKNKKWSLEPPTDSHLLLYLFCAFLEHPKWMLHLDPSSYTGTQASKNPLFLGVLPPKERFPEKYIAVVSGVPSTLHPGACVLAVDKQSPPTFALYWDKKVQFTLQGRTALWDSMLLICHRIKVGYGGVVRGMNLGSSALNILQVVDSDTDD

SEQ ID NO: 69385 - protein, 627 aa, Arabidopsis thaliana
  peptide (1)..(627): Ceres Seq. ID no. 12658523
MAGEKWLTNALTFGKISQEAAYVTVKAWQGLVTLFCIGAMMALSKGISLHRAKFAARGETKSFSKETKDQFSLSNRQLELLGIKKKADQSVSEFPKSRPALKPAQSLEPLVPIHHQTLTGSAHKSSGGGDKLNSRNGSQISSFSTPSKQMGSPSMYLVPSSSPVSSNRLSSGQDKAVSSPWSGRRSSAKDITTEEQLEQLLAEIDEKITESAGKMRTPPPTVGSFAMASPSTVGGSTGASGATRSTPLRPVRMSPGAQKFTTPPKKGEGDFPNPMSLERAIEGFIHLGVYPQIEDWRDRLRQWCSSVLLKPLLNKVETSHIQVMQTASKLGVNVTVSQVGSDLPTNGTATTALPVDRTKGWQPSYSLDEDALLHQLRANLVQAIDASMQKLRTENQQFQQQQQQQQQQAALIPVMQECVDAISEHRRLQGLMKGEWVKGLLPRSSIPADYTVQRIRALAEGTCVKNYEYNGGADTREKNKKWSLEPPTDSHLLLYLFCAFLEHPKWMLHLDPSSYTGTQASKNPLFLGVLPPKERFPEKYIAVVSGVPSTLHPGACVLAVDKQSPPTFALYWDKKVQFTLQGRTALWDSMLLICHRIKVGYGGVVRGMNLGSSALNILQVVDSDTDD

SEQ ID NO: 69386 - protein, 588 aa, Arabidopsis thaliana
  peptide (1)..(588): Ceres Seq. ID no. 12658524
MMALSKGISLHRAKFAARGETKSFSKETKDQFSLSNRQLELLGIKKKADQSVSEFPKSRPALKPAQSLEPLVPIHHQTLTGSAHKSSGGGDKLNSRNGSQISSFSTPSKQMGSPSMYLVPSSSPVSSNRLSSGQDKAVSSPWSGRRSSAKDITTEEQLEQLLAEIDEKITESAGKMRTPPPTVGSFAMASPSTVGGSTGASGATRSTPLRPVRMSPGAQKFTTPPKKGEGDFPNPMSLERAIEGFIHLGVYPQIEDWRDRLRQWCSSVLLKPLLNKVETSHIQVMQTASKLGVNVTVSQVGSDLPTNGTATTALPVDRTKGWQPSYSLDEDALLHQLRANLVQAIDASMQKLRTENQQFQQQQQQQQQQAALIPVMQECVDAISEHRRLQGLMKGEWVKGLLPRSSIPADYTVQRIRALAEGTCVKNYEYNGGADTREKNKKWSLEPPTDSHLLLYLFCAFLEHPKWMLHLDPSSYTGTQASKNPLFLGVLPPKERFPEKYIAVVSGVPSTLHPGACVLAVDKQSPPTFALYWDKKVQFTLQGRTALWDSMLLICHRIKVGYGGVVRGMNLGSSALNILQVVDSDTDD

SEQ ID NO: 69387 - DNA, 741 bp, Arabidopsis thaliana
  misc_feature (1)..(741): Ceres Seq. ID no. 1809983
  misc_feature: MA Experiment ID: 20000184 Result: Up-regulated in Transcription
  misc_feature: MA Experiment 20000184 PARAMETER Experiment Name: At_Shoots__P Parameter: Age (day) Value: 7
  misc_feature: MA Experiment 20000184 PARAMETER Experiment Name: At_Shoots__P Parameter: Tissue Value: Shoots vs. Whole Plant
  misc_feature: Pfam Name: TPT Pfam Description: Triose-phosphate Transporter family
atgatttcctcaattaaaccggttttaccttccttaactgcaatcgtcggcattgggatctatttcgcaatttggtgggcattgaacggtgtgttcaataactacaacaagaaggttttgaatgcttttccttacttgtggctaactttgacgctttctcttgcttgtggctctttgatgatgcttgtctcttgggtggctttggcgcatacaattggacatgttgaagcgatagtgagatgtgctcttgctgctgttatggagctcaacttcaatatgatagggtttatgggggcaatgatatcgaatttggcgtttgtgtttcgtaacatattctcaaagaagggaatgaaggggaagtcagtgagtgtgatgaattactatgcttgcttatctatgatgtctcttctcattgttactcctttcgccaattctgtggaaggtccccaaatgtgggctgatggttggcaaaacgatgtctctaaatcggaccaaactttgtctagtaagtgggtagtggcacatagtgttttctaccatttgtataatcaagtctcatacattcctcgttgcctcaatcatcatcttccaaaccctcttaaacatgtcaatgccctgggtgctgccatcgcgattcttggaactttcatttattctcagataaaaaatagagtgaagaaaaatcatattctgcttgttctttgtctaggaatgcttgaacctttagtgataactctatga

SEQ ID NO: 69388 - protein, 246 aa, Arabidopsis thaliana
  peptide (1)..(246): Ceres Seq. ID no. 1809984
  misc_feature: Pfam Name: TPT Pfam Description: Triose-phosphate Transporter family
  misc_feature (1)..(246): Homolog of NCBI NO: 15233337 NR Description: putative
  misc_feature (81)..(215): Homolog of NCBI NO: 9758260 NR Description: glucose-6-phosphate/phosphate translocator
  misc_feature (81)..(215): Homolog of NCBI NO: 18423670 NR Description: glucose-6-phosphate/phosphate translocator; id: At5g54800.1, supported by cDNA: 26107., supported by cDNA: supported by cDNA: gi_7229674 [Arabidopsis thaliana]
  misc_feature (18)..(71): Homolog of NCBI NO: 9758260 NR Description: glucose-6-phosphate/phosphate translocator
  misc_feature (18)..(71): Homolog of NCBI NO: 18423670 NR Description: glucose-6-phosphate/phosphate translocator; id: At5g54800.1, supported by cDNA: 26107., supported by cDNA: supported by cDNA: gi_7229674 [Arabidopsis thaliana]
  misc_feature (81)..(215): Homolog of NCBI NO: 7488807 NR Description: glucose-6-phosphate/phosphate-translocator
  misc_feature (16)..(65): Homolog of NCBI NO: 7488807 NR Description: glucose-6-phosphate/phosphate-translocator
  misc_feature (81)..(215): Homolog of NCBI NO: 38637068 NR Description: glucose-6-phosphate/phosphate translocator [Oryza
  misc_feature (3)..(65): Homolog of NCBI NO: 38637068 NR Description: glucose-6-phosphate/phosphate translocator [Oryza
  misc_feature (81)..(221): Homolog of NCBI NO: 7489258 NR Description: probable
MISSIKPVLPSLTAIVGIGIYFAIWWALNGVFNNYNKKVLNAFPYLWLTLTLSLACGSLMMLVSWVALAHTIGHVEAIVRCALAAVMELNFNMIGFMGAMISNLAFVFRNIFSKKGMKGKSVSVMNYYACLSMMSLLIVTPFANSVEGPQMWADGWQNDVSKSDQTLSSKWVVAHSVFYHLYNQVSYIPRCLNHHLPNPLKHVNALGAAIAILGTFIYSQIKNRVKKNHILLVLCLGMLEPLVITL

SEQ ID NO: 69389 - protein, 187 aa, Arabidopsis thaliana
  peptide (1)..(187): Ceres Seq. ID no. 1809985
  misc_feature: Pfam Name: TPT Pfam Description: Triose-phosphate Transporter family
  misc_feature (22)..(156): Homolog of NCBI NO: 9758260 NR Description: glucose-6-phosphate/phosphate translocator
  misc_feature (22)..(156): Homolog of NCBI NO: 18423670 NR Description: glucose-6-phosphate/phosphate translocator; id: At5g54800.1, supported by cDNA: 26107., supported by cDNA: supported by cDNA: gi_7229674 [Arabidopsis thaliana]
  misc_feature (1)..(12): Homolog of NCBI NO: 9758260 NR Description: glucose-6-phosphate/phosphate translocator
  misc_feature (1)..(12): Homolog of NCBI NO: 18423670 NR Description: glucose-6-phosphate/phosphate translocator; id: At5g54800.1, supported by cDNA: 26107., supported by cDNA: supported by cDNA: gi_7229674 [Arabidopsis thaliana]
  misc_feature (22)..(156): Homolog of NCBI NO: 7488807 NR Description: glucose-6-phosphate/phosphate-translocator
  misc_feature (22)..(156): Homolog of NCBI NO: 38637068 NR Description: glucose-6-phosphate/phosphate translocator [Oryza
  misc_feature (22)..(162): Homolog of NCBI NO: 7489258 NR Description: probable
  misc_feature (22)..(162): Homolog of NCBI NO: 27752361 NR Description: glucose-6-phosphate/phosphate translocator 2
  misc_feature (22)..(156): Homolog of NCBI NO: 21554690 NR Description: glucose-6-phosphate/phosphate translocator
  misc_feature (1)..(187): Homolog of NCBI NO: 15233337 NR Description: putative
MMLVSWVALAHTIGHVEAIVRCALAAVMELNFNMIGFMGAMISNLAFVFRNIFSKKGMKGKSVSVMNYYACLSMMSLLIVTPFANSVEGPQMWADGWQNDVSKSDQTLSSKWVVAHSVFYHLYNQVSYIPRCLNHHLPNPLKHVNALGAAIAILGTFIYSQIKNRVKKNHILLVLCLGMLEPLVITL

SEQ ID NO: 69390 - protein, 186 aa, Arabidopsis thaliana
  peptide (1)..(186): Ceres Seq. ID no. 1809986
  misc_feature: Pfam Name: TPT Pfam Description: Triose-phosphate Transporter family
  misc_feature (1)..(186): Homolog of NCBI NO: 15233337 NR Description: putative
  misc_feature (21)..(155): Homolog of NCBI NO: 9758260 NR Description: glucose-6-phosphate/phosphate translocator
  misc_feature (21)..(155): Homolog of NCBI NO: 18423670 NR Description: glucose-6-phosphate/phosphate translocator; id: At5g54800.1, supported by cDNA: 26107., supported by cDNA: supported by cDNA: gi_7229674 [Arabidopsis thaliana]
  misc_feature (1)..(11): Homolog of NCBI NO: 9758260 NR Description: glucose-6-phosphate/phosphate translocator
  misc_feature (1)..(11): Homolog of NCBI NO: 18423670 NR Description: glucose-6-phosphate/phosphate translocator; id: At5g54800.1, supported by cDNA: 26107., supported by cDNA: supported by cDNA: gi_7229674 [Arabidopsis thaliana]
  misc_feature (21)..(155): Homolog of NCBI NO: 7488807 NR Description: glucose-6-phosphate/phosphate-translocator
  misc_feature (21)..(155): Homolog of NCBI NO: 38637068 NR Description: glucose-6-phosphate/phosphate translocator [Oryza
  misc_feature (21)..(161): Homolog of NCBI NO: 7489258 NR Description: probable
  misc_feature (21)..(161): Homolog of NCBI NO: 27752361 NR Description: glucose-6-phosphate/phosphate translocator 2
  misc_feature (21)..(155): Homolog of NCBI NO: 21554690 NR Description: glucose-6-phosphate/phosphate translocator
MLVSWVALAHTIGHVEAIVRCALAAVMELNFNMIGFMGAMISNLAFVFRNIFSKKGMKGKSVSVMNYYACLSMMSLLIVTPFANSVEGPQMWADGWQNDVSKSDQTLSSKWVVAHSVFYHLYNQVSYIPRCLNHHLPNPLKHVNALGAAIAILGTFIYSQIKNRVKKNHILLVLCLGMLEPLVITL

SEQ ID NO: 69391 - DNA, 471 bp, Arabidopsis thaliana
  misc_feature (1)..(471): Ceres Seq. ID no. 1810029
  misc_feature: MA Experiment ID: 20000173 Result: Down-regulated in Transcription
  misc_feature: MA Experiment 20000173 PARAMETER Experiment Name: At_42deg_Heat_P Parameter: Age (day) Value: 14
  misc_feature: MA Experiment 20000173 PARAMETER Experiment Name: At_42deg_Heat_P Parameter: Organism Value: A. thaliana
  misc_feature: MA Experiment 20000173 PARAMETER Experiment Name: At_42deg_Heat_P Parameter: Plant Line Value: WS
  misc_feature: MA Experiment 20000173 PARAMETER Experiment Name: At_42deg_Heat_P Parameter: Temperature (deg C) Value: 42 vs. 22
  misc_feature: MA Experiment 20000173 PARAMETER Experiment Name: At_42deg_Heat_P Parameter: Timepoint (hr) Value: 6
  misc_feature: MA Experiment 20000173 PARAMETER Experiment Name: At_42deg_Heat_P Parameter: Tissue Value: Aerial
  misc_feature: MA Experiment ID: 20000180 Result: Down-regulated in Transcription
  misc_feature: MA Experiment 20000180 PARAMETER Experiment Name: At_Germinating_Seeds_P Parameter: Age (hr) Value: 24 vs. 0
  misc_feature: MA Experiment 20000180 PARAMETER Experiment Name: At_Germinating_Seeds_P Parameter: Tissue Value: Germinating Seeds
  misc_feature: MA Experiment ID: 20000184 Result: Down-regulated in Transcription
  misc_feature: MA Experiment 20000184 PARAMETER Experiment Name: At_Shoots__P Parameter: Age (day) Value: 7
  misc_feature: MA Experiment 20000184 PARAMETER Experiment Name: At_Shoots__P Parameter: Tissue Value: Shoots vs. Whole Plant
  misc_feature: MA Experiment ID: 20000234 Result: Up-regulated in Transcription
  misc_feature: MA Experiment 20000234 PARAMETER Experiment Name: At_Siliques_P Parameter: Age (day) Value: 21
  misc_feature: MA Experiment 20000234 PARAMETER Experiment Name: At_Siliques_P Parameter: Organism Value: A. thaliana
  misc_feature: MA Experiment 20000234 PARAMETER Experiment Name: At_Siliques_P Parameter: Plant Line Value: WS
  misc_feature: MA Experiment 20000234 PARAMETER Experiment Name: At_Siliques_P Parameter: Tissue Value: Less Than 5mm Siliques vs. Whole Plant
  misc_feature: MA Experiment ID: 20001247 Result: Down-regulated in Transcription
  misc_feature: MA Experiment 20001247 PARAMETER Experiment Name: At_Far-red-induction_P Parameter: Age (day) Value: 7
  misc_feature: MA Experiment 20001247 PARAMETER Experiment Name: At_Far-red-induction_P Parameter: Light Value: Far-red vs. White
  misc_feature: MA Experiment 20001247 PARAMETER Experiment Name: At_Far-red-induction_P Parameter: Organism Value: A. thaliana
  misc_feature: MA Experiment 20001247 PARAMETER Experiment Name: At_Far-red-induction_P Parameter: Plant Line Value: Columbia
  misc_feature: MA Experiment 20001247 PARAMETER Experiment Name: At_Far-red-induction_P Parameter: Timepoint (hr) Value: 1
  misc_feature: MA Experiment 20001247 PARAMETER Experiment Name: At_Far-red-induction_P Parameter: Tissue Value: Whole Plant
  misc_feature: MA Experiment ID: 20001560 Result: Up-regulated in Transcription
  misc_feature: MA Experiment 20001560 PARAMETER Experiment Name: At_Drought_Soil_Dry_P Parameter: Age (day) Value: 28
  misc_feature: MA Experiment 20001560 PARAMETER Experiment Name: At_Drought_Soil_Dry_P Parameter: Organism Value: A. thaliana
  misc_feature: MA Experiment 20001560 PARAMETER Experiment Name: At_Drought_Soil_Dry_P Parameter: Plant Line Value: WS
  misc_feature: MA Experiment 20001560 PARAMETER Experiment Name: At_Drought_Soil_Dry_P Parameter: Post Timepoint (hr) Value: None
  misc_feature: MA Experiment 20001560 PARAMETER Experiment Name: At_Drought_Soil_Dry_P Parameter: Post-Treatment Value: None
  misc_feature: MA Experiment 20001560 PARAMETER Experiment Name: At_Drought_Soil_Dry_P Parameter: Timepoint (day) Value: 14
  misc_feature: MA Experiment 20001560 PARAMETER Experiment Name: At_Drought_Soil_Dry_P Parameter: Treatment Value: Drought vs. No Drought
atggaggagactatactggtcggtgatgacctaatgacgggtcctccatctcctgttatccctcctgaaattgcttcacatgtgcttgaaggtgttgatttgtgcgatgggattttgaggaatctattcctgtgtatgtctatgtatcctcggtttggtttgcaaatcaatgatattgaaccattttgccaagatgagcttgcattgtatcgacaatgtgctgaaaagagggacaaaatattgagagttagacttcaagagagcgaacacaagttaggattgtctatgcccattgaactcgctaaggaaaggattacgcagcttgaagctgaagccacatcttttgagagaaaaagactggagtcactgaagcagggaatggagaacaggaacaaggttgaacatgaacataaccaacaccatgatcagtccccaaaaccttctgctccaaaaagatggttcttttggtga

SEQ ID NO: 69392 - protein, 156 aa, Arabidopsis thaliana
  peptide (1)..(156): Ceres Seq. ID no. 1810030
  misc_feature (1)..(156): Homolog of NCBI NO: 15233419 NR Description: hypothetical protein; protein id: At4g04190.1
  misc_feature (1)..(142): Homolog of NCBI NO: 21741739 NR Description: OSJNBa0073L04.19 [Oryza sativa (japonica
MEETILVGDDLMTGPPSPVIPPEIASHVLEGVDLCDGILRNLFLCMSMYPRFGLQINDIEPFCQDELALYRQCAEKRDKILRVRLQESEHKLGLSMPIELAKERITQLEAEATSFERKRLESLKQGMENRNKVEHEHNQHHDQSPKPSAPKRWFFW

SEQ ID NO: 69393 - protein, 145 aa, Arabidopsis thaliana
  peptide (1)..(145): Ceres Seq. ID no. 1810031
  misc_feature (1)..(145): Homolog of NCBI NO: 15233419 NR Description: hypothetical protein; protein id: At4g04190.1
  misc_feature (1)..(131): Homolog of NCBI NO: 21741739 NR Description: OSJNBa0073L04.19 [Oryza sativa (japonica
MTGPPSPVIPPEIASHVLEGVDLCDGILRNLFLCMSMYPRFGLQINDIEPFCQDELALYRQCAEKRDKILRVRLQESEHKLGLSMPIELAKERITQLEAEATSFERKRLESLKQGMENRNKVEHEHNQHHDQSPKPSAPKRWFFW

SEQ ID NO: 69394 - protein, 111 aa, Arabidopsis thaliana
  peptide (1)..(111): Ceres Seq. ID no. 1810032
  misc_feature (1)..(111): Homolog of NCBI NO: 15233419 NR Description: hypothetical protein; protein id: At4g04190.1
  misc_feature (1)..(97): Homolog of NCBI NO: 21741739 NR Description: OSJNBa0073L04.19 [Oryza sativa (japonica
MSMYPRFGLQINDIEPFCQDELALYRQCAEKRDKILRVRLQESEHKLGLSMPIELAKERITQLEAEATSFERKRLESLKQGMENRNKVEHEHNQHHDQSPKPSAPKRWFFW

SEQ ID NO: 69395 - DNA, 1119 bp, Arabidopsis thaliana
  misc_feature (1)..(1119): Ceres Seq. ID no. 1810688
  misc_feature: MA Experiment ID: 20000347 Result: Up-regulated in Transcription
  misc_feature: MA Experiment 20000347 PARAMETER Experiment Name: At_2mM_SA_Sub_P Parameter: Age (day) Value: 14
  misc_feature: MA Experiment 20000347 PARAMETER Experiment Name: At_2mM_SA_Sub_P Parameter: Organism Value: A. thaliana
  misc_feature: MA Experiment 20000347 PARAMETER Experiment Name: At_2mM_SA_Sub_P Parameter: Plant Line Value: WS
  misc_feature: MA Experiment 20000347 PARAMETER Experiment Name: At_2mM_SA_Sub_P Parameter: Timepoint (hr) Value: 6
  misc_feature: MA Experiment 20000347 PARAMETER Experiment Name: At_2mM_SA_Sub_P Parameter: Tissue Value: Aerial
  misc_feature: MA Experiment 20000347 PARAMETER Experiment Name: At_2mM_SA_Sub_P Parameter: Treatment Value: 2mM SA vs. No Treatment
  misc_feature: Pfam Name: Pkinase Pfam Description: Protein kinase domain
atgaaggtggattttttagtcataaaggttgaaaaactatcttctttgagagttttttatttttttttatttttttttgagagcaaatatgtcgaagatcagaagattaaagatgcaaaattattgcaacttgactttgataccataagattagcaactaatgacttctctccttacaaccatcttggtgaaggtggtttcggtgcagtttataagggcgtccttgattccggggaagagatagctgtgaaaagattgtcaatgaaatcaggacaaggagacaatgagttcgtaaacgaagtctcattggttgcgaaacttcaacatcgtaatcttgttaggcttttaggtttctgttttaaaggagaagaacgacttctcatctatgagttctttaagaacacaagcctcgaaaaaagaatgatcttagattgggaaaaacgttataggataatctcaggtgttgctcgaggtcttctctatctccatgaagattctcatttcaaaattattcatagagatatgaaagctagcaatgttctattggacgatgcaatgaatccgaaaatcgcagattttgggatggtaaaattgtttaatactgaccaaacaagtcagaccatgtttacaagcaaagttgcaggaacttacggttacatggctcctgagtatgcaatgagtgggcaattctcggtgaaaaccgacgtatttagtttcggtgtactagtccttgagatcattaaaggtaagaaaaacaattggtctccggaagaacaaagctcattattcctccttagctatgtgtggaaatgctggagagaaggagaagtgttgaacattgtggatccaagtttgattgaaacaagaggtctaagtgatgagatcaggaaatgcattcacattggtttgttgtgtgttcaggagaatccagggagtagaccaacaatggcttctattgttagaatgctcaatgcaaattctttcactttaccgagacccttgcaacccgctttttactcaggagttgtagactcatcgtcaagagacaacaatcatacaagaaacccgcgtattgcgtctttgaatgatgttacaattacggagttagatcctcgttga

SEQ ID NO: 69396 - protein, 372 aa, Arabidopsis thaliana
  peptide (1)..(372): Ceres Seq. ID no. 1810689
  misc_feature: Pfam Name: Pkinase Pfam Description: Protein kinase domain
  misc_feature (1)..(372): Homolog of NCBI NO: 18411492 NR Description: Similar to receptor kinase; protein id: [Arabidopsis thaliana] >gi|7488290|pir||T01551 receptor kinase
  misc_feature (2)..(372): Homolog of NCBI NO: 30678781 NR Description: Similar to receptor kinase [Arabidopsis thaliana]
  misc_feature (29)..(372): Homolog of NCBI NO: 7488289 NR Description: receptor kinase homolog A_TM018A10.18 - thaliana >gi|2252862|gb|AAB62860.1| Similar to receptor kinase thaliana] >gi|7267594|emb|CAB80906.1| Similar to receptor
  misc_feature (126)..(372): Homolog of NCBI NO: 15234434 NR Description: serine threonine protein kinase - like protein; id: At4g21400.1 [Arabidopsis thaliana] >gi|7488245|pir||T05148
  misc_feature (34)..(138): Homolog of NCBI NO: 15234434 NR Description: serine threonine protein kinase - like protein; id: At4g21400.1 [Arabidopsis thaliana] >gi|7488245|pir||T05148
  misc_feature (31)..(372): Homolog of NCBI NO: 22328852 NR Description: serine threonine kinase - like protein; protein At4g21410.1, supported by cDNA: gi_18650593 [Arabidopsis >gi|18650594|gb|AAL75897.1| AT4g21410/T6K22_140 [Arabidopsis
  misc_feature (18)..(372): Homolog of NCBI NO: 7488246 NR Description: protein kinase homolog F18E5.30 - Arabidopsis >gi|3080385|emb|CAA18705.1| serine/threonine protein kinase
  misc_feature (18)..(372): Homolog of NCBI NO: 7488195 NR Description: probable serine/threonine-specific protein kinase
  misc_feature (24)..(372): Homolog of NCBI NO: 24417476 NR Description: unknown [Arabidopsis thaliana]
  misc_feature (24)..(372): Homolog of NCBI NO: 30686087 NR Description: serine/threonine kinase -related protein
MKVDFLVIKVEKLSSLRVFYFFLFFFESKYVEDQKIKDAKLLQLDFDTIRLATNDFSPYNHLGEGGFGAVYKGVLDSGEEIAVKRLSMKSGQGDNEFVNEVSLVAKLQHRNLVRLLGFCFKGEERLLIYEFFKNTSLEKRMILDWEKRYRIISGVARGLLYLHEDSHFKIIHRDMKASNVLLDDAMNPKIADFGMVKLFNTDQTSQTMFTSKVAGTYGYMAPEYAMSGQFSVKTDVFSFGVLVLEIIKGKKNNWSPEEQSSLFLLSYVWKCWREGEVLNIVDPSLIETRGLSDEIRKCIHIGLLCVQENPGSRPTMASIVRMLNANSFTLPRPLQPAFYSGVVDSSSRDNNHTRNPRIASLNDVTITELDPR

SEQ ID NO: 69397 - protein, 285 aa, Arabidopsis thaliana
  peptide (1)..(285): Ceres Seq. ID no. 1810690
  misc_feature: Pfam Name: Pkinase Pfam Description: Protein kinase domain
  misc_feature (1)..(285): Homolog of NCBI NO: 18411492 NR Description: Similar to receptor kinase; protein id: [Arabidopsis thaliana] >gi|7488290|pir||T01551 receptor kinase
  misc_feature (1)..(285): Homolog of NCBI NO: 30678781 NR Description: Similar to receptor kinase [Arabidopsis thaliana]
  misc_feature (1)..(285): Homolog of NCBI NO: 7488289 NR Description: receptor kinase homolog A_TM018A10.18 - thaliana >gi|2252862|gb|AAB62860.1| Similar to receptor kinase thaliana] >gi|7267594|emb|CAB80906.1| Similar to receptor
  misc_feature (39)..(285): Homolog of NCBI NO: 15234434 NR Description: serine threonine protein kinase - like protein; id: At4g21400.1 [Arabidopsis thaliana] >gi|7488245|pir||T05148
  misc_feature (1)..(51): Homolog of NCBI NO: 15234434 NR Description: serine threonine protein kinase - like protein; id: At4g21400.1 [Arabidopsis thaliana] >gi|7488245|pir||T05148
  misc_feature (1)..(285): Homolog of NCBI NO: 22328852 NR Description: serine threonine kinase - like protein; protein At4g21410.1, supported by cDNA: gi_18650593 [Arabidopsis >gi|18650594|gb|AAL75897.1| AT4g21410/T6K22_140 [Arabidopsis
  misc_feature (1)..(285): Homolog of NCBI NO: 7488246 NR Description: protein kinase homolog F18E5.30 - Arabidopsis >gi|3080385|emb|CAA18705.1| serine/threonine protein kinase
  misc_feature (1)..(285): Homolog of NCBI NO: 7488195 NR Description: probable serine/threonine-specific protein kinase
  misc_feature (1)..(285): Homolog of NCBI NO: 24417476 NR Description: unknown [Arabidopsis thaliana]
  misc_feature (1)..(285): Homolog of NCBI NO: 30686087 NR Description: serine/threonine kinase -related protein
MKSGQGDNEFVNEVSLVAKLQHRNLVRLLGFCFKGEERLLIYEFFKNTSLEKRMILDWEKRYRIISGVARGLLYLHEDSHFKIIHRDMKASNVLLDDAMNPKIADFGMVKLFNTDQTSQTMFTSKVAGTYGYMAPEYAMSGQFSVKTDVFSFGVLVLEIIKGKKNNWSPEEQSSLFLLSYVWKCWREGEVLNIVDPSLIETRGLSDEIRKCIHIGLLCVQENPGSRPTMASIVRMLNANSFTLPRPLQPAFYSGVVDSSSRDNNHTRNPRIASLNDVTITELDPR

SEQ ID NO: 69398 - protein, 232 aa, Arabidopsis thaliana
  peptide (1)..(232): Ceres Seq. ID no. 1810691
  misc_feature: Pfam Name: Pkinase Pfam Description: Protein kinase domain
  misc_feature (1)..(232): Homolog of NCBI NO: 18411492 NR Description: Similar to receptor kinase; protein id: [Arabidopsis thaliana] >gi|7488290|pir||T01551 receptor kinase
  misc_feature (1)..(232): Homolog of NCBI NO: 30678781 NR Description: Similar to receptor kinase [Arabidopsis thaliana]
  misc_feature (1)..(232): Homolog of NCBI NO: 7488289 NR Description: receptor kinase homolog A_TM018A10.18 - thaliana >gi|2252862|gb|AAB62860.1| Similar to receptor kinase thaliana] >gi|7267594|emb|CAB80906.1| Similar to receptor
  misc_feature (1)..(232): Homolog of NCBI NO: 15234434 NR Description: serine threonine protein kinase - like protein; id: At4g21400.1 [Arabidopsis thaliana] >gi|7488245|pir||T05148
  misc_feature (1)..(232): Homolog of NCBI NO: 22328852 NR Description: serine threonine kinase - like protein; protein At4g21410.1, supported by cDNA: gi_18650593 [Arabidopsis >gi|18650594|gb|AAL75897.1| AT4g21410/T6K22_140 [Arabidopsis
  misc_feature (1)..(232): Homolog of NCBI NO: 7488246 NR Description: protein kinase homolog F18E5.30 - Arabidopsis >gi|3080385|emb|CAA18705.1| serine/threonine protein kinase
  misc_feature (1)..(232): Homolog of NCBI NO: 7488195 NR Description: probable serine/threonine-specific protein kinase
  misc_feature (1)..(232): Homolog of NCBI NO: 24417476 NR Description: unknown [Arabidopsis thaliana]
  misc_feature (1)..(232): Homolog of NCBI NO: 30686087 NR Description: serine/threonine kinase -related protein
  misc_feature (1)..(232): Homolog of NCBI NO: 18076589 NR Description: putative receptor-like serine-threonine protein
MILDWEKRYRIISGVARGLLYLHEDSHFKIIHRDMKASNVLLDDAMNPKIADFGMVKLFNTDQTSQTMFTSKVAGTYGYMAPEYAMSGQFSVKTDVFSFGVLVLEIIKGKKNNWSPEEQSSLFLLSYVWKCWREGEVLNIVDPSLIETRGLSDEIRKCIHIGLLCVQENPGSRPTMASIVRMLNANSFTLPRPLQPAFYSGVVDSSSRDNNHTRNPRIASLNDVTITELDPR

SEQ ID NO: 69399 - DNA, 1167 bp, Arabidopsis thaliana
  misc_feature (1)..(1167): Ceres Seq. ID no. 1811011
  misc_feature: MA Experiment ID: 20000307 Result: Up-regulated in Transcription
  misc_feature: MA Experiment 20000307 PARAMETER Experiment Name: At_Germinating_Seeds_Sub_P Parameter: Age (hr) Value: 24 vs. 0
  misc_feature: MA Experiment 20000307 PARAMETER Experiment Name: At_Germinating_Seeds_Sub_P Parameter: Organism Value: A. thaliana
  misc_feature: MA Experiment 20000307 PARAMETER Experiment Name: At_Germinating_Seeds_Sub_P Parameter: Plant Line Value: WS
  misc_feature: MA Experiment 20000307 PARAMETER Experiment Name: At_Germinating_Seeds_Sub_P Parameter: Tissue Value: Germinating Seeds
  misc_feature: MA Experiment ID: 20000314 Result: Up-regulated in Transcription
  misc_feature: MA Experiment 20000314 PARAMETER Experiment Name: At_14day_Shoots-Roots_Sub_P Parameter: Age (day) Value: 14
  misc_feature: MA Experiment 20000314 PARAMETER Experiment Name: At_14day_Shoots-Roots_Sub_P Parameter: Organism Value: A. thaliana
  misc_feature: MA Experiment 20000314 PARAMETER Experiment Name: At_14day_Shoots-Roots_Sub_P Parameter: Plant Line Value: WS
  misc_feature: MA Experiment 20000314 PARAMETER Experiment Name: At_14day_Shoots-Roots_Sub_P Parameter: Tissue Value: Roots vs. Whole Plant
  misc_feature: MA Experiment ID: 20000328 Result: Up-regulated in Transcription
  misc_feature: MA Experiment 20000328 PARAMETER Experiment Name: At_42deg_Heat_Sub_P Parameter: Age (day) Value: 14
  misc_feature: MA Experiment 20000328 PARAMETER Experiment Name: At_42deg_Heat_Sub_P Parameter: Organism Value: A. thaliana
  misc_feature: MA Experiment 20000328 PARAMETER Experiment Name: At_42deg_Heat_Sub_P Parameter: Plant Line Value: WS
  misc_feature: MA Experiment 20000328 PARAMETER Experiment Name: At_42deg_Heat_Sub_P Parameter: Temperature (deg C) Value: 42 vs. 22
  misc_feature: MA Experiment 20000328 PARAMETER Experiment Name: At_42deg_Heat_Sub_P Parameter: Timepoint (hr) Value: 6
  misc_feature: MA Experiment 20000328 PARAMETER Experiment Name: At_42deg_Heat_Sub_P Parameter: Tissue Value: Aerial
  misc_feature: MA Experiment ID: 20000355 Result: Down-regulated in Transcription
  misc_feature: MA Experiment 20000355 PARAMETER Experiment Name: At_Siliques_Sub_P Parameter: Age (day) Value: 21
  misc_feature: MA Experiment 20000355 PARAMETER Experiment Name: At_Siliques_Sub_P Parameter: Organism Value: A. thaliana
  misc_feature: MA Experiment 20000355 PARAMETER Experiment Name: At_Siliques_Sub_P Parameter: Plant Line Value: WS
  misc_feature: MA Experiment 20000355 PARAMETER Experiment Name: At_Siliques_Sub_P Parameter: Tissue Value: Less Than 5mm Siliques vs. Whole Plant
  misc_feature: MA Experiment ID: 20000440 Result: Down-regulated in Transcription
  misc_feature: MA Experiment 20000440 PARAMETER Experiment Name: At_Closed-Flower__Sub_P Parameter: Tissue Value: Closed Flower vs. Whole Plant
atggcaaagagagcgttgttgataggaatcaactatccaggaaccacggaggagctacaaggctgcgtcaatgacgtccatagaatgcataagtgtctcgttgaccggttcggattcgcggaggaagatatcactgtgctgattgacaccgacgaatcttacactcaacccacaggaaagaacatccgtcaggctttgtcggagctcataaagccagcaaaatccggtgacgttttattcgtgcattacagcggacacggcacgagagtcccaccggaaacaggggaagaggatgatacagatgatgatttcagggatttagtggaacaagttccagagggatgtcagataactatcgtatcagactcttgtcacagcggcgggctcattgatgaagctaaggaacagatcggagagagtaccacgacgaagccaaatcgagaatccaaagtttcttcttttgaattcgagtttaaaaactgtttgcatagcatttttgtgaaactgcttgctttttgtggaatcggaagttctcatgtagagacgcgcgagatcgtagaagtaggcgagggagatgaagttgtcagatcaaggtatctgccgttggagaggtttattgaacttctcaaacaacaaactgggcaagacaatatcgagattgggaaaatcagacccaccctttttgatgtctttggtgaagattcgagcccgaagataaagaagttcatgaaagtgattcttaccaagctaaggaaaacaaatgaccaaagtacgctacttggtaagatcgaagaaagtgctcgagggtatatagaagagacgctgaacgatgaacactacatgaaacccgcaatgcaggcacaagtgaagagcgatcgtgagatttatggaggaagatcaagcaacggattgtttcctgaccgagggattctgttgagtggatgtcaaacagatgagacatcagcagatgttaagaagaaaggagaagcgtttggagcgtttagtaatgccatccaaatggttttgtcagagactgatcataaagataagattacaaacaaggaaatggtattgagggcaagagagattctgaagaaacagatgtttattcagagaccaggattgtattgcaatgaccgctttgtgaatgctccgtttatatgctaa

SEQ ID NO: 69400 - protein, 388 aa, Arabidopsis thaliana
  peptide (1)..(388): Ceres Seq. ID no. 1811012
  misc_feature (3)..(388): Pfam Name: Caspase domain Pfam Description: Caspase domain
  misc_feature (1)..(388): Homolog of NCBI NO: 15219338 NR Description: hypothetical protein common family; protein id:
  misc_feature (1)..(388): Homolog of NCBI NO: 37788557 NR Description: metacaspase 7 [Arabidopsis thaliana]
  misc_feature (1)..(388): Homolog of NCBI NO: 32482818 NR Description: metacaspase 4 [Arabidopsis thaliana]
  misc_feature (191)..(388): Homolog of NCBI NO: 29367583 NR Description: latex-abundant protein-like protein [Oryza sativa
  misc_feature (3)..(155): Homolog of NCBI NO: 29367583 NR Description: latex-abundant protein-like protein [Oryza sativa
  misc_feature (100)..(388): Homolog of NCBI NO: 15219345 NR Description: hypothetical protein common family; protein id: supported by cDNA: gi_19347868 [Arabidopsis thaliana]
  misc_feature (100)..(388): Homolog of NCBI NO: 33304380 NR Description: metacaspase 7 [Arabidopsis thaliana]
  misc_feature (100)..(388): Homolog of NCBI NO: 15219342 NR Description: hypothetical protein common family; protein id:
  misc_feature (100)..(388): Homolog of NCBI NO: 23343885 NR Description: metacaspase 1 [Lycopersicon esculentum]
  misc_feature (1)..(304): Homolog of NCBI NO: 15219340 NR Description: hypothetical protein common family; protein id:
MAKRALLIGINYPGTTEELQGCVNDVHRMHKCLVDRFGFAEEDITVLIDTDESYTQPTGKNIRQALSELIKPAKSGDVLFVHYSGHGTRVPPETGEEDDTDDDFRDLVEQVPEGCQITIVSDSCHSGGLIDEAKEQIGESTTTKPNRESKVSSFEFEFKNCLHSIFVKLLAFCGIGSSHVETREIVEVGEGDEVVRSRYLPLERFIELLKQQTGQDNIEIGKIRPTLFDVFGEDSSPKIKKFMKVILTKLRKTNDQSTLLGKIEESARGYIEETLNDEHYMKPAMQAQVKSDREIYGGRSSNGLFPDRGILLSGCQTDETSADVKKKGEAFGAFSNAIQMVLSETDHKDKITNKEMVLRAREILKKQMFIQRPGLYCNDRFVNAPFIC

SEQ ID NO: 69401 - protein, 360 aa, Arabidopsis thaliana
  peptide (1)..(360): Ceres Seq. ID no. 1811013
  misc_feature (1)..(360): Pfam Name: Caspase domain Pfam Description: Caspase domain
  misc_feature (1)..(360): Homolog of NCBI NO: 15219338 NR Description: hypothetical protein common family; protein id:
  misc_feature (1)..(360): Homolog of NCBI NO: 37788557 NR Description: metacaspase 7 [Arabidopsis thaliana]
  misc_feature (1)..(360): Homolog of NCBI NO: 32482818 NR Description: metacaspase 4 [Arabidopsis thaliana]
  misc_feature (163)..(360): Homolog of NCBI NO: 29367583 NR Description: latex-abundant protein-like protein [Oryza sativa
  misc_feature (1)..(127): Homolog of NCBI NO: 29367583 NR Description: latex-abundant protein-like protein [Oryza sativa
  misc_feature (72)..(360): Homolog of NCBI NO: 15219345 NR Description: hypothetical protein common family; protein id: supported by cDNA: gi_19347868 [Arabidopsis thaliana]
  misc_feature (72)..(360): Homolog of NCBI NO: 33304380 NR Description: metacaspase 7 [Arabidopsis thaliana]
  misc_feature (72)..(360): Homolog of NCBI NO: 15219342 NR Description: hypothetical protein common family; protein id:
  misc_feature (72)..(360): Homolog of NCBI NO: 23343885 NR Description: metacaspase 1 [Lycopersicon esculentum]
  misc_feature (1)..(276): Homolog of NCBI NO: 15219340 NR Description: hypothetical protein common family; protein id:
MHKCLVDRFGFAEEDITVLIDTDESYTQPTGKNIRQALSELIKPAKSGDVLFVHYSGHGTRVPPETGEEDDTDDDFRDLVEQVPEGCQITIVSDSCHSGGLIDEAKEQIGESTTTKPNRESKVSSFEFEFKNCLHSIFVKLLAFCGIGSSHVETREIVEVGEGDEVVRSRYLPLERFIELLKQQTGQDNIEIGKIRPTLFDVFGEDSSPKIKKFMKVILTKLRKTNDQSTLLGKIEESARGYIEETLNDEHYMKPAMQAQVKSDREIYGGRSSNGLFPDRGILLSGCQTDETSADVKKKGEAFGAFSNAIQMVLSETDHKDKITNKEMVLRAREILKKQMFIQRPGLYCNDRFVNAPFIC

SEQ ID NO: 69402 - DNA, 1107 bp, Arabidopsis thaliana
  misc_feature (1)..(1107): Ceres Seq. ID no. 1811014
  misc_feature: MA Experiment ID: 20000314 Result: Up-regulated in Transcription
  misc_feature: MA Experiment 20000314 PARAMETER Experiment Name: At_14day_Shoots-Roots_Sub_P Parameter: Age (day) Value: 14
  misc_feature: MA Experiment 20000314 PARAMETER Experiment Name: At_14day_Shoots-Roots_Sub_P Parameter: Organism Value: A. thaliana
  misc_feature: MA Experiment 20000314 PARAMETER Experiment Name: At_14day_Shoots-Roots_Sub_P Parameter: Plant Line Value: WS
  misc_feature: MA Experiment 20000314 PARAMETER Experiment Name: At_14day_Shoots-Roots_Sub_P Parameter: Tissue Value: Roots vs. Whole Plant
atggccaagaaagctttactgattgggatcaactacgtgggaaccaaggcagagctacgaggctgcgtcaacgatgtccgtcggatgcggataagcctcgtcgaacggtacggattctccgaggagaacatcaaaatgttgattgatactgatagttcttcgatcaaaccgaccggtaagaacatcagacaggcgttgttagatctcgttgaaccggctaaatcgggtgatgttctcttcgtccattacagtggacatgggactaggttacccgcggaaactggagaagatgatgatactggttacgatgagtgtattgttccttccgatatgaatctcatcaccgatgatgatttcagggatcttgtggatatggtgccaaaggattgtcccatcacaatcatatctgactcttgtcacagtggcggtctcatagatgaagccaaagagcagataggagagagcacgaagaagaagaaagactctggagactcttcaacgatcaacaaggagacagaagcagagataattgaagtgggaaacagatctctgccattggagactttgattgatatgctgaagcaagaaacaggcaacgatgatatcgaagtggggaaaatcaggacaacccttttcgatatgtttggagatgattcaagtccaaaggtgaagaagtttatgaatgtgattctaagcaacctacaagagactactactactattcaaactgtttcagatgaggtattgggatcagttgagaacctagctcaagagtttctggagcagaagcttagcgacgatgtgaaacccgcgatccaagatgtgtatgcaggtgctataaatggtgcacttcctgataatggtatactgatcagtggttgccaaactgatcaaacttcttcagacgcaagcccaccgggtcacccggaattggcttatggagcactaaccaatgctatacagattataattggggagactaaaggtaagattagtaacaaagatcttgttttgaaggctaggaagcttcttaggaaacagggctttgatcaacgaccgggactgtattgcaatgatgcttatgtcaatgctcggtttatatgttga

SEQ ID NO: 69403 - protein, 368 aa, Arabidopsis thaliana
  peptide (1)..(368): Ceres Seq. ID no. 1811015
  misc_feature (3)..(368): Pfam Name: Caspase domain Pfam Description: Caspase domain
  misc_feature (1)..(368): Homolog of NCBI NO: 15219340 NR Description: hypothetical protein common family; protein id:
  misc_feature (145)..(368): Homolog of NCBI NO: 15219342 NR Description: hypothetical protein common family; protein id:
  misc_feature (1)..(178): Homolog of NCBI NO: 15219342 NR Description: hypothetical protein common family; protein id:
  misc_feature (143)..(368): Homolog of NCBI NO: 15219345 NR Description: hypothetical protein common family; protein id: supported by cDNA: gi_19347868 [Arabidopsis thaliana]
  misc_feature (1)..(166): Homolog of NCBI NO: 15219345 NR Description: hypothetical protein common family; protein id: supported by cDNA: gi_19347868 [Arabidopsis thaliana]
  misc_feature (143)..(368): Homolog of NCBI NO: 33304380 NR Description: metacaspase 7 [Arabidopsis thaliana]
  misc_feature (1)..(166): Homolog of NCBI NO: 33304380 NR Description: metacaspase 7 [Arabidopsis thaliana]
  misc_feature (135)..(368): Homolog of NCBI NO: 23343885 NR Description: metacaspase 1 [Lycopersicon esculentum]
  misc_feature (8)..(166): Homolog of NCBI NO: 23343885 NR Description: metacaspase 1 [Lycopersicon esculentum]
  misc_feature (171)..(368): Homolog of NCBI NO: 32482818 NR Description: metacaspase 4 [Arabidopsis thaliana]
MAKKALLIGINYVGTKAELRGCVNDVRRMRISLVERYGFSEENIKMLIDTDSSSIKPTGKNIRQALLDLVEPAKSGDVLFVHYSGHGTRLPAETGEDDDTGYDECIVPSDMNLITDDDFRDLVDMVPKDCPITIISDSCHSGGLIDEAKEQIGESTKKKKDSGDSSTINKETEAEIIEVGNRSLPLETLIDMLKQETGNDDIEVGKIRTTLFDMFGDDSSPKVKKFMNVILSNLQETTTTIQTVSDEVLGSVENLAQEFLEQKLSDDVKPAIQDVYAGAINGALPDNGILISGCQTDQTSSDASPPGHPELAYGALTNAIQIIIGETKGKISNKDLVLKARKLLRKQGFDQRPGLYCNDAYVNARFIC

SEQ ID NO: 69404 - protein, 340 aa, Arabidopsis thaliana
  peptide (1)..(340): Ceres Seq. ID no. 1811016
  misc_feature (1)..(340): Pfam Name: Caspase domain Pfam Description: Caspase domain
  misc_feature (1)..(340): Homolog of NCBI NO: 15219340 NR Description: hypothetical protein common family; protein id:
  misc_feature (117)..(340): Homolog of NCBI NO: 15219342 NR Description: hypothetical protein common family; protein id:
  misc_feature (1)..(150): Homolog of NCBI NO: 15219342 NR Description: hypothetical protein common family; protein id:
  misc_feature (115)..(340): Homolog of NCBI NO: 15219345 NR Description: hypothetical protein common family; protein id: supported by cDNA: gi_19347868 [Arabidopsis thaliana]
  misc_feature (1)..(138): Homolog of NCBI NO: 15219345 NR Description: hypothetical protein common family; protein id: supported by cDNA: gi_19347868 [Arabidopsis thaliana]
  misc_feature (115)..(340): Homolog of NCBI NO: 33304380 NR Description: metacaspase 7 [Arabidopsis thaliana]
  misc_feature (1)..(138): Homolog of NCBI NO: 33304380 NR Description: metacaspase 7 [Arabidopsis thaliana]
  misc_feature (107)..(340): Homolog of NCBI NO: 23343885 NR Description: metacaspase 1 [Lycopersicon esculentum]
  misc_feature (1)..(138): Homolog of NCBI NO: 23343885 NR Description: metacaspase 1 [Lycopersicon esculentum]
  misc_feature (143)..(340): Homolog of NCBI NO: 32482818 NR Description: metacaspase 4 [Arabidopsis thaliana]
MRISLVERYGFSEENIKMLIDTDSSSIKPTGKNIRQALLDLVEPAKSGDVLFVHYSGHGTRLPAETGEDDDTGYDECIVPSDMNLITDDDFRDLVDMVPKDCPITIISDSCHSGGLIDEAKEQIGESTKKKKDSGDSSTINKETEAEIIEVGNRSLPLETLIDMLKQETGNDDIEVGKIRTTLFDMFGDDSSPKVKKFMNVILSNLQETTTTIQTVSDEVLGSVENLAQEFLEQKLSDDVKPAIQDVYAGAINGALPDNGILISGCQTDQTSSDASPPGHPELAYGALTNAIQIIIGETKGKISNKDLVLKARKLLRKQGFDQRPGLYCNDAYVNARFIC

SEQ ID NO: 69405 - protein, 323 aa, Arabidopsis thaliana
  peptide (1)..(323): Ceres Seq. ID no. 1811017
  misc_feature (1)..(323): Pfam Name: Caspase domain Pfam Description: Caspase domain
  misc_feature (1)..(323): Homolog of NCBI NO: 15219340 NR Description: hypothetical protein common family; protein id:
  misc_feature (100)..(323): Homolog of NCBI NO: 15219342 NR Description: hypothetical protein common family; protein id:
  misc_feature (1)..(133): Homolog of NCBI NO: 15219342 NR Description: hypothetical protein common family; protein id:
  misc_feature (98)..(323): Homolog of NCBI NO: 15219345 NR Description: hypothetical protein common family; protein id: supported by cDNA: gi_19347868 [Arabidopsis thaliana]
  misc_feature (1)..(121): Homolog of NCBI NO: 15219345 NR Description: hypothetical protein common family; protein id: supported by cDNA: gi_19347868 [Arabidopsis thaliana]
  misc_feature (98)..(323): Homolog of NCBI NO: 33304380 NR Description: metacaspase 7 [Arabidopsis thaliana]
  misc_feature (1)..(121): Homolog of NCBI NO: 33304380 NR Description: metacaspase 7 [Arabidopsis thaliana]
  misc_feature (90)..(323): Homolog of NCBI NO: 23343885 NR Description: metacaspase 1 [Lycopersicon esculentum]
  misc_feature (1)..(121): Homolog of NCBI NO: 23343885 NR Description: metacaspase 1 [Lycopersicon esculentum]
  misc_feature (126)..(323): Homolog of NCBI NO: 32482818 NR Description: metacaspase 4 [Arabidopsis thaliana]
MLIDTDSSSIKPTGKNIRQALLDLVEPAKSGDVLFVHYSGHGTRLPAETGEDDDTGYDECIVPSDMNLITDDDFRDLVDMVPKDCPITIISDSCHSGGLIDEAKEQIGESTKKKKDSGDSSTINKETEAEIIEVGNRSLPLETLIDMLKQETGNDDIEVGKIRTTLFDMFGDDSSPKVKKFMNVILSNLQETTTTIQTVSDEVLGSVENLAQEFLEQKLSDDVKPAIQDVYAGAINGALPDNGILISGCQTDQTSSDASPPGHPELAYGALTNAIQIIIGETKGKISNKDLVLKARKLLRKQGFDQRPGLYCNDAYVNARFIC

SEQ ID NO: 69406 - DNA, 1389 bp, Arabidopsis thaliana
  misc_feature (1)..(1389): Ceres Seq. ID no. 1814012
  misc_feature: MA Experiment ID: 20000180 Result: Up-regulated in Transcription
  misc_feature: MA Experiment 20000180 PARAMETER Experiment Name: At_Germinating_Seeds_P Parameter: Age (hr) Value: 24 vs. 0
  misc_feature: MA Experiment 20000180 PARAMETER Experiment Name: At_Germinating_Seeds_P Parameter: Tissue Value: Germinating Seeds
  misc_feature: MA Experiment ID: 20000437 Result: Down-regulated in Transcription
  misc_feature: MA Experiment 20000437 PARAMETER Experiment Name: At_Drought_P Parameter: Age (day) Value: 8
  misc_feature: MA Experiment 20000437 PARAMETER Experiment Name: At_Drought_P Parameter: Organism Value: A. thaliana
  misc_feature: MA Experiment 20000437 PARAMETER Experiment Name: At_Drought_P Parameter: Plant Line Value: WS
  misc_feature: MA Experiment 20000437 PARAMETER Experiment Name: At_Drought_P Parameter: Timepoint (hr) Value: 24
  misc_feature: MA Experiment 20000437 PARAMETER Experiment Name: At_Drought_P Parameter: Tissue Value: Whole Plant
  misc_feature: MA Experiment 20000437 PARAMETER Experiment Name: At_Drought_P Parameter: Treatment Value: Drought vs. No Drought
  misc_feature: MA Experiment ID: 20001560 Result: Up-regulated in Transcription
  misc_feature: MA Experiment 20001560 PARAMETER Experiment Name: At_Drought_Soil_Dry_P Parameter: Age (day) Value: 28
  misc_feature: MA Experiment 20001560 PARAMETER Experiment Name: At_Drought_Soil_Dry_P Parameter: Organism Value: A. thaliana
  misc_feature: MA Experiment 20001560 PARAMETER Experiment Name: At_Drought_Soil_Dry_P Parameter: Plant Line Value: WS
  misc_feature: MA Experiment 20001560 PARAMETER Experiment Name: At_Drought_Soil_Dry_P Parameter: Post Timepoint (hr) Value: None
  misc_feature: MA Experiment 20001560 PARAMETER Experiment Name: At_Drought_Soil_Dry_P Parameter: Post-Treatment Value: None
  misc_feature: MA Experiment 20001560 PARAMETER Experiment Name: At_Drought_Soil_Dry_P Parameter: Timepoint (day) Value: 14
  misc_feature: MA Experiment 20001560 PARAMETER Experiment Name: At_Drought_Soil_Dry_P Parameter: Treatment Value: Drought vs. No Drought
  misc_feature: MA Experiment ID: 20001911 Result: Down-regulated in Transcription
  misc_feature: MA Experiment 20001911 PARAMETER Experiment Name: At_Drought_Reproduction_P Parameter: Age (day) Value: 40
  misc_feature: MA Experiment 20001911 PARAMETER Experiment Name: At_Drought_Reproduction_P Parameter: Organism Value: A. thaliana
  misc_feature: MA Experiment 20001911 PARAMETER Experiment Name: At_Drought_Reproduction_P Parameter: Plant Line Value: WS
  misc_feature: MA Experiment 20001911 PARAMETER Experiment Name: At_Drought_Reproduction_P Parameter: Timepoint (day) Value: 10
  misc_feature: MA Experiment 20001911 PARAMETER Experiment Name: At_Drought_Reproduction_P Parameter: Tissue Value: Flowers
  misc_feature: MA Experiment 20001911 PARAMETER Experiment Name: At_Drought_Reproduction_P Parameter: Treatment Value: Drought vs. No Drought
atgcctgtggtgagaacgagagcgaaatgttcgattcccgtcacaaaccctaatccaacagtcggaggaggaaactcaaacgtctcgatctacgagaaatgcagagaagacaggatcaaggagaatcttcagaggatgaagaatctcggaatcatggatctctctctcaaactcaaatccgagatccgacccgccaaaaggcgttacggtaactctaatgccaatccgggtcgagaaacatctcctattcagctttccgtctcctctagacgatcctcaagggtttttagagaaatcatttcgctgttttataatcagattgaagcaggagccgccagtttctcggagatcctcgaggtaatctcttcattgaagaacgctacaccagtttcctacgcagaggaacctgaactgaagaagggtaaagtgtctaaagaagagattgttttgtgggtaggagaaggcgtaaggccagagatttacactgaggagcatgagaaactgttaggtaacacagaacgaacttgggagctttttgttgatggttgtgacaaaaatgggaaacggatttatgaccctgttagaggaaagtgttgccaccagtgcaggattgaggctaatgtgtttaatggttactgtggattttacaggcagaagacgctaggttatcatacccaatgcagccagtgtaaccattctgttcgaggtcaattctgtggagattgtttatacatgagatatggagaacatgttcttgaagctctggaaaatccggactggatttgtccagtctgtcgcgatatctgcaactgcagtttctgtcgtacaaaaaaagggtggctcccaactggtgcagcttacaggaagattcaaaagttaatggctttccctttgaatttcttttgttctcagatacataaactcgggtataagtctgttgcacattatctgattcaaaccaaccaacagtcagaaacaagtgaggatgatgaaactgatgctcctgcagatagtcaagcttcagaaggagatcatctccttctcataactgatgggattcaggacaatcaaattgacgaaaatctcgatgatgatgatggctcaaacaagaatccggattcagctagaaagtcattatgcttcttgtcgtctgggaacaaccaaacttcagtgactgatggtgatctcaagccattagatgtgaaagaggtggatccagcaactcctgtgatcatcgatcttgaggctcagtgcagtgaaactgagaggatggctaactctgcaaacaaagagaaccgagaaacaagaagcaagcgaaagatgtctgctgaaccaaacccaaatagtattggtggaagactgagacagcgtcgtaagattcaagcttga

SEQ ID NO: 69407 - protein, 462 aa, Arabidopsis thaliana
  peptide (1)..(462): Ceres Seq. ID no. 1814013
  misc_feature (1)..(462): Homolog of NCBI NO: 25407788 NR Description: hypothetical protein AT4g37110 [imported] - thaliana >gi|4006866|emb|CAB16784.1| putative protein thaliana] >gi|7270660|emb|CAB80377.1| putative protein
  misc_feature (122)..(462): Homolog of NCBI NO: 30690864 NR Description: expressed protein [Arabidopsis thaliana]
  misc_feature (1)..(213): Homolog of NCBI NO: 30690864 NR Description: expressed protein [Arabidopsis thaliana]
  misc_feature (122)..(239): Homolog of NCBI NO: 15227848 NR Description: hypothetical protein; protein id: At2g23530.1
  misc_feature (400)..(459): Homolog of NCBI NO: 15227848 NR Description: hypothetical protein; protein id: At2g23530.1
  misc_feature (4)..(145): Homolog of NCBI NO: 15227848 NR Description: hypothetical protein; protein id: At2g23530.1
  misc_feature (23)..(318): Homolog of NCBI NO: 13324785 NR Description: hypothetical protein [Oryza sativa]
  misc_feature (189)..(284): Homolog of NCBI NO: 11360288 NR Description: hypothetical protein DKFZp762L0311.1 - human
  misc_feature (173)..(284): Homolog of NCBI NO: 15929382 NR Description: Unknown (protein for IMAGE:3829029) [Homo sapiens]
  misc_feature (2)..(284): Homolog of NCBI NO: 34855191 NR Description: similar to RIKEN cDNA 2310021G01 [Rattus
MPVVRTRAKCSIPVTNPNPTVGGGNSNVSIYEKCREDRIKENLQRMKNLGIMDLSLKLKSEIRPAKRRYGNSNANPGRETSPIQLSVSSRRSSRVFREIISLFYNQIEAGAASFSEILEVISSLKNATPVSYAEEPELKKGKVSKEEIVLWVGEGVRPEIYTEEHEKLLGNTERTWELFVDGCDKNGKRIYDPVRGKCCHQCRIEANVFNGYCGFYRQKTLGYHTQCSQCNHSVRGQFCGDCLYMRYGEHVLEALENPDWICPVCRDICNCSFCRTKKGWLPTGAAYRKIQKLMAFPLNFFCSQIHKLGYKSVAHYLIQTNQQSETSEDDETDAPADSQASEGDHLLLITDGIQDNQIDENLDDDDGSNKNPDSARKSLCFLSSGNNQTSVTDGDLKPLDVKEVDPATPVIIDLEAQCSETERMANSANKENRETRSKRKMSAEPNPNSIGGRLRQRRKIQA

SEQ ID NO: 69408 - protein, 417 aa, Arabidopsis thaliana
  peptide (1)..(417): Ceres Seq. ID no. 1814014
  misc_feature (128)..(239): Homolog of NCBI NO: 15929382 NR Description: Unknown (protein for IMAGE:3829029) [Homo sapiens]
  misc_feature (1)..(239): Homolog of NCBI NO: 34855191 NR Description: similar to RIKEN cDNA 2310021G01 [Rattus
  misc_feature (1)..(417): Homolog of NCBI NO: 25407788 NR Description: hypothetical protein AT4g37110 [imported] - thaliana >gi|4006866|emb|CAB16784.1| putative protein thaliana] >gi|7270660|emb|CAB80377.1| putative protein
  misc_feature (77)..(417): Homolog of NCBI NO: 30690864 NR Description: expressed protein [Arabidopsis thaliana]
  misc_feature (1)..(168): Homolog of NCBI NO: 30690864 NR Description: expressed protein [Arabidopsis thaliana]
  misc_feature (77)..(194): Homolog of NCBI NO: 15227848 NR Description: hypothetical protein; protein id: At2g23530.1
  misc_feature (355)..(414): Homolog of NCBI NO: 15227848 NR Description: hypothetical protein; protein id: At2g23530.1
  misc_feature (1)..(100): Homolog of NCBI NO: 15227848 NR Description: hypothetical protein; protein id: At2g23530.1
  misc_feature (1)..(273): Homolog of NCBI NO: 13324785 NR Description: hypothetical protein [Oryza sativa]
  misc_feature (144)..(239): Homolog of NCBI NO: 11360288 NR Description: hypothetical protein DKFZp762L0311.1 - human
MKNLGIMDLSLKLKSEIRPAKRRYGNSNANPGRETSPIQLSVSSRRSSRVFREIISLFYNQIEAGAASFSEILEVISSLKNATPVSYAEEPELKKGKVSKEEIVLWVGEGVRPEIYTEEHEKLLGNTERTWELFVDGCDKNGKRIYDPVRGKCCHQCRIEANVFNGYCGFYRQKTLGYHTQCSQCNHSVRGQFCGDCLYMRYGEHVLEALENPDWICPVCRDICNCSFCRTKKGWLPTGAAYRKIQKLMAFPLNFFCSQIHKLGYKSVAHYLIQTNQQSETSEDDETDAPADSQASEGDHLLLITDGIQDNQIDENLDDDDGSNKNPDSARKSLCFLSSGNNQTSVTDGDLKPLDVKEVDPATPVIIDLEAQCSETERMANSANKENRETRSKRKMSAEPNPNSIGGRLRQRRKIQA

SEQ ID NO: 69409 - protein, 411 aa, Arabidopsis thaliana
  peptide (1)..(411): Ceres Seq. ID no. 1814015
  misc_feature (1)..(411): Homolog of NCBI NO: 25407788 NR Description: hypothetical protein AT4g37110 [imported] - thaliana >gi|4006866|emb|CAB16784.1| putative protein thaliana] >gi|7270660|emb|CAB80377.1| putative protein
  misc_feature (71)..(411): Homolog of NCBI NO: 30690864 NR Description: expressed protein [Arabidopsis thaliana]
  misc_feature (1)..(162): Homolog of NCBI NO: 30690864 NR Description: expressed protein [Arabidopsis thaliana]
  misc_feature (71)..(188): Homolog of NCBI NO: 15227848 NR Description: hypothetical protein; protein id: At2g23530.1
  misc_feature (349)..(408): Homolog of NCBI NO: 15227848 NR Description: hypothetical protein; protein id: At2g23530.1
  misc_feature (1)..(94): Homolog of NCBI NO: 15227848 NR Description: hypothetical protein; protein id: At2g23530.1
  misc_feature (1)..(267): Homolog of NCBI NO: 13324785 NR Description: hypothetical protein [Oryza sativa]
  misc_feature (138)..(233): Homolog of NCBI NO: 11360288 NR Description: hypothetical protein DKFZp762L0311.1 - human
  misc_feature (122)..(233): Homolog of NCBI NO: 15929382 NR Description: Unknown (protein for IMAGE:3829029) [Homo sapiens]
  misc_feature (1)..(233): Homolog of NCBI NO: 34855191 NR Description: similar to RIKEN cDNA 2310021G01 [Rattus
MDLSLKLKSEIRPAKRRYGNSNANPGRETSPIQLSVSSRRSSRVFREIISLFYNQIEAGAASFSEILEVISSLKNATPVSYAEEPELKKGKVSKEEIVLWVGEGVRPEIYTEEHEKLLGNTERTWELFVDGCDKNGKRIYDPVRGKCCHQCRIEANVFNGYCGFYRQKTLGYHTQCSQCNHSVRGQFCGDCLYMRYGEHVLEALENPDWICPVCRDICNCSFCRTKKGWLPTGAAYRKIQKLMAFPLNFFCSQIHKLGYKSVAHYLIQTNQQSETSEDDETDAPADSQASEGDHLLLITDGIQDNQIDENLDDDDGSNKNPDSARKSLCFLSSGNNQTSVTDGDLKPLDVKEVDPATPVIIDLEAQCSETERMANSANKENRETRSKRKMSAEPNPNSIGGRLRQRRKIQA

SEQ ID NO: 69410 - DNA, 462 bp, Arabidopsis thaliana
  misc_feature (1)..(462): Ceres Seq. ID no. 1814020
  misc_feature: MA Experiment ID: 20000794 Result: Up-regulated in Transcription
  misc_feature: MA Experiment 20000794 PARAMETER Experiment Name: At_Petals_P Parameter: Age (day) Value: 23-25 days
  misc_feature: MA Experiment 20000794 PARAMETER Experiment Name: At_Petals_P Parameter: Plant Line Value: WS
  misc_feature: MA Experiment 20000794 PARAMETER Experiment Name: At_Petals_P Parameter: Tissue Value: Petals vs. Whole plant
  misc_feature: MA Experiment ID: 20001458 Result: Down-regulated in Transcription
  misc_feature: MA Experiment 20001458 PARAMETER Experiment Name: At_50mM_NH4NO3_L-to-H_P Parameter: Age (day) Value: Undefined
  misc_feature: MA Experiment 20001458 PARAMETER Experiment Name: At_50mM_NH4NO3_L-to-H_P Parameter: Organism Value: Undefined
  misc_feature: MA Experiment 20001458 PARAMETER Experiment Name: At_50mM_NH4NO3_L-to-H_P Parameter: Plant Line Value: Undefined
  misc_feature: MA Experiment 20001458 PARAMETER Experiment Name: At_50mM_NH4NO3_L-to-H_P Parameter: Timepoint (hr) Value: 2
  misc_feature: MA Experiment 20001458 PARAMETER Experiment Name: At_50mM_NH4NO3_L-to-H_P Parameter: Tissue Value: Siliques
  misc_feature: MA Experiment 20001458 PARAMETER Experiment Name: At_50mM_NH4NO3_L-to-H_P Parameter: Treatment Value: 50mM NH4NO3 vs. 100mM Manitol
  misc_feature: MA Experiment ID: 20001757 Result: Down-regulated in Transcription
  misc_feature: MA Experiment 20001757 PARAMETER Experiment Name: At_50mM_NH4NO3_L-to-H_P Parameter: Timepoint (hr) Value: 6
  misc_feature: MA Experiment 20001757 PARAMETER Experiment Name: At_50mM_NH4NO3_L-to-H_P Parameter: Tissue Value: Leaf
  misc_feature: MA Experiment 20001757 PARAMETER Experiment Name: At_50mM_NH4NO3_L-to-H_P Parameter: Treatment Value: 50mM NH4NO3 vs 100mM Mannitol
atgaaacattatgttcttgttcacggcggttgccacggcgcatggtgctggtacaaggtcaaaccggtgctggaagcttcaggccaccgtgtaaccgttgttgatcttacggcttctggtgtgaacatgagcaaagtggaagagattcagactttggcggattacgctaagccgttgcttgaagttctcgagtcgtttggttcagaggataaggttatcctcgttgcacatagcctcggagggatatcagttggtcttgcagctgacatgtttcctagtaagatctctgttgctgtcttcataacctctttcatgcctgatacaacgaatccacacctttttatgttttcgaaaagtgtacttagccaagaagatgtatcaactttctccagtcgaagaattagtagtagcaaacttcagctttcaactaccatgataggcaaagatgtttcatcggggtga

SEQ ID NO: 69411 - protein, 153 aa, Arabidopsis thaliana
  peptide (1)..(153): Ceres Seq. ID no. 1814021
  misc_feature (29)..(147): Pfam Name: alpha/beta hydrolase fold Pfam Description: alpha/beta hydrolase fold
  misc_feature (1)..(153): Homolog of NCBI NO: 15235444 NR Description: putative protein; protein id: At4g37140.1
  misc_feature (1)..(147): Homolog of NCBI NO: 15235445 NR Description: hydroxynitrile lyase like protein; protein id: [Arabidopsis thaliana] >gi|25407792|pir||H85438 hydroxynitrile
  misc_feature (2)..(124): Homolog of NCBI NO: 15227851 NR Description: putative acetone-cyanohydrin lyase; protein id:
  misc_feature (2)..(122): Homolog of NCBI NO: 15227859 NR Description: putative acetone-cyanohydrin lyase; protein id:
  misc_feature (2)..(147): Homolog of NCBI NO: 15227850 NR Description: putative acetone-cyanohydrin lyase; protein id:
  misc_feature (2)..(125): Homolog of NCBI NO: 28393451 NR Description: putative acetone-cyanohydrin lyase [Arabidopsis
  misc_feature (2)..(127): Homolog of NCBI NO: 14279437 NR Description: ethylene-induced esterase [Citrus sinensis]
  misc_feature (2)..(118): Homolog of NCBI NO: 15227865 NR Description: putative acetone-cyanohydrin lyase; protein id:
  misc_feature (2)..(125): Homolog of NCBI NO: 15227861 NR Description: putative acetone-cyanohydrin lyase; protein id:
  misc_feature (2)..(118): Homolog of NCBI NO: 40549303 NR Description: salicylic acid-binding protein 2 [Nicotiana
MKHYVLVHGGCHGAWCWYKVKPVLEASGHRVTVVDLTASGVNMSKVEEIQTLADYAKPLLEVLESFGSEDKVILVAHSLGGISVGLAADMFPSKISVAVFITSFMPDTTNPHLFMFSKSVLSQEDVSTFSSRRISSSKLQLSTTMIGKDVSSG

SEQ ID NO: 69412 - protein, 111 aa, Arabidopsis thaliana
  peptide (1)..(111): Ceres Seq. ID no. 1814022
  misc_feature (1)..(105): Pfam Name: alpha/beta hydrolase fold Pfam Description: alpha/beta hydrolase fold
  misc_feature (1)..(111): Homolog of NCBI NO: 15235444 NR Description: putative protein; protein id: At4g37140.1
  misc_feature (1)..(105): Homolog of NCBI NO: 15235445 NR Description: hydroxynitrile lyase like protein; protein id: [Arabidopsis thaliana] >gi|25407792|pir||H85438 hydroxynitrile
  misc_feature (1)..(82): Homolog of NCBI NO: 15227851 NR Description: putative acetone-cyanohydrin lyase; protein id:
  misc_feature (1)..(80): Homolog of NCBI NO: 15227859 NR Description: putative acetone-cyanohydrin lyase; protein id:
  misc_feature (1)..(105): Homolog of NCBI NO: 15227850 NR Description: putative acetone-cyanohydrin lyase; protein id:
  misc_feature (1)..(83): Homolog of NCBI NO: 28393451 NR Description: putative acetone-cyanohydrin lyase [Arabidopsis
  misc_feature (1)..(85): Homolog of NCBI NO: 14279437 NR Description: ethylene-induced esterase [Citrus sinensis]
  misc_feature (1)..(76): Homolog of NCBI NO: 15227865 NR Description: putative acetone-cyanohydrin lyase; protein id:
  misc_feature (1)..(83): Homolog of NCBI NO: 15227861 NR Description: putative acetone-cyanohydrin lyase; protein id:
  misc_feature (1)..(76): Homolog of NCBI NO: 40549303 NR Description: salicylic acid-binding protein 2 [Nicotiana
MSKVEEIQTLADYAKPLLEVLESFGSEDKVILVAHSLGGISVGLAADMFPSKISVAVFITSFMPDTTNPHLFMFSKSVLSQEDVSTFSSRRISSSKLQLSTTMIGKDVSSG

SEQ ID NO: 69413 - DNA, 1950 bp, Arabidopsis thaliana
  misc_feature (1)..(1950): Ceres Seq. ID no. 1814123
  misc_feature: MA Experiment ID: 20000286 Result: Down-regulated in Transcription
  misc_feature: MA Experiment 20000286 PARAMETER Experiment Name: At_Open_Flower_P Parameter: Age (day) Value: 21
  misc_feature: MA Experiment 20000286 PARAMETER Experiment Name: At_Open_Flower_P Parameter: Plant Line Value: WS
  misc_feature: MA Experiment 20000286 PARAMETER Experiment Name: At_Open_Flower_P Parameter: Tissue Value: Half Open vs. Whole Plant
  misc_feature: MA Experiment ID: 20000437 Result: Up-regulated in Transcription
  misc_feature: MA Experiment 20000437 PARAMETER Experiment Name: At_Drought_P Parameter: Age (day) Value: 8
  misc_feature: MA Experiment 20000437 PARAMETER Experiment Name: At_Drought_P Parameter: Organism Value: A. thaliana
  misc_feature: MA Experiment 20000437 PARAMETER Experiment Name: At_Drought_P Parameter: Plant Line Value: WS
  misc_feature: MA Experiment 20000437 PARAMETER Experiment Name: At_Drought_P Parameter: Timepoint (hr) Value: 24
  misc_feature: MA Experiment 20000437 PARAMETER Experiment Name: At_Drought_P Parameter: Tissue Value: Whole Plant
  misc_feature: MA Experiment 20000437 PARAMETER Experiment Name: At_Drought_P Parameter: Treatment Value: Drought vs. No Drought
  misc_feature: MA Experiment ID: 20001905 Result: Up-regulated in Transcription
  misc_feature: MA Experiment 20001905 PARAMETER Experiment Name: At_Drought_Reproduction_P Parameter: Age (day) Value: 40
  misc_feature: MA Experiment 20001905 PARAMETER Experiment Name: At_Drought_Reproduction_P Parameter: Organism Value: A. thaliana
  misc_feature: MA Experiment 20001905 PARAMETER Experiment Name: At_Drought_Reproduction_P Parameter: Plant Line Value: WS
  misc_feature: MA Experiment 20001905 PARAMETER Experiment Name: At_Drought_Reproduction_P Parameter: Timepoint (day) Value: 10
  misc_feature: MA Experiment 20001905 PARAMETER Experiment Name: At_Drought_Reproduction_P Parameter: Tissue Value: Rosettes
  misc_feature: MA Experiment 20001905 PARAMETER Experiment Name: At_Drought_Reproduction_P Parameter: Treatment Value: Drought vs. No Drought
atgttctctaaagtttccattcttctcttttccctcgcatccctactcttgttccgatcaaccacaggcatcgaattcatctacaactccaatttcaccacaaccaacacacttctcctcggcaacgccactgttaaatctccaccgtcgatcctcaccctcaccaaccaaaccactttctccatcggacgtggcctctacccttcaagaatcaacgcctcctcctcctctgcctcgccgttacctttcgccacatcattcatcttctccatggctccttttaaacacctctctcctggccacggcttcgccttcgtcttccttcctttctccgaaacctccgccgcaagctcatctcagcatctcggcctcttcaacttcaccaataacggtgaccccaatagccgaatcttcgccgttgaattcgatgttttcgctaaccaagagttcaacgacatcaacgacaaccacgtcggcgtcgacgtcaattctctcacttccgttgcatctgaaactgcaggtttctatggaggcagagacggccagagattcacggagctgaagcttaacagtggcgagaattatcaggcgtggatcgagtttaatgggtcagcgatcaatgtcacgatggctagagctagctctagaaagcccataagaccactcataagcattccattaaatctcactggagtcttacttgatgatatgttcgttggattcactgcctccacaggacaactagtgcagagccataggattctctcatggagttttagtaactccaatttctccattggtgactctgttttgaagtctaaaggcttcattgctggggtctctagtggtgttgtgttgcagagactagaaggagacgtggaagattgggaaacagagtattggcctcacagagtgcaatacaaagatgttttggaagcaacaaaagggttttccgatgagaacatgatcggatacggagggaattctaaagtgtacaggggagtgttggaaggtaaagaagttgcggttaagagaataatgatgagtcctcgagagagcgttggcgcgacgagtgagttcttagctgaggtctcgagcttagggaggttgagacacaagaatatagttggactaaaaggttggtctaagaaaggaggagagagtctgatattgatttacgagtatatggagaatggaagtgtcgataagcggatatttgattgtaacgagatgttgaattgggaggaaagaatgagagtgataagagacctagcctcagggatgttgtatctacacgaagggtgggagacaaaggtgttacatagagatataaagtcaagcaatgtgttgcttgacaaggatatgaacgcgagggtaggtgattttgggttggctaagttgcagaacactagtaaagagatggttagcacgacacatgttgttggaacagcgggttatatggcgcctgagttggttaagacagggagagcatcagcgcaaaccgatgtgtatagctttggagtgtttgtgttggaggtagtgtgtggaaggaggccaatagaggaaggaagagaagggatagtggaatggatatggggactaatggagaaagacaaagtggttgatggtttagacgagagaataaaggcgaatggagtgttcgtggtcgaggaagtggagatggctctgagaataggactgttgtgtgtgcatcctgatccgagagtgcgtccgaagatgagacaagtggtgcagatattggaacaagggagattagtggaggatggtggtgaaagggaaataagcttgttggagagagtgaagagctcttacttgttggaaactggtgagggaagcagacaacaacatcccacgttccaagatgtatggaattcgtcttcttattctaattccttccaaacttatgattctattcttcatggaaggtga

SEQ ID NO: 69414 - protein, 649 aa, Arabidopsis thaliana
  peptide (1)..(649): Ceres Seq. ID no. 1814124
  misc_feature (317)..(519): Pfam Name: Protein kinase domain Pfam Description: Protein kinase domain
  misc_feature (293)..(649): Homolog of NCBI NO: 18412759 NR Description: score=179, E=5.7e-06, N=1); protein id: [Arabidopsis thaliana] >gi|25387046|pir||D85062 hypothetical
  misc_feature (8)..(271): Homolog of NCBI NO: 18412759 NR Description: score=179, E=5.7e-06, N=1); protein id: [Arabidopsis thaliana] >gi|25387046|pir||D85062 hypothetical
  misc_feature (293)..(649): Homolog of NCBI NO: 30794060 NR Description: putative protein kinase [Arabidopsis thaliana]
  misc_feature (8)..(271): Homolog of NCBI NO: 30794060 NR Description: putative protein kinase [Arabidopsis thaliana]
  misc_feature (292)..(587): Homolog of NCBI NO: 11346411 NR Description: receptor-type protein kinase LRK1 [imported] - thaliana >gi|1418331|emb|CAA65153.1| receptor like protein kinase
  misc_feature (1)..(259): Homolog of NCBI NO: 11346411 NR Description: receptor-type protein kinase LRK1 [imported] - thaliana >gi|1418331|emb|CAA65153.1| receptor like protein kinase
  misc_feature (294)..(588): Homolog of NCBI NO: 34395075 NR Description: putative receptor kinase Lecrk [Oryza sativa
  misc_feature (7)..(259): Homolog of NCBI NO: 34395075 NR Description: putative receptor kinase Lecrk [Oryza sativa
  misc_feature (294)..(588): Homolog of NCBI NO: 34899508 NR Description: putative receptor-like protein kinase [Oryza
  misc_feature (7)..(259): Homolog of NCBI NO: 34899508 NR Description: putative receptor-like protein kinase [Oryza
MFSKVSILLFSLASLLLFRSTTGIEFIYNSNFTTTNTLLLGNATVKSPPSILTLTNQTTFSIGRGLYPSRINASSSSASPLPFATSFIFSMAPFKHLSPGHGFAFVFLPFSETSAASSSQHLGLFNFTNNGDPNSRIFAVEFDVFANQEFNDINDNHVGVDVNSLTSVASETAGFYGGRDGQRFTELKLNSGENYQAWIEFNGSAINVTMARASSRKPIRPLISIPLNLTGVLLDDMFVGFTASTGQLVQSHRILSWSFSNSNFSIGDSVLKSKGFIAGVSSGVVLQRLEGDVEDWETEYWPHRVQYKDVLEATKGFSDENMIGYGGNSKVYRGVLEGKEVAVKRIMMSPRESVGATSEFLAEVSSLGRLRHKNIVGLKGWSKKGGESLILIYEYMENGSVDKRIFDCNEMLNWEERMRVIRDLASGMLYLHEGWETKVLHRDIKSSNVLLDKDMNARVGDFGLAKLQNTSKEMVSTTHVVGTAGYMAPELVKTGRASAQTDVYSFGVFVLEVVCGRRPIEEGREGIVEWIWGLMEKDKVVDGLDERIKANGVFVVEEVEMALRIGLLCVHPDPRVRPKMRQVVQILEQGRLVEDGGEREISLLERVKSSYLLETGEGSRQQHPTFQDVWNSSSYSNSFQTYDSILHGR

SEQ ID NO: 69415 - protein, 559 aa, Arabidopsis thaliana
  peptide (1)..(559): Ceres Seq. ID no. 1814125
  misc_feature (227)..(429): Pfam Name: Protein kinase domain Pfam Description: Protein kinase domain
  misc_feature (203)..(559): Homolog of NCBI NO: 18412759 NR Description: score=179, E=5.7e-06, N=1); protein id: [Arabidopsis thaliana] >gi|25387046|pir||D85062 hypothetical
  misc_feature (1)..(181): Homolog of NCBI NO: 18412759 NR Description: score=179, E=5.7e-06, N=1); protein id: [Arabidopsis thaliana] >gi|25387046|pir||D85062 hypothetical
  misc_feature (203)..(559): Homolog of NCBI NO: 30794060 NR Description: putative protein kinase [Arabidopsis thaliana]
  misc_feature (1)..(181): Homolog of NCBI NO: 30794060 NR Description: putative protein kinase [Arabidopsis thaliana]
  misc_feature (202)..(497): Homolog of NCBI NO: 11346411 NR Description: receptor-type protein kinase LRK1 [imported] - thaliana >gi|1418331|emb|CAA65153.1| receptor like protein kinase
  misc_feature (1)..(169): Homolog of NCBI NO: 11346411 NR Description: receptor-type protein kinase LRK1 [imported] - thaliana >gi|1418331|emb|CAA65153.1| receptor like protein kinase
  misc_feature (204)..(498): Homolog of NCBI NO: 34395075 NR Description: putative receptor kinase Lecrk [Oryza sativa
  misc_feature (1)..(169): Homolog of NCBI NO: 34395075 NR Description: putative receptor kinase Lecrk [Oryza sativa
  misc_feature (204)..(498): Homolog of NCBI NO: 34899508 NR Description: putative receptor-like protein kinase [Oryza
  misc_feature (1)..(169): Homolog of NCBI NO: 34899508 NR Description: putative receptor-like protein kinase [Oryza
MAPFKHLSPGHGFAFVFLPFSETSAASSSQHLGLFNFTNNGDPNSRIFAVEFDVFANQEFNDINDNHVGVDVNSLTSVASETAGFYGGRDGQRFTELKLNSGENYQAWIEFNGSAINVTMARASSRKPIRPLISIPLNLTGVLLDDMFVGFTASTGQLVQSHRILSWSFSNSNFSIGDSVLKSKGFIAGVSSGVVLQRLEGDVEDWETEYWPHRVQYKDVLEATKGFSDENMIGYGGNSKVYRGVLEGKEVAVKRIMMSPRESVGATSEFLAEVSSLGRLRHKNIVGLKGWSKKGGESLILIYEYMENGSVDKRIFDCNEMLNWEERMRVIRDLASGMLYLHEGWETKVLHRDIKSSNVLLDKDMNARVGDFGLAKLQNTSKEMVSTTHVVGTAGYMAPELVKTGRASAQTDVYSFGVFVLEVVCGRRPIEEGREGIVEWIWGLMEKDKVVDGLDERIKANGVFVVEEVEMALRIGLLCVHPDPRVRPKMRQVVQILEQGRLVEDGGEREISLLERVKSSYLLETGEGSRQQHPTFQDVWNSSSYSNSFQTYDSILHGR

SEQ ID NO: 69416 - protein, 440 aa, Arabidopsis thaliana
  peptide (1)..(440): Ceres Seq. ID no. 1814126
  misc_feature (108)..(310): Pfam Name: Protein kinase domain Pfam Description: Protein kinase domain
  misc_feature (84)..(440): Homolog of NCBI NO: 18412759 NR Description: score=179, E=5.7e-06, N=1); protein id: [Arabidopsis thaliana] >gi|25387046|pir||D85062 hypothetical
  misc_feature (1)..(62): Homolog of NCBI NO: 18412759 NR Description: score=179, E=5.7e-06, N=1); protein id: [Arabidopsis thaliana] >gi|25387046|pir||D85062 hypothetical
  misc_feature (84)..(440): Homolog of NCBI NO: 30794060 NR Description: putative protein kinase [Arabidopsis thaliana]
  misc_feature (1)..(62): Homolog of NCBI NO: 30794060 NR Description: putative protein kinase [Arabidopsis thaliana]
  misc_feature (83)..(378): Homolog of NCBI NO: 11346411 NR Description: receptor-type protein kinase LRK1 [imported] - thaliana >gi|1418331|emb|CAA65153.1| receptor like protein kinase
  misc_feature (1)..(50): Homolog of NCBI NO: 11346411 NR Description: receptor-type protein kinase LRK1 [imported] - thaliana >gi|1418331|emb|CAA65153.1| receptor like protein kinase
  misc_feature (85)..(379): Homolog of NCBI NO: 34395075 NR Description: putative receptor kinase Lecrk [Oryza sativa
  misc_feature (1)..(50): Homolog of NCBI NO: 34395075 NR Description: putative receptor kinase Lecrk [Oryza sativa
  misc_feature (85)..(379): Homolog of NCBI NO: 34899508 NR Description: putative receptor-like protein kinase [Oryza
  misc_feature (1)..(50): Homolog of NCBI NO: 34899508 NR Description: putative receptor-like protein kinase [Oryza
MARASSRKPIRPLISIPLNLTGVLLDDMFVGFTASTGQLVQSHRILSWSFSNSNFSIGDSVLKSKGFIAGVSSGVVLQRLEGDVEDWETEYWPHRVQYKDVLEATKGFSDENMIGYGGNSKVYRGVLEGKEVAVKRIMMSPRESVGATSEFLAEVSSLGRLRHKNIVGLKGWSKKGGESLILIYEYMENGSVDKRIFDCNEMLNWEERMRVIRDLASGMLYLHEGWETKVLHRDIKSSNVLLDKDMNARVGDFGLAKLQNTSKEMVSTTHVVGTAGYMAPELVKTGRASAQTDVYSFGVFVLEVVCGRRPIEEGREGIVEWIWGLMEKDKVVDGLDERIKANGVFVVEEVEMALRIGLLCVHPDPRVRPKMRQVVQILEQGRLVEDGGEREISLLERVKSSYLLETGEGSRQQHPTFQDVWNSSSYSNSFQTYDSILHGR

SEQ ID NO: 69417 - DNA, 1218 bp, Arabidopsis thaliana
  misc_feature (1)..(1218): Ceres Seq. ID no. 1814205
  misc_feature: MA Experiment ID: 20000185 Result: Up-regulated in Transcription
  misc_feature: MA Experiment 20000185 PARAMETER Experiment Name: At_Roots__P Parameter: Age (day) Value: 7 vs. 21
  misc_feature: MA Experiment 20000185 PARAMETER Experiment Name: At_Roots__P Parameter: Organism Value: A. thaliana
  misc_feature: MA Experiment 20000185 PARAMETER Experiment Name: At_Roots__P Parameter: Tissue Value: Roots vs. Whole Plant
  misc_feature: MA Experiment ID: 20000439 Result: Up-regulated in Transcription
  misc_feature: MA Experiment 20000439 PARAMETER Experiment Name: At_Roots__P Parameter: Age (day) Value: 14 vs. 21
  misc_feature: MA Experiment 20000439 PARAMETER Experiment Name: At_Roots__P Parameter: Organism Value: A. thaliana
  misc_feature: MA Experiment 20000439 PARAMETER Experiment Name: At_Roots__P Parameter: Tissue Value: Roots vs. Whole Plant
  misc_feature: MA Experiment ID: 20001905 Result: Up-regulated in Transcription
  misc_feature: MA Experiment 20001905 PARAMETER Experiment Name: At_Drought_Reproduction_P Parameter: Age (day) Value: 40
  misc_feature: MA Experiment 20001905 PARAMETER Experiment Name: At_Drought_Reproduction_P Parameter: Organism Value: A. thaliana
  misc_feature: MA Experiment 20001905 PARAMETER Experiment Name: At_Drought_Reproduction_P Parameter: Plant Line Value: WS
  misc_feature: MA Experiment 20001905 PARAMETER Experiment Name: At_Drought_Reproduction_P Parameter: Timepoint (day) Value: 10
  misc_feature: MA Experiment 20001905 PARAMETER Experiment Name: At_Drought_Reproduction_P Parameter: Tissue Value: Rosettes
  misc_feature: MA Experiment 20001905 PARAMETER Experiment Name: At_Drought_Reproduction_P Parameter: Treatment Value: Drought vs. No Drought
atgcagaaacggagaacggtgaaggaatctacgaagataagaaatggtaaaggtatggattccggcgaaaagaagagatctgagaagagattgatgaagttcgaggagttacctaggtatttgaaagataacgagttcatacacaatcattatcgatgtgagtggtcaatcaaagaaactttcctcagcgctttctcatggcacaatgagactctcaacatctggacgcatttgtgtggatttgcgatatttacttggatgatggttgtgagttcaatggagacgacggagcttggcctcgccggctttgttagccttctctccgggaaaattaaacaaatttcaatctttttgggggatttgtgggtcctaatgacagagcaacaattcgctggccatggccgtcaatggcaatgtcaaaagatgtttacttctccagcgatcaaactctgcatcacttccatgtcacacctcttcgcctgtcactccagacggttcaacctcttcttctggcgtctagactacgctggaatctccctcatgatcgtctgttcattcttcgcacctatctactatgcattctcatgccacacttactggcgactcttctacctctcatcgatctcaatcctcggtctcctcgccatcttcactctcctctctccatcactctcagctccacgtttcagatctttcagagcagctctgttcctaacaatgggattttctggcgtaataccagccacacatgtgctttaccttcataaggatcacccaaacgtgcttatagctctcgtatatgaacttgcgatggctgtgttgtatgcaacaggagcagcgttttatgttacccgcatacctgaaagatggaagcctggggcttttgatattgcaggacatagccatcagatattccatgtgtttgtagtcttaggagctcttgctcatagtgttgccagtcttcttatcatggattttcgacgggcttctccttcttcatcgatgaatcccaaactcagaacagcgatcgcagatcgagcgacgattgtgttggggactttgattcgcaagatgggtcgttcttcgtttgatttctctgaaaagtctctccttttcgacattatcgtgacgccattagcaaagcttcggagtttgttgtcgttaggacagaatgagacgaagctactgtgttgtaagctaaagactgagggtgcttag

SEQ ID NO: 69418 - protein, 405 aa, Arabidopsis thaliana
  peptide (1)..(405): Ceres Seq. ID no. 1814206
  misc_feature (65)..(321): Pfam Name: Uncharacterised protein family (Hly-III / UPF0073) Pfam Description: Uncharacterised protein family (Hly-III /
  misc_feature (1)..(405): Homolog of NCBI NO: 25407688 NR Description: hypothetical protein AT4g30850 [imported] - thaliana >gi|2980781|emb|CAA18208.1| putative protein thaliana] >gi|7269986|emb|CAB79803.1| putative protein
  misc_feature (136)..(332): Homolog of NCBI NO: 18377749 NR Description: unknown protein [Arabidopsis thaliana]
  misc_feature (1)..(109): Homolog of NCBI NO: 18377749 NR Description: unknown protein [Arabidopsis thaliana]
  misc_feature (136)..(332): Homolog of NCBI NO: 30688829 NR Description: expressed protein [Arabidopsis thaliana]
  misc_feature (1)..(109): Homolog of NCBI NO: 30688829 NR Description: expressed protein [Arabidopsis thaliana]
  misc_feature (1)..(332): Homolog of NCBI NO: 18400468 NR Description: expressed protein; protein id: At2g24150.1, by cDNA: gi_13877832 [Arabidopsis thaliana] unknown protein [Arabidopsis thaliana]
  misc_feature (13)..(332): Homolog of NCBI NO: 13272399 NR Description: hypothetical protein [Arabidopsis thaliana]
  misc_feature (153)..(332): Homolog of NCBI NO: 25309925 NR Description: hypothetical protein At2g24150 [imported] -
  misc_feature (13)..(109): Homolog of NCBI NO: 25309925 NR Description: hypothetical protein At2g24150 [imported] -
  misc_feature (81)..(327): Homolog of NCBI NO: 15241302 NR Description: putative protein; protein id: At5g20270.1, by cDNA: 24749., supported by cDNA: gi_15982833 [Arabidopsis >gi|15982834|gb|AAL09764.1| AT5g20270/F5O24_160 [Arabidopsis
MQKRRTVKESTKIRNGKGMDSGEKKRSEKRLMKFEELPRYLKDNEFIHNHYRCEWSIKETFLSAFSWHNETLNIWTHLCGFAIFTWMMVVSSMETTELGLAGFVSLLSGKIKQISIFLGDLWVLMTEQQFAGHGRQWQCQKMFTSPAIKLCITSMSHLFACHSRRFNLFFWRLDYAGISLMIVCSFFAPIYYAFSCHTYWRLFYLSSISILGLLAIFTLLSPSLSAPRFRSFRAALFLTMGFSGVIPATHVLYLHKDHPNVLIALVYELAMAVLYATGAAFYVTRIPERWKPGAFDIAGHSHQIFHVFVVLGALAHSVASLLIMDFRRASPSSSMNPKLRTAIADRATIVLGTLIRKMGRSSFDFSEKSLLFDIIVTPLAKLRSLLSLGQNETKLLCCKLKTEGA

SEQ ID NO: 69419 - protein, 387 aa, Arabidopsis thaliana
  peptide (1)..(387): Ceres Seq. ID no. 1814207
  misc_feature (47)..(303): Pfam Name: Uncharacterised protein family (Hly-III / UPF0073) Pfam Description: Uncharacterised protein family (Hly-III /
  misc_feature (1)..(387): Homolog of NCBI NO: 25407688 NR Description: hypothetical protein AT4g30850 [imported] - thaliana >gi|2980781|emb|CAA18208.1| putative protein thaliana] >gi|7269986|emb|CAB79803.1| putative protein
  misc_feature (118)..(314): Homolog of NCBI NO: 18377749 NR Description: unknown protein [Arabidopsis thaliana]
  misc_feature (1)..(91): Homolog of NCBI NO: 18377749 NR Description: unknown protein [Arabidopsis thaliana]
  misc_feature (118)..(314): Homolog of NCBI NO: 30688829 NR Description: expressed protein [Arabidopsis thaliana]
  misc_feature (1)..(91): Homolog of NCBI NO: 30688829 NR Description: expressed protein [Arabidopsis thaliana]
  misc_feature (1)..(314): Homolog of NCBI NO: 18400468 NR Description: expressed protein; protein id: At2g24150.1, by cDNA: gi_13877832 [Arabidopsis thaliana] unknown protein [Arabidopsis thaliana]
  misc_feature (1)..(314): Homolog of NCBI NO: 13272399 NR Description: hypothetical protein [Arabidopsis thaliana]
  misc_feature (135)..(314): Homolog of NCBI NO: 25309925 NR Description: hypothetical protein At2g24150 [imported] -
  misc_feature (1)..(91): Homolog of NCBI NO: 25309925 NR Description: hypothetical protein At2g24150 [imported] -
  misc_feature (63)..(309): Homolog of NCBI NO: 15241302 NR Description: putative protein; protein id: At5g20270.1, by cDNA: 24749., supported by cDNA: gi_15982833 [Arabidopsis >gi|15982834|gb|AAL09764.1| AT5g20270/F5O24_160 [Arabidopsis
MDSGEKKRSEKRLMKFEELPRYLKDNEFIHNHYRCEWSIKETFLSAFSWHNETLNIWTHLCGFAIFTWMMVVSSMETTELGLAGFVSLLSGKIKQISIFLGDLWVLMTEQQFAGHGRQWQCQKMFTSPAIKLCITSMSHLFACHSRRFNLFFWRLDYAGISLMIVCSFFAPIYYAFSCHTYWRLFYLSSISILGLLAIFTLLSPSLSAPRFRSFRAALFLTMGFSGVIPATHVLYLHKDHPNVLIALVYELAMAVLYATGAAFYVTRIPERWKPGAFDIAGHSHQIFHVFVVLGALAHSVASLLIMDFRRASPSSSMNPKLRTAIADRATIVLGTLIRKMGRSSFDFSEKSLLFDIIVTPLAKLRSLLSLGQNETKLLCCKLKTEGA

SEQ ID NO: 69420 - protein, 374 aa, Arabidopsis thaliana
  peptide (1)..(374): Ceres Seq. ID no. 1814208
  misc_feature (34)..(290): Pfam Name: Uncharacterised protein family (Hly-III / UPF0073) Pfam Description: Uncharacterised protein family (Hly-III /
  misc_feature (1)..(374): Homolog of NCBI NO: 25407688 NR Description: hypothetical protein AT4g30850 [imported] - thaliana >gi|2980781|emb|CAA18208.1| putative protein thaliana] >gi|7269986|emb|CAB79803.1| putative protein
  misc_feature (105)..(301): Homolog of NCBI NO: 18377749 NR Description: unknown protein [Arabidopsis thaliana]
  misc_feature (1)..(78): Homolog of NCBI NO: 18377749 NR Description: unknown protein [Arabidopsis thaliana]
  misc_feature (105)..(301): Homolog of NCBI NO: 30688829 NR Description: expressed protein [Arabidopsis thaliana]
  misc_feature (1)..(78): Homolog of NCBI NO: 30688829 NR Description: expressed protein [Arabidopsis thaliana]
  misc_feature (1)..(301): Homolog of NCBI NO: 18400468 NR Description: expressed protein; protein id: At2g24150.1, by cDNA: gi_13877832 [Arabidopsis thaliana] unknown protein [Arabidopsis thaliana]
  misc_feature (1)..(301): Homolog of NCBI NO: 13272399 NR Description: hypothetical protein [Arabidopsis thaliana]
  misc_feature (122)..(301): Homolog of NCBI NO: 25309925 NR Description: hypothetical protein At2g24150 [imported] -
  misc_feature (1)..(78): Homolog of NCBI NO: 25309925 NR Description: hypothetical protein At2g24150 [imported] -
  misc_feature (50)..(296): Homolog of NCBI NO: 15241302 NR Description: putative protein; protein id: At5g20270.1, by cDNA: 24749., supported by cDNA: gi_15982833 [Arabidopsis >gi|15982834|gb|AAL09764.1| AT5g20270/F5O24_160 [Arabidopsis
MKFEELPRYLKDNEFIHNHYRCEWSIKETFLSAFSWHNETLNIWTHLCGFAIFTWMMVVSSMETTELGLAGFVSLLSGKIKQISIFLGDLWVLMTEQQFAGHGRQWQCQKMFTSPAIKLCITSMSHLFACHSRRFNLFFWRLDYAGISLMIVCSFFAPIYYAFSCHTYWRLFYLSSISILGLLAIFTLLSPSLSAPRFRSFRAALFLTMGFSGVIPATHVLYLHKDHPNVLIALVYELAMAVLYATGAAFYVTRIPERWKPGAFDIAGHSHQIFHVFVVLGALAHSVASLLIMDFRRASPSSSMNPKLRTAIADRATIVLGTLIRKMGRSSFDFSEKSLLFDIIVTPLAKLRSLLSLGQNETKLLCCKLKTEGA

SEQ ID NO: 69421 - DNA, 1470 bp, Arabidopsis thaliana
  misc_feature (1)..(1470): Ceres Seq. ID no. 1814280
  misc_feature: MA Experiment ID: 20000347 Result: Up-regulated in Transcription
  misc_feature: MA Experiment 20000347 PARAMETER Experiment Name: At_2mM_SA_Sub_P Parameter: Age (day) Value: 14
  misc_feature: MA Experiment 20000347 PARAMETER Experiment Name: At_2mM_SA_Sub_P Parameter: Organism Value: A. thaliana
  misc_feature: MA Experiment 20000347 PARAMETER Experiment Name: At_2mM_SA_Sub_P Parameter: Plant Line Value: WS
  misc_feature: MA Experiment 20000347 PARAMETER Experiment Name: At_2mM_SA_Sub_P Parameter: Timepoint (hr) Value: 6
  misc_feature: MA Experiment 20000347 PARAMETER Experiment Name: At_2mM_SA_Sub_P Parameter: Tissue Value: Aerial
  misc_feature: MA Experiment 20000347 PARAMETER Experiment Name: At_2mM_SA_Sub_P Parameter: Treatment Value: 2mM SA vs. No Treatment
  misc_feature: MA Experiment ID: 20000348 Result: Up-regulated in Transcription
  misc_feature: MA Experiment 20000348 PARAMETER Experiment Name: At_100uM_ABA_Sub_P Parameter: Age (day) Value: 14
  misc_feature: MA Experiment 20000348 PARAMETER Experiment Name: At_100uM_ABA_Sub_P Parameter: Organism Value: A. thaliana
  misc_feature: MA Experiment 20000348 PARAMETER Experiment Name: At_100uM_ABA_Sub_P Parameter: Plant Line Value: WS
  misc_feature: MA Experiment 20000348 PARAMETER Experiment Name: At_100uM_ABA_Sub_P Parameter: Timepoint (hr) Value: 1
  misc_feature: MA Experiment 20000348 PARAMETER Experiment Name: At_100uM_ABA_Sub_P Parameter: Tissue Value: Aerial
  misc_feature: MA Experiment 20000348 PARAMETER Experiment Name: At_100uM_ABA_Sub_P Parameter: Treatment Value: 100uM ABA vs. No Treatment
  misc_feature: MA Experiment ID: 20000355 Result: Up-regulated in Transcription
  misc_feature: MA Experiment 20000355 PARAMETER Experiment Name: At_Siliques_Sub_P Parameter: Age (day) Value: 21
  misc_feature: MA Experiment 20000355 PARAMETER Experiment Name: At_Siliques_Sub_P Parameter: Organism Value: A. thaliana
  misc_feature: MA Experiment 20000355 PARAMETER Experiment Name: At_Siliques_Sub_P Parameter: Plant Line Value: WS
  misc_feature: MA Experiment 20000355 PARAMETER Experiment Name: At_Siliques_Sub_P Parameter: Tissue Value: Less Than 5mm Siliques vs. Whole Plant
  misc_feature: MA Experiment ID: 20000440 Result: Up-regulated in Transcription
  misc_feature: MA Experiment 20000440 PARAMETER Experiment Name: At_Closed-Flower__Sub_P Parameter: Tissue Value: Closed Flower vs. Whole Plant
atgaaaggaaaccaaaaagactcatcggagaaacccatatgggatcggagctcatcgggtatatccatgacccgacccggtcgattaataatctggctcatcctcttcatctccgtcacttacatcatctacactctcaagatcgtctccactacacacccttgcgaagatctaacctccgagtcaattctccaacaaagaccggagaaaaaagcggttacagtaacggttaaggcggttccggcggagcaagaagcaacggatctaaaccatgtggttttcggtattgctgcgtcgtcgaagctatggaaacaaaggaaagagtatatcaagatttggtataagccaaagaaaatgagaggctacgtgtggttagacgaagaggtaaagataaaatccgaaaccggagatcaagaaagtctcccgtcggtgagaatctccggtgatacgtcgtcgtttccttatactaacaaacaaggacaccgatcagcgattaggatctcgaggattgtttcggaaacgttgatgagtcttgattctgagtcgaagaagaacgtgaggtggttcgtgatgggtgatgatgatacgatgtattatatagggagcttgtcggaatctcatttgcagaacattattttctcttatggaatggcttatggtggaggaggttttgcgattagttatccattggctgtggctttgagtaagatgcaagatcagtgtattcagaggtatccggctttgtatggttctgatgatcggatgcaagcttgtatggctgagcttggtgttccattgactaaagagatcggttttcaccaatacgacgttcatgggaatctcttcggcctcctagctgcccatccgataacaccgtttgtatcgatgcaccatcttgatgttgtggaaccgatttttccaaacatgactcgtgttcgcgctatcaagaaactaaccacaccgatgaagattgattcggctgcgcttctccaacaatcaatatgctatgacaaacacaaaagctggactatttcagtctcgtggggatttgcggtccaggtgttccgtggatcattctctccccgggaaatggaaatgccatctagaactttcttgaattggtacaaaagagcggattacaccgcctacgcattcaatactaggcccgtgagtcgcaatcattgccaaaaaccgtttgtttttcacatgtcgagtgcaaaatttgacccgcagttgaacacgacggttagcgaatacacgagacatcgggttccgcaaccggcttgtcgatgggatatggctaacccagaggagatcaacactatagtcgtctacaaaaaacccgatcctcacctatggaacagatcacctagaagaaactgttgcagagtattacaaacaaagaggaataatacattatggatcaatgttggtgtatgtagagcaggtgaagtcactgaagtaaagtaa

SEQ ID NO: 69422 - protein, 489 aa, Arabidopsis thaliana
  peptide (1)..(489): Ceres Seq. ID no. 1814281
  misc_feature (209)..(463): Pfam Name: Protein of unknown function, DUF604 Pfam Description: Protein of unknown function, DUF604
  misc_feature (1)..(489): Homolog of NCBI NO: 15233347 NR Description: putative protein; protein id: At4g11350.1
  misc_feature (1)..(486): Homolog of NCBI NO: 7485555 NR Description: hypothetical protein F16G20.190 - Arabidopsis >gi|3451074|emb|CAA20470.1| putative protein [Arabidopsis >gi|7269197|emb|CAB79304.1| putative protein [Arabidopsis
  misc_feature (87)..(489): Homolog of NCBI NO: 18416156 NR Description: Expressed protein; protein id: At4g23490.1, by cDNA: gi_15529152 [Arabidopsis thaliana]
  misc_feature (87)..(489): Homolog of NCBI NO: 15529153 NR Description: AT4g23490/F16G20_190 [Arabidopsis thaliana]
  misc_feature (81)..(488): Homolog of NCBI NO: 15238082 NR Description: putative protein; protein id: At5g41460.1 thaliana] >gi|9758054|dbj|BAB08517.1|
  misc_feature (1)..(56): Homolog of NCBI NO: 15238082 NR Description: putative protein; protein id: At5g41460.1 thaliana] >gi|9758054|dbj|BAB08517.1|
  misc_feature (193)..(487): Homolog of NCBI NO: 25336194 NR Description: F22L4.11 protein - Arabidopsis thaliana Contains similarity to a hypothetical protein F16G20.190
  misc_feature (32)..(199): Homolog of NCBI NO: 25336194 NR Description: F22L4.11 protein - Arabidopsis thaliana Contains similarity to a hypothetical protein F16G20.190
  misc_feature (193)..(487): Homolog of NCBI NO: 15223433 NR Description: hypothetical protein; protein id: At1g01570.1
  misc_feature (30)..(199): Homolog of NCBI NO: 15223433 NR Description: hypothetical protein; protein id: At1g01570.1
MKGNQKDSSEKPIWDRSSSGISMTRPGRLIIWLILFISVTYIIYTLKIVSTTHPCEDLTSESILQQRPEKKAVTVTVKAVPAEQEATDLNHVVFGIAASSKLWKQRKEYIKIWYKPKKMRGYVWLDEEVKIKSETGDQESLPSVRISGDTSSFPYTNKQGHRSAIRISRIVSETLMSLDSESKKNVRWFVMGDDDTMYYIGSLSESHLQNIIFSYGMAYGGGGFAISYPLAVALSKMQDQCIQRYPALYGSDDRMQACMAELGVPLTKEIGFHQYDVHGNLFGLLAAHPITPFVSMHHLDVVEPIFPNMTRVRAIKKLTTPMKIDSAALLQQSICYDKHKSWTISVSWGFAVQVFRGSFSPREMEMPSRTFLNWYKRADYTAYAFNTRPVSRNHCQKPFVFHMSSAKFDPQLNTTVSEYTRHRVPQPACRWDMANPEEINTIVVYKKPDPHLWNRSPRRNCCRVLQTKRNNTLWINVGVCRAGEVTEVK

SEQ ID NO: 69423 - protein, 467 aa, Arabidopsis thaliana
  peptide (1)..(467): Ceres Seq. ID no. 1814282
  misc_feature (187)..(441): Pfam Name: Protein of unknown function, DUF604 Pfam Description: Protein of unknown function, DUF604
  misc_feature (65)..(467): Homolog of NCBI NO: 18416156 NR Description: Expressed protein; protein id: At4g23490.1, by cDNA: gi_15529152 [Arabidopsis thaliana]
  misc_feature (65)..(467): Homolog of NCBI NO: 15529153 NR Description: AT4g23490/F16G20_190 [Arabidopsis thaliana]
  misc_feature (59)..(466): Homolog of NCBI NO: 15238082 NR Description: putative protein; protein id: At5g41460.1 thaliana] >gi|9758054|dbj|BAB08517.1|
  misc_feature (1)..(34): Homolog of NCBI NO: 15238082 NR Description: putative protein; protein id: At5g41460.1 thaliana] >gi|9758054|dbj|BAB08517.1|
  misc_feature (1)..(467): Homolog of NCBI NO: 15233347 NR Description: putative protein; protein id: At4g11350.1
  misc_feature (1)..(464): Homolog of NCBI NO: 7485555 NR Description: hypothetical protein F16G20.190 - Arabidopsis >gi|3451074|emb|CAA20470.1| putative protein [Arabidopsis >gi|7269197|emb|CAB79304.1| putative protein [Arabidopsis
  misc_feature (171)..(465): Homolog of NCBI NO: 25336194 NR Description: F22L4.11 protein - Arabidopsis thaliana Contains similarity to a hypothetical protein F16G20.190
  misc_feature (10)..(177): Homolog of NCBI NO: 25336194 NR Description: F22L4.11 protein - Arabidopsis thaliana Contains similarity to a hypothetical protein F16G20.190
  misc_feature (171)..(465): Homolog of NCBI NO: 15223433 NR Description: hypothetical protein; protein id: At1g01570.1
  misc_feature (8)..(177): Homolog of NCBI NO: 15223433 NR Description: hypothetical protein; protein id: At1g01570.1
MTRPGRLIIWLILFISVTYIIYTLKIVSTTHPCEDLTSESILQQRPEKKAVTVTVKAVPAEQEATDLNHVVFGIAASSKLWKQRKEYIKIWYKPKKMRGYVWLDEEVKIKSETGDQESLPSVRISGDTSSFPYTNKQGHRSAIRISRIVSETLMSLDSESKKNVRWFVMGDDDTMYYIGSLSESHLQNIIFSYGMAYGGGGFAISYPLAVALSKMQDQCIQRYPALYGSDDRMQACMAELGVPLTKEIGFHQYDVHGNLFGLLAAHPITPFVSMHHLDVVEPIFPNMTRVRAIKKLTTPMKIDSAALLQQSICYDKHKSWTISVSWGFAVQVFRGSFSPREMEMPSRTFLNWYKRADYTAYAFNTRPVSRNHCQKPFVFHMSSAKFDPQLNTTVSEYTRHRVPQPACRWDMANPEEINTIVVYKKPDPHLWNRSPRRNCCRVLQTKRNNTLWINVGVCRAGEVTEVK

SEQ ID NO: 69424 - protein, 371 aa, Arabidopsis thaliana
  peptide (1)..(371): Ceres Seq. ID no. 1814283
  misc_feature (91)..(345): Pfam Name: Protein of unknown function, DUF604 Pfam Description: Protein of unknown function, DUF604
  misc_feature (1)..(371): Homolog of NCBI NO: 15233347 NR Description: putative protein; protein id: At4g11350.1
  misc_feature (1)..(368): Homolog of NCBI NO: 7485555 NR Description: hypothetical protein F16G20.190 - Arabidopsis >gi|3451074|emb|CAA20470.1| putative protein [Arabidopsis >gi|7269197|emb|CAB79304.1| putative protein [Arabidopsis
  misc_feature (1)..(371): Homolog of NCBI NO: 18416156 NR Description: Expressed protein; protein id: At4g23490.1, by cDNA: gi_15529152 [Arabidopsis thaliana]
  misc_feature (1)..(371): Homolog of NCBI NO: 15529153 NR Description: AT4g23490/F16G20_190 [Arabidopsis thaliana]
  misc_feature (1)..(370): Homolog of NCBI NO: 15238082 NR Description: putative protein; protein id: At5g41460.1 thaliana] >gi|9758054|dbj|BAB08517.1|
  misc_feature (75)..(369): Homolog of NCBI NO: 25336194 NR Description: F22L4.11 protein - Arabidopsis thaliana Contains similarity to a hypothetical protein F16G20.190
  misc_feature (1)..(81): Homolog of NCBI NO: 25336194 NR Description: F22L4.11 protein - Arabidopsis thaliana Contains similarity to a hypothetical protein F16G20.190
  misc_feature (75)..(369): Homolog of NCBI NO: 15223433 NR Description: hypothetical protein; protein id: At1g01570.1
  misc_feature (1)..(81): Homolog of NCBI NO: 15223433 NR Description: hypothetical protein; protein id: At1g01570.1
  misc_feature (1)..(370): Homolog of NCBI NO: 32488507 NR Description: OSJNBa0011J08.14 [Oryza sativa (japonica
MRGYVWLDEEVKIKSETGDQESLPSVRISGDTSSFPYTNKQGHRSAIRISRIVSETLMSLDSESKKNVRWFVMGDDDTMYYIGSLSESHLQNIIFSYGMAYGGGGFAISYPLAVALSKMQDQCIQRYPALYGSDDRMQACMAELGVPLTKEIGFHQYDVHGNLFGLLAAHPITPFVSMHHLDVVEPIFPNMTRVRAIKKLTTPMKIDSAALLQQSICYDKHKSWTISVSWGFAVQVFRGSFSPREMEMPSRTFLNWYKRADYTAYAFNTRPVSRNHCQKPFVFHMSSAKFDPQLNTTVSEYTRHRVPQPACRWDMANPEEINTIVVYKKPDPHLWNRSPRRNCCRVLQTKRNNTLWINVGVCRAGEVTEVK

SEQ ID NO: 69425 - DNA, 2829 bp, Arabidopsis thaliana
  misc_feature (1)..(2829): Ceres Seq. ID no. 1814302
  misc_feature: MA Experiment ID: 20000439 Result: Up-regulated in Transcription
  misc_feature: MA Experiment 20000439 PARAMETER Experiment Name: At_Roots__P Parameter: Age (day) Value: 14 vs. 21
  misc_feature: MA Experiment 20000439 PARAMETER Experiment Name: At_Roots__P Parameter: Organism Value: A. thaliana
  misc_feature: MA Experiment 20000439 PARAMETER Experiment Name: At_Roots__P Parameter: Tissue Value: Roots vs. Whole Plant
atgtcaatgtcattttccggcgggactcacaacgatcgttggggctccgatttagcttccgccggagaattcacccaaagctttccatccttaccagcaacatactcaccctcaccctcctcctcctcctcctccggcgaagagctcctagaagtaacaatcgaattcccaagcggcgtaataataaacatcgactccgttaccggaaccggcaccgatatttcaggtaccgatctagagatcacctcttgctcggattccggttcaggatcaaggtcgcttagcttaggatggagcgcgtcgtcggagagactgacggcggggacgaactcaaagcagcagatccagaagatctcacggcgtggttacggttattcgtctcggtctgcaccggaaccggtggttccacacagaggcgaaattaccgattcggttaatctccctcgagctttatctcagcgaccaactagacctaatcgggatggatcgggtacagagagagcgattcatggtttgaaattcataagcagcaaagaaaatggaatcgttgattggaacgatgttcaaaacaatttcgctcatctttctaaagatggttatcttttcaaaagtgattttgctcattgcataggtttggagaatgaaaattccaaagagtttgcagacgagttgttcgacgcattgtgtaggagaagaagaataatggttgataagatcaatcttcaagaattatacgagttttggtaccaaattacagacgaaagcttcgattctcgtcttcaaatcttcttcaacatgtattgttatcaattatcatcaaatcttgttaaacatattgatcaacatattattatactaagtgcatcggcaaataatctatcgaggttgcgagaacgagcagaggaatatgccgcactgatcatggaagaacttgcaccagatggactctattctcagtacatagagttaaaggacctagagatactgctactagagaaggacatatctcatagttacagcctaccgttcagccagacgagccgagccttaagccagaacctaaaggatagaagatggagaatgagcagaaacttgctttactctttgcaagataattggaagaggatttgggttttgacattgtggtttgtgatcatggcctggttatttatgtggaaatgctatcagtacaaacacaaagacgcattccatgtaatgggttactgccttgtcatggcaaaaggcgcagctgagacactgaaattcaacatggctcttattcttttgccggtctgtagaaataccatcacctatctcagatccaccgctttgtcccactcagtgcctttcgatgactgcattaattttcacaagacgatctctgtagcaatcattagtgcaatgcttcttcatgcaaccagccacctcgcctgtgacttcccaaggattctagcatctactgatacagattacaaaagatacttggttaagtactttggtgtgaccagacccacatactttggtttggtgaatactcctgtgggaatcactggaattataatggttgcttttatgttaattgcattcacattagccagtagaagatgcaggcggaacttaactaagttgccgaagccatttgacaaactaaccggatataatgccttctggtattcacatcacttacttctaactgtttacgtccttttagtcatccacggtgtttccctctatctcgagcataaatggtaccgcaaaacggtatggatgtatcttgctgtaccagttttactctatgttggtgagaggatctttagatttttccgttccaggctttacacagtcgaaatctgtaaggttgtaatttatcccggaaacgttgttgtgctacgcatgtctaagcctacatcatttgattacaagagtggacaatatgtatttgttcagtgtccatcagtatcaaaatttgagtggcatccattttctattacttcttcccctggagatgattatctcagcattcacattcgtcagcgcggtgattggacagaagggattaagaaggcattctcagtggtatgtcatgcccctgaagctggaaaaagcggacttctcagagcagatgtaccaaaccaaagaagttttccagagctgttgatagatggaccttatggcgctccagcgcaagaccattggaagtatgatgtggtattactggttggccttggaatcggcgcaacacctttcgttagcattttgagagatctactcaataacattattaagcaacaggaacaagctgaatgcatctcaggtagttgtagtaacagcaacatctcgtcggatcacagtttcagttgcttaaactcagaagctgcgagtcggattccgcaaactcaacggaagacgctgaataccaagaatgcttacttttactgggtaacacgagaacaaggctcgttcgattggttcaaagaaatcatgaacgagattgctgattcagatagaaagggtgttattgagatgcacaactacttgactagcgtctacgaagaaggagatactcgatccaatcttctcactatgatccaaacgttaaaccatgccaaaaatggcgtcgacattttttcaggaaccaaggtaaggacacattttgggaggccaaaatggaagaaagttttatcaaagattagcaccaaacataggaacgcaagaattggagtgttctattgtggagttccaagtttggggaaggaactttcaacactctgccatgaatttaaccagacgggaattaccaggttcgatttccacaaagaacagttctaa

SEQ ID NO: 69426 - protein, 942 aa, Arabidopsis thaliana
  peptide (1)..(942): Ceres Seq. ID no. 1814303
  misc_feature (406)..(941): Pfam Name: Ferric reductase like transmembrane component Pfam Description: Ferric reductase like transmembrane component
  misc_feature (45)..(942): Homolog of NCBI NO: 28268678 NR Description: respiratory burst oxidase homolog [Nicotiana
  misc_feature (55)..(942): Homolog of NCBI NO: 17384016 NR Description: NADPH oxidase [Nicotiana tabacum]
  misc_feature (65)..(942): Homolog of NCBI NO: 16549087 NR Description: respiratory burst oxidase homolog [Solanum
  misc_feature (11)..(942): Homolog of NCBI NO: 18407959 NR Description: cytochrome b245 beta chain homolog RbohAp108, protein id: At1g64060.1, supported by cDNA: gi_2654867, supported
  misc_feature (11)..(942): Homolog of NCBI NO: 3242456 NR Description: Atrboh F [Arabidopsis thaliana]
  misc_feature (11)..(846): Homolog of NCBI NO: 25354658 NR Description: protein F22C12.18 [imported] - Arabidopsis >gi|6692109|gb|AAF24574.1|AC007764_16 F22C12.18 [Arabidopsis
  misc_feature (837)..(942): Homolog of NCBI NO: 25354658 NR Description: protein F22C12.18 [imported] - Arabidopsis >gi|6692109|gb|AAF24574.1|AC007764_16 F22C12.18 [Arabidopsis
  misc_feature (7)..(942): Homolog of NCBI NO: 34910200 NR Description: cytochrome b245 beta chain homolog rbohA [Oryza
  misc_feature (215)..(942): Homolog of NCBI NO: 4585142 NR Description: NADPH oxidase; gp91; phox homolog [Lycopersicon
  misc_feature (11)..(942): Homolog of NCBI NO: 18389310 NR Description: respiratory burst oxidase protein F [Solanum
MSMSFSGGTHNDRWGSDLASAGEFTQSFPSLPATYSPSPSSSSSSGEELLEVTIEFPSGVIINIDSVTGTGTDISGTDLEITSCSDSGSGSRSLSLGWSASSERLTAGTNSKQQIQKISRRGYGYSSRSAPEPVVPHRGEITDSVNLPRALSQRPTRPNRDGSGTERAIHGLKFISSKENGIVDWNDVQNNFAHLSKDGYLFKSDFAHCIGLENENSKEFADELFDALCRRRRIMVDKINLQELYEFWYQITDESFDSRLQIFFNMYCYQLSSNLVKHIDQHIIILSASANNLSRLRERAEEYAALIMEELAPDGLYSQYIELKDLEILLLEKDISHSYSLPFSQTSRALSQNLKDRRWRMSRNLLYSLQDNWKRIWVLTLWFVIMAWLFMWKCYQYKHKDAFHVMGYCLVMAKGAAETLKFNMALILLPVCRNTITYLRSTALSHSVPFDDCINFHKTISVAIISAMLLHATSHLACDFPRILASTDTDYKRYLVKYFGVTRPTYFGLVNTPVGITGIIMVAFMLIAFTLASRRCRRNLTKLPKPFDKLTGYNAFWYSHHLLLTVYVLLVIHGVSLYLEHKWYRKTVWMYLAVPVLLYVGERIFRFFRSRLYTVEICKVVIYPGNVVVLRMSKPTSFDYKSGQYVFVQCPSVSKFEWHPFSITSSPGDDYLSIHIRQRGDWTEGIKKAFSVVCHAPEAGKSGLLRADVPNQRSFPELLIDGPYGAPAQDHWKYDVVLLVGLGIGATPFVSILRDLLNNIIKQQEQAECISGSCSNSNISSDHSFSCLNSEAASRIPQTQRKTLNTKNAYFYWVTREQGSFDWFKEIMNEIADSDRKGVIEMHNYLTSVYEEGDTRSNLLTMIQTLNHAKNGVDIFSGTKVRTHFGRPKWKKVLSKISTKHRNARIGVFYCGVPSLGKELSTLCHEFNQTGITRFDFHKEQF

SEQ ID NO: 69427 - protein, 940 aa, Arabidopsis thaliana
  peptide (1)..(940): Ceres Seq. ID no. 1814304
  misc_feature (404)..(939): Pfam Name: Ferric reductase like transmembrane component Pfam Description: Ferric reductase like transmembrane component
  misc_feature (43)..(940): Homolog of NCBI NO: 28268678 NR Description: respiratory burst oxidase homolog [Nicotiana
  misc_feature (53)..(940): Homolog of NCBI NO: 17384016 NR Description: NADPH oxidase [Nicotiana tabacum]
  misc_feature (63)..(940): Homolog of NCBI NO: 16549087 NR Description: respiratory burst oxidase homolog [Solanum
  misc_feature (9)..(940): Homolog of NCBI NO: 18407959 NR Description: cytochrome b245 beta chain homolog RbohAp108, protein id: At1g64060.1, supported by cDNA: gi_2654867, supported
  misc_feature (9)..(940): Homolog of NCBI NO: 3242456 NR Description: Atrboh F [Arabidopsis thaliana]
  misc_feature (9)..(844): Homolog of NCBI NO: 25354658 NR Description: protein F22C12.18 [imported] - Arabidopsis >gi|6692109|gb|AAF24574.1|AC007764_16 F22C12.18 [Arabidopsis
  misc_feature (835)..(940): Homolog of NCBI NO: 25354658 NR Description: protein F22C12.18 [imported] - Arabidopsis >gi|6692109|gb|AAF24574.1|AC007764_16 F22C12.18 [Arabidopsis
  misc_feature (5)..(940): Homolog of NCBI NO: 34910200 NR Description: cytochrome b245 beta chain homolog rbohA [Oryza
  misc_feature (213)..(940): Homolog of NCBI NO: 4585142 NR Description: NADPH oxidase; gp91; phox homolog [Lycopersicon
  misc_feature (9)..(940): Homolog of NCBI NO: 18389310 NR Description: respiratory burst oxidase protein F [Solanum
MSFSGGTHNDRWGSDLASAGEFTQSFPSLPATYSPSPSSSSSSGEELLEVTIEFPSGVIINIDSVTGTGTDISGTDLEITSCSDSGSGSRSLSLGWSASSERLTAGTNSKQQIQKISRRGYGYSSRSAPEPVVPHRGEITDSVNLPRALSQRPTRPNRDGSGTERAIHGLKFISSKENGIVDWNDVQNNFAHLSKDGYLFKSDFAHCIGLENENSKEFADELFDALCRRRRIMVDKINLQELYEFWYQITDESFDSRLQIFFNMYCYQLSSNLVKHIDQHIIILSASANNLSRLRERAEEYAALIMEELAPDGLYSQYIELKDLEILLLEKDISHSYSLPFSQTSRALSQNLKDRRWRMSRNLLYSLQDNWKRIWVLTLWFVIMAWLFMWKCYQYKHKDAFHVMGYCLVMAKGAAETLKFNMALILLPVCRNTITYLRSTALSHSVPFDDCINFHKTISVAIISAMLLHATSHLACDFPRILASTDTDYKRYLVKYFGVTRPTYFGLVNTPVGITGIIMVAFMLIAFTLASRRCRRNLTKLPKPFDKLTGYNAFWYSHHLLLTVYVLLVIHGVSLYLEHKWYRKTVWMYLAVPVLLYVGERIFRFFRSRLYTVEICKVVIYPGNVVVLRMSKPTSFDYKSGQYVFVQCPSVSKFEWHPFSITSSPGDDYLSIHIRQRGDWTEGIKKAFSVVCHAPEAGKSGLLRADVPNQRSFPELLIDGPYGAPAQDHWKYDVVLLVGLGIGATPFVSILRDLLNNIIKQQEQAECISGSCSNSNISSDHSFSCLNSEAASRIPQTQRKTLNTKNAYFYWVTREQGSFDWFKEIMNEIADSDRKGVIEMHNYLTSVYEEGDTRSNLLTMIQTLNHAKNGVDIFSGTKVRTHFGRPKWKKVLSKISTKHRNARIGVFYCGVPSLGKELSTLCHEFNQTGITRFDFHKEQF

SEQ ID NO: 69428 - protein, 708 aa, Arabidopsis thaliana
  peptide (1)..(708): Ceres Seq. ID no. 1814305
  misc_feature (172)..(707): Pfam Name: Ferric reductase like transmembrane component Pfam Description: Ferric reductase like transmembrane component
  misc_feature (1)..(708): Homolog of NCBI NO: 28268678 NR Description: respiratory burst oxidase homolog [Nicotiana
  misc_feature (1)..(708): Homolog of NCBI NO: 17384016 NR Description: NADPH oxidase [Nicotiana tabacum]
  misc_feature (1)..(708): Homolog of NCBI NO: 16549087 NR Description: respiratory burst oxidase homolog [Solanum
  misc_feature (1)..(708): Homolog of NCBI NO: 18407959 NR Description: cytochrome b245 beta chain homolog RbohAp108, protein id: At1g64060.1, supported by cDNA: gi_2654867, supported
  misc_feature (1)..(708): Homolog of NCBI NO: 3242456 NR Description: Atrboh F [Arabidopsis thaliana]
  misc_feature (1)..(612): Homolog of NCBI NO: 25354658 NR Description: protein F22C12.18 [imported] - Arabidopsis >gi|6692109|gb|AAF24574.1|AC007764_16 F22C12.18 [Arabidopsis
  misc_feature (603)..(708): Homolog of NCBI NO: 25354658 NR Description: protein F22C12.18 [imported] - Arabidopsis >gi|6692109|gb|AAF24574.1|AC007764_16 F22C12.18 [Arabidopsis
  misc_feature (1)..(708): Homolog of NCBI NO: 34910200 NR Description: cytochrome b245 beta chain homolog rbohA [Oryza
  misc_feature (1)..(708): Homolog of NCBI NO: 4585142 NR Description: NADPH oxidase; gp91; phox homolog [Lycopersicon
  misc_feature (1)..(708): Homolog of NCBI NO: 18389310 NR Description: respiratory burst oxidase protein F [Solanum
MVDKINLQELYEFWYQITDESFDSRLQIFFNMYCYQLSSNLVKHIDQHIIILSASANNLSRLRERAEEYAALIMEELAPDGLYSQYIELKDLEILLLEKDISHSYSLPFSQTSRALSQNLKDRRWRMSRNLLYSLQDNWKRIWVLTLWFVIMAWLFMWKCYQYKHKDAFHVMGYCLVMAKGAAETLKFNMALILLPVCRNTITYLRSTALSHSVPFDDCINFHKTISVAIISAMLLHATSHLACDFPRILASTDTDYKRYLVKYFGVTRPTYFGLVNTPVGITGIIMVAFMLIAFTLASRRCRRNLTKLPKPFDKLTGYNAFWYSHHLLLTVYVLLVIHGVSLYLEHKWYRKTVWMYLAVPVLLYVGERIFRFFRSRLYTVEICKVVIYPGNVVVLRMSKPTSFDYKSGQYVFVQCPSVSKFEWHPFSITSSPGDDYLSIHIRQRGDWTEGIKKAFSVVCHAPEAGKSGLLRADVPNQRSFPELLIDGPYGAPAQDHWKYDVVLLVGLGIGATPFVSILRDLLNNIIKQQEQAECISGSCSNSNISSDHSFSCLNSEAASRIPQTQRKTLNTKNAYFYWVTREQGSFDWFKEIMNEIADSDRKGVIEMHNYLTSVYEEGDTRSNLLTMIQTLNHAKNGVDIFSGTKVRTHFGRPKWKKVLSKISTKHRNARIGVFYCGVPSLGKELSTLCHEFNQTGITRFDFHKEQF

SEQ ID NO: 69429 - DNA, 1191 bp, Arabidopsis thaliana
  misc_feature (1)..(1191): Ceres Seq. ID no. 1814454
  misc_feature: MA Experiment ID: 20000355 Result: Up-regulated in Transcription
  misc_feature: MA Experiment 20000355 PARAMETER Experiment Name: At_Siliques_Sub_P Parameter: Age (day) Value: 21
  misc_feature: MA Experiment 20000355 PARAMETER Experiment Name: At_Siliques_Sub_P Parameter: Organism Value: A. thaliana
  misc_feature: MA Experiment 20000355 PARAMETER Experiment Name: At_Siliques_Sub_P Parameter: Plant Line Value: WS
  misc_feature: MA Experiment 20000355 PARAMETER Experiment Name: At_Siliques_Sub_P Parameter: Tissue Value: Less Than 5mm Siliques vs. Whole Plant
atggaagtgatatggatgttcttaatctgttgcatctttggtatcataattataagtcatagcaatgactttgtcgaagctaagagcctttctaaagttgaagatttagaaatcgagaagagactaaggactatcaacaaacctgctgtcaagatcatcaaggttttaatatatcttcataaccatgttattgttctctatatattatacaatttaagtatagatggagaaagatacggatgtgtggatttcttcaagcaaccagcatttgatcacccttcaatgaagaatcacacataccattacaagatgcgtccaatatggaaaggaatgagagaaagaaagacaaacaataccaattttggttacctatgggagaatggtgtgggttgtcccattggtaccgtccccatgcaaagagtcactaaagaagatctattgagattagactcatttggcgataattataaacctcgtggctcttggaattataccactgatgattctaatagtaacaaccagaaacattttgcggtggctcggacggttggctcagacaagaggttcaatggagcaacaatggatctttgtttaaccgctcctaaggttaggctaaaccaatacagtgcttctcgacttcacattcagattggaaatgatttcctccaaaccggctttacttcaggtgaaaaatcatgttacaatagctactgcgacgttggaatgatacttgttcgtcaagatattccacttggtatggcattatcgccagtgtctgttcgtggtgctaggacaactcattatggagtcttcggtctaattaaggaccaaataaatggaaattggtggttgcaatttggtaatgctgcagaggaaattggattttggccgtcgagtaggtttcatcaaagctctggaaatttggtggagtggggtggagaagtgtacagcgcatcactgccgagtcctcaaatgggatttgggtattttgttgatggtcaaatgcgctacgatgcatatatcaaacggatatctgtaatcgacggttttaataagattgaccgcaaagtggcatataccgaaaaatttgtggacgacactcgtggctaccaagttatagacaaatacaatattcccggatactcaatactcggtcatataatgttttacggtggtccggggaatctctga

SEQ ID NO: 69430 - protein, 396 aa, Arabidopsis thaliana
  peptide (1)..(396): Ceres Seq. ID no. 1814455
  misc_feature (189)..(354): Pfam Name: Arabidopsis proteins of unknown function Pfam Description: Arabidopsis proteins of unknown function
  misc_feature (1)..(396): Homolog of NCBI NO: 7485045 NR Description: hypothetical protein - Arabidopsis thaliana hypothetical protein [Arabidopsis thaliana]
  misc_feature (228)..(396): Homolog of NCBI NO: 30683101 NR Description: expressed protein [Arabidopsis thaliana]
  misc_feature (73)..(227): Homolog of NCBI NO: 30683101 NR Description: expressed protein [Arabidopsis thaliana]
  misc_feature (1)..(54): Homolog of NCBI NO: 30683101 NR Description: expressed protein [Arabidopsis thaliana]
  misc_feature (1)..(227): Homolog of NCBI NO: 25345694 NR Description: protein F14N23.7 [imported] - Arabidopsis >gi|4914321|gb|AAD32869.1|AC005489_7 F14N23.7 [Arabidopsis
  misc_feature (228)..(396): Homolog of NCBI NO: 25345694 NR Description: protein F14N23.7 [imported] - Arabidopsis >gi|4914321|gb|AAD32869.1|AC005489_7 F14N23.7 [Arabidopsis
  misc_feature (228)..(396): Homolog of NCBI NO: 15218449 NR Description: unknown protein; protein id: At1g10190.1, by cDNA: gi_18175986 [Arabidopsis thaliana] unknown protein [Arabidopsis thaliana]
  misc_feature (73)..(227): Homolog of NCBI NO: 15218449 NR Description: unknown protein; protein id: At1g10190.1, by cDNA: gi_18175986 [Arabidopsis thaliana] unknown protein [Arabidopsis thaliana]
  misc_feature (1)..(54): Homolog of NCBI NO: 15218449 NR Description: unknown protein; protein id: At1g10190.1, by cDNA: gi_18175986 [Arabidopsis thaliana] unknown protein [Arabidopsis thaliana]
  misc_feature (228)..(396): Homolog of NCBI NO: 22328636 NR Description: similar to putative carboxyl-terminal peptidase;
MEVIWMFLICCIFGIIIISHSNDFVEAKSLSKVEDLEIEKRLRTINKPAVKIIKVLIYLHNHVIVLYILYNLSIDGERYGCVDFFKQPAFDHPSMKNHTYHYKMRPIWKGMRERKTNNTNFGYLWENGVGCPIGTVPMQRVTKEDLLRLDSFGDNYKPRGSWNYTTDDSNSNNQKHFAVARTVGSDKRFNGATMDLCLTAPKVRLNQYSASRLHIQIGNDFLQTGFTSGEKSCYNSYCDVGMILVRQDIPLGMALSPVSVRGARTTHYGVFGLIKDQINGNWWLQFGNAAEEIGFWPSSRFHQSSGNLVEWGGEVYSASLPSPQMGFGYFVDGQMRYDAYIKRISVIDGFNKIDRKVAYTEKFVDDTRGYQVIDKYNIPGYSILGHIMFYGGPGNL

SEQ ID NO: 69431 - protein, 391 aa, Arabidopsis thaliana
  peptide (1)..(391): Ceres Seq. ID no. 1814456
  misc_feature (184)..(349): Pfam Name: Arabidopsis proteins of unknown function Pfam Description: Arabidopsis proteins of unknown function
  misc_feature (1)..(391): Homolog of NCBI NO: 7485045 NR Description: hypothetical protein - Arabidopsis thaliana hypothetical protein [Arabidopsis thaliana]
  misc_feature (223)..(391): Homolog of NCBI NO: 30683101 NR Description: expressed protein [Arabidopsis thaliana]
  misc_feature (68)..(222): Homolog of NCBI NO: 30683101 NR Description: expressed protein [Arabidopsis thaliana]
  misc_feature (1)..(49): Homolog of NCBI NO: 30683101 NR Description: expressed protein [Arabidopsis thaliana]
  misc_feature (1)..(222): Homolog of NCBI NO: 25345694 NR Description: protein F14N23.7 [imported] - Arabidopsis >gi|4914321|gb|AAD32869.1|AC005489_7 F14N23.7 [Arabidopsis
  misc_feature (223)..(391): Homolog of NCBI NO: 25345694 NR Description: protein F14N23.7 [imported] - Arabidopsis >gi|4914321|gb|AAD32869.1|AC005489_7 F14N23.7 [Arabidopsis
  misc_feature (223)..(391): Homolog of NCBI NO: 15218449 NR Description: unknown protein; protein id: At1g10190.1, by cDNA: gi_18175986 [Arabidopsis thaliana] unknown protein [Arabidopsis thaliana]
  misc_feature (68)..(222): Homolog of NCBI NO: 15218449 NR Description: unknown protein; protein id: At1g10190.1, by cDNA: gi_18175986 [Arabidopsis thaliana] unknown protein [Arabidopsis thaliana]
  misc_feature (1)..(49): Homolog of NCBI NO: 15218449 NR Description: unknown protein; protein id: At1g10190.1, by cDNA: gi_18175986 [Arabidopsis thaliana] unknown protein [Arabidopsis thaliana]
  misc_feature (223)..(391): Homolog of NCBI NO: 22328636 NR Description: similar to putative carboxyl-terminal peptidase;
MFLICCIFGIIIISHSNDFVEAKSLSKVEDLEIEKRLRTINKPAVKIIKVLIYLHNHVIVLYILYNLSIDGERYGCVDFFKQPAFDHPSMKNHTYHYKMRPIWKGMRERKTNNTNFGYLWENGVGCPIGTVPMQRVTKEDLLRLDSFGDNYKPRGSWNYTTDDSNSNNQKHFAVARTVGSDKRFNGATMDLCLTAPKVRLNQYSASRLHIQIGNDFLQTGFTSGEKSCYNSYCDVGMILVRQDIPLGMALSPVSVRGARTTHYGVFGLIKDQINGNWWLQFGNAAEEIGFWPSSRFHQSSGNLVEWGGEVYSASLPSPQMGFGYFVDGQMRYDAYIKRISVIDGFNKIDRKVAYTEKFVDDTRGYQVIDKYNIPGYSILGHIMFYGGPGNL

SEQ ID NO: 69432 - protein, 302 aa, Arabidopsis thaliana
  peptide (1)..(302): Ceres Seq. ID no. 1814457
  misc_feature (95)..(260): Pfam Name: Arabidopsis proteins of unknown function Pfam Description: Arabidopsis proteins of unknown function
  misc_feature (1)..(302): Homolog of NCBI NO: 7485045 NR Description: hypothetical protein - Arabidopsis thaliana hypothetical protein [Arabidopsis thaliana]
  misc_feature (134)..(302): Homolog of NCBI NO: 30683101 NR Description: expressed protein [Arabidopsis thaliana]
  misc_feature (1)..(133): Homolog of NCBI NO: 30683101 NR Description: expressed protein [Arabidopsis thaliana]
  misc_feature (1)..(133): Homolog of NCBI NO: 25345694 NR Description: protein F14N23.7 [imported] - Arabidopsis >gi|4914321|gb|AAD32869.1|AC005489_7 F14N23.7 [Arabidopsis
  misc_feature (134)..(302): Homolog of NCBI NO: 25345694 NR Description: protein F14N23.7 [imported] - Arabidopsis >gi|4914321|gb|AAD32869.1|AC005489_7 F14N23.7 [Arabidopsis
  misc_feature (134)..(302): Homolog of NCBI NO: 15218449 NR Description: unknown protein; protein id: At1g10190.1, by cDNA: gi_18175986 [Arabidopsis thaliana] unknown protein [Arabidopsis thaliana]
  misc_feature (1)..(133): Homolog of NCBI NO: 15218449 NR Description: unknown protein; protein id: At1g10190.1, by cDNA: gi_18175986 [Arabidopsis thaliana] unknown protein [Arabidopsis thaliana]
  misc_feature (134)..(302): Homolog of NCBI NO: 22328636 NR Description: similar to putative carboxyl-terminal peptidase;
  misc_feature (1)..(133): Homolog of NCBI NO: 22328636 NR Description: similar to putative carboxyl-terminal peptidase;
  misc_feature (1)..(133): Homolog of NCBI NO: 11358466 NR Description: IB1C3-1 protein [imported] - Arabidopsis thaliana
MKNHTYHYKMRPIWKGMRERKTNNTNFGYLWENGVGCPIGTVPMQRVTKEDLLRLDSFGDNYKPRGSWNYTTDDSNSNNQKHFAVARTVGSDKRFNGATMDLCLTAPKVRLNQYSASRLHIQIGNDFLQTGFTSGEKSCYNSYCDVGMILVRQDIPLGMALSPVSVRGARTTHYGVFGLIKDQINGNWWLQFGNAAEEIGFWPSSRFHQSSGNLVEWGGEVYSASLPSPQMGFGYFVDGQMRYDAYIKRISVIDGFNKIDRKVAYTEKFVDDTRGYQVIDKYNIPGYSILGHIMFYGGPGNL

SEQ ID NO: 69433 - DNA, 1764 bp, Arabidopsis thaliana
  misc_feature (1)..(1764): Ceres Seq. ID no. 1814512
  misc_feature: MA Experiment ID: 20000307 Result: Down-regulated in Transcription
  misc_feature: MA Experiment 20000307 PARAMETER Experiment Name: At_Germinating_Seeds_Sub_P Parameter: Age (hr) Value: 24 vs. 0
  misc_feature: MA Experiment 20000307 PARAMETER Experiment Name: At_Germinating_Seeds_Sub_P Parameter: Organism Value: A. thaliana
  misc_feature: MA Experiment 20000307 PARAMETER Experiment Name: At_Germinating_Seeds_Sub_P Parameter: Plant Line Value: WS
  misc_feature: MA Experiment 20000307 PARAMETER Experiment Name: At_Germinating_Seeds_Sub_P Parameter: Tissue Value: Germinating Seeds
atgtactcaaaactcgaccatccggaatcagcccgactcgttctccgactcactcctgcacgaaacgtcgtctcttggacttcacttatctccggacttgctcagaacggtcatttctccaccgctttggttgaattcttcgagatgcgacgagaagctgtggcttctctgcgtttacccgttactgggaagcagattcatgcgcttgctgtgaagtgtggtaggatacttgatgtgtttgttgggtgtagtgcttttgatatgtattgcaaaactaggcttagagatgatgcacggaagttgttcgatgaaattcctgagaggaaccttgaaacttggaatgcttttatatctaactctgtgactgatggaaggcctagggaagctattgaagcgtttattgagtttagaaggattgatgggcacccgaattcgataactttttgtgctttccttaatgcttgttcggattggttacacttgaatctaggaatgcagttacacgggcttgtgttacgaagtgggtttgatacagacgtctctatacgtagcagtgagattatctttactgaaatgggaactaaaaatgctgtttcttggtgttcattggttgctgcatatgtgcagaatcatgaggatgagaaggcgtctgtattatatttacgctcaaggaaggatattgttgagacctctgattttatgatatcaagtgttctgagtgcgtgtgctggtatggctggtcttgagttgggaagatcgatacatgctcacgctgtgaaggcgtgtgttgaaaggactatatttgttggaagtgccctcgttgacatgtatggaaaatgtggatgtatagaagattcagaacaagcgtttgatgagatgcctgagaagaacttagtgactcggaattcattgatcggaggatatgctcatcagggtcaggttgatatggcattggctttatttgaagaaatggcaccacgtggatgtggggctgtggaaaatggtatgaagatatttgattcgatgaggagtacttatggcattgagccaggggctgagcattattcatgcatcgtggacatgctagggcgagcgggaatggtagaacgggcttatgaattcataaagaaaatgccaattcaaccgacaatttcggtttggggtgctcttcagaatgcttgtaggatgcatggtaagccacagctgggattactagcagctgagaaccttttcaaactcgaccctaaggattcaggcaaccacgttctgctttccaatacgtttgcagcggctgggaggtgggcggaagccaacaccgtaagagaggagctgaaaggcgtagggatcaagaaaggagccggatacagttggatcacagtgaagaaccaagtccatgcctttcaagccaaggacagatcccacatactgaacaaagaaattcaaacaacgctggccaagctaaggaacgaaatggaagctgcagggtacaaacccgacctgaaactctcgctttacgatctggaggaagaagaaaaagcagcagaagtctcgcaccacagtgagaaactggctctagcatttggattgttatctttaccactcagtgtcccaatcagaatcaccaagaaccttagaatctgcggagattgccacagcttcttcaagtttgtctctgggagtgttaaacgagagatcattgtgagagacaataaccggtttcatcggtttaaagatgggatatgttcttgtaaggattattggtaa

SEQ ID NO: 69434 - protein, 587 aa, Arabidopsis thaliana
  peptide (1)..(587): Ceres Seq. ID no. 1814513
  misc_feature (146)..(180): Pfam Name: PPR repeat Pfam Description: PPR repeat
  misc_feature (1)..(587): Homolog of NCBI NO: 30683021 NR Description: pentatricopeptide (PPR) repeat-containing protein
  misc_feature (52)..(362): Homolog of NCBI NO: 34365551 NR Description: At4g14850 [Arabidopsis thaliana]
  misc_feature (330)..(587): Homolog of NCBI NO: 34365551 NR Description: At4g14850 [Arabidopsis thaliana]
  misc_feature (1)..(189): Homolog of NCBI NO: 34365551 NR Description: At4g14850 [Arabidopsis thaliana]
  misc_feature (184)..(323): Homolog of NCBI NO: 34365551 NR Description: At4g14850 [Arabidopsis thaliana]
  misc_feature (55)..(369): Homolog of NCBI NO: 15242550 NR Description: selenium-binding protein-like; protein id:
  misc_feature (330)..(587): Homolog of NCBI NO: 15242550 NR Description: selenium-binding protein-like; protein id:
  misc_feature (10)..(91): Homolog of NCBI NO: 15242550 NR Description: selenium-binding protein-like; protein id:
  misc_feature (63)..(349): Homolog of NCBI NO: 34915012 NR Description: P0458A05.10 [Oryza sativa (japonica
  misc_feature (330)..(587): Homolog of NCBI NO: 34915012 NR Description: P0458A05.10 [Oryza sativa (japonica
MYSKLDHPESARLVLRLTPARNVVSWTSLISGLAQNGHFSTALVEFFEMRREAVASLRLPVTGKQIHALAVKCGRILDVFVGCSAFDMYCKTRLRDDARKLFDEIPERNLETWNAFISNSVTDGRPREAIEAFIEFRRIDGHPNSITFCAFLNACSDWLHLNLGMQLHGLVLRSGFDTDVSIRSSEIIFTEMGTKNAVSWCSLVAAYVQNHEDEKASVLYLRSRKDIVETSDFMISSVLSACAGMAGLELGRSIHAHAVKACVERTIFVGSALVDMYGKCGCIEDSEQAFDEMPEKNLVTRNSLIGGYAHQGQVDMALALFEEMAPRGCGAVENGMKIFDSMRSTYGIEPGAEHYSCIVDMLGRAGMVERAYEFIKKMPIQPTISVWGALQNACRMHGKPQLGLLAAENLFKLDPKDSGNHVLLSNTFAAAGRWAEANTVREELKGVGIKKGAGYSWITVKNQVHAFQAKDRSHILNKEIQTTLAKLRNEMEAAGYKPDLKLSLYDLEEEEKAAEVSHHSEKLALAFGLLSLPLSVPIRITKNLRICGDCHSFFKFVSGSVKREIIVRDNNRFHRFKDGICSCKDYW

SEQ ID NO: 69435 - protein, 539 aa, Arabidopsis thaliana
  peptide (1)..(539): Ceres Seq. ID no. 1814514
  misc_feature (98)..(132): Pfam Name: PPR repeat Pfam Description: PPR repeat
  misc_feature (1)..(539): Homolog of NCBI NO: 30683021 NR Description: pentatricopeptide (PPR) repeat-containing protein
  misc_feature (4)..(314): Homolog of NCBI NO: 34365551 NR Description: At4g14850 [Arabidopsis thaliana]
  misc_feature (282)..(539): Homolog of NCBI NO: 34365551 NR Description: At4g14850 [Arabidopsis thaliana]
  misc_feature (1)..(141): Homolog of NCBI NO: 34365551 NR Description: At4g14850 [Arabidopsis thaliana]
  misc_feature (136)..(275): Homolog of NCBI NO: 34365551 NR Description: At4g14850 [Arabidopsis thaliana]
  misc_feature (7)..(321): Homolog of NCBI NO: 15242550 NR Description: selenium-binding protein-like; protein id:
  misc_feature (282)..(539): Homolog of NCBI NO: 15242550 NR Description: selenium-binding protein-like; protein id:
  misc_feature (1)..(43): Homolog of NCBI NO: 15242550 NR Description: selenium-binding protein-like; protein id:
  misc_feature (15)..(301): Homolog of NCBI NO: 34915012 NR Description: P0458A05.10 [Oryza sativa (japonica
  misc_feature (282)..(539): Homolog of NCBI NO: 34915012 NR Description: P0458A05.10 [Oryza sativa (japonica
MRREAVASLRLPVTGKQIHALAVKCGRILDVFVGCSAFDMYCKTRLRDDARKLFDEIPERNLETWNAFISNSVTDGRPREAIEAFIEFRRIDGHPNSITFCAFLNACSDWLHLNLGMQLHGLVLRSGFDTDVSIRSSEIIFTEMGTKNAVSWCSLVAAYVQNHEDEKASVLYLRSRKDIVETSDFMISSVLSACAGMAGLELGRSIHAHAVKACVERTIFVGSALVDMYGKCGCIEDSEQAFDEMPEKNLVTRNSLIGGYAHQGQVDMALALFEEMAPRGCGAVENGMKIFDSMRSTYGIEPGAEHYSCIVDMLGRAGMVERAYEFIKKMPIQPTISVWGALQNACRMHGKPQLGLLAAENLFKLDPKDSGNHVLLSNTFAAAGRWAEANTVREELKGVGIKKGAGYSWITVKNQVHAFQAKDRSHILNKEIQTTLAKLRNEMEAAGYKPDLKLSLYDLEEEEKAAEVSHHSEKLALAFGLLSLPLSVPIRITKNLRICGDCHSFFKFVSGSVKREIIVRDNNRFHRFKDGICSCKDYW

SEQ ID NO: 69436 - protein, 500 aa, Arabidopsis thaliana
  peptide (1)..(500): Ceres Seq. ID no. 1814515
  misc_feature (59)..(93): Pfam Name: PPR repeat Pfam Description: PPR repeat
  misc_feature (243)..(500): Homolog of NCBI NO: 15242550 NR Description: selenium-binding protein-like; protein id:
  misc_feature (1)..(262): Homolog of NCBI NO: 34915012 NR Description: P0458A05.10 [Oryza sativa (japonica
  misc_feature (1)..(500): Homolog of NCBI NO: 30683021 NR Description: pentatricopeptide (PPR) repeat-containing protein
  misc_feature (243)..(500): Homolog of NCBI NO: 34365551 NR Description: At4g14850 [Arabidopsis thaliana]
  misc_feature (97)..(236): Homolog of NCBI NO: 34365551 NR Description: At4g14850 [Arabidopsis thaliana]
  misc_feature (1)..(282): Homolog of NCBI NO: 15242550 NR Description: selenium-binding protein-like; protein id:
  misc_feature (1)..(102): Homolog of NCBI NO: 34365551 NR Description: At4g14850 [Arabidopsis thaliana]
  misc_feature (1)..(275): Homolog of NCBI NO: 34365551 NR Description: At4g14850 [Arabidopsis thaliana]
  misc_feature (243)..(500): Homolog of NCBI NO: 34915012 NR Description: P0458A05.10 [Oryza sativa (japonica
  misc_feature (1)..(241): Homolog of NCBI NO: 34915012 NR Description: P0458A05.10 [Oryza sativa (japonica
MYCKTRLRDDARKLFDEIPERNLETWNAFISNSVTDGRPREAIEAFIEFRRIDGHPNSITFCAFLNACSDWLHLNLGMQLHGLVLRSGFDTDVSIRSSEIIFTEMGTKNAVSWCSLVAAYVQNHEDEKASVLYLRSRKDIVETSDFMISSVLSACAGMAGLELGRSIHAHAVKACVERTIFVGSALVDMYGKCGCIEDSEQAFDEMPEKNLVTRNSLIGGYAHQGQVDMALALFEEMAPRGCGAVENGMKIFDSMRSTYGIEPGAEHYSCIVDMLGRAGMVERAYEFIKKMPIQPTISVWGALQNACRMHGKPQLGLLAAENLFKLDPKDSGNHVLLSNTFAAAGRWAEANTVREELKGVGIKKGAGYSWITVKNQVHAFQAKDRSHILNKEIQTTLAKLRNEMEAAGYKPDLKLSLYDLEEEEKAAEVSHHSEKLALAFGLLSLPLSVPIRITKNLRICGDCHSFFKFVSGSVKREIIVRDNNRFHRFKDGICSCKDYW

SEQ ID NO: 69437 - DNA, 1977 bp, Arabidopsis thaliana
  misc_feature (1)..(1977): Ceres Seq. ID no. 1814536
  misc_feature: MA Experiment ID: 20000180 Result: Up-regulated in Transcription
  misc_feature: MA Experiment 20000180 PARAMETER Experiment Name: At_Germinating_Seeds_P Parameter: Age (hr) Value: 24 vs. 0
  misc_feature: MA Experiment 20000180 PARAMETER Experiment Name: At_Germinating_Seeds_P Parameter: Tissue Value: Germinating Seeds
  misc_feature: MA Experiment ID: 20000234 Result: Up-regulated in Transcription
  misc_feature: MA Experiment 20000234 PARAMETER Experiment Name: At_Siliques_P Parameter: Age (day) Value: 21
  misc_feature: MA Experiment 20000234 PARAMETER Experiment Name: At_Siliques_P Parameter: Organism Value: A. thaliana
  misc_feature: MA Experiment 20000234 PARAMETER Experiment Name: At_Siliques_P Parameter: Plant Line Value: WS
  misc_feature: MA Experiment 20000234 PARAMETER Experiment Name: At_Siliques_P Parameter: Tissue Value: Less Than 5mm Siliques vs. Whole Plant
  misc_feature: MA Experiment ID: 20000264 Result: Up-regulated in Transcription
  misc_feature: MA Experiment 20000264 PARAMETER Experiment Name: At_Open_Flower_P Parameter: Age (day) Value: 21
  misc_feature: MA Experiment 20000264 PARAMETER Experiment Name: At_Open_Flower_P Parameter: Plant Line Value: WS
  misc_feature: MA Experiment 20000264 PARAMETER Experiment Name: At_Open_Flower_P Parameter: Tissue Value: Open Flower vs. Whole Plant
  misc_feature: MA Experiment ID: 20000265 Result: Up-regulated in Transcription
  misc_feature: MA Experiment 20000265 PARAMETER Experiment Name: At_Open_Flower_P Parameter: Age (day) Value: 21
  misc_feature: MA Experiment 20000265 PARAMETER Experiment Name: At_Open_Flower_P Parameter: Plant Line Value: WS
  misc_feature: MA Experiment 20000265 PARAMETER Experiment Name: At_Open_Flower_P Parameter: Tissue Value: Closed Flower vs. Whole Plant
  misc_feature: MA Experiment ID: 20000438 Result: Up-regulated in Transcription
  misc_feature: MA Experiment 20000438 PARAMETER Experiment Name: At_Shoots__P Parameter: Age (day) Value: 14
  misc_feature: MA Experiment 20000438 PARAMETER Experiment Name: At_Shoots__P Parameter: Tissue Value: Shoots vs. Whole Plant
  misc_feature: MA Experiment ID: 20000495 Result: Up-regulated in Transcription
  misc_feature: MA Experiment 20000495 PARAMETER Experiment Name: At_Guard_Cells_P Parameter: Harvest Date Value: 8/2/2002
  misc_feature: MA Experiment 20000495 PARAMETER Experiment Name: At_Guard_Cells_P Parameter: Organism Value: A. thaliana
  misc_feature: MA Experiment 20000495 PARAMETER Experiment Name: At_Guard_Cells_P Parameter: Tissue Value: Guard Cells vs. Leaves
  misc_feature: MA Experiment ID: 20001248 Result: Down-regulated in Transcription
  misc_feature: MA Experiment 20001248 PARAMETER Experiment Name: At_Far-red-induction_P Parameter: Age (day) Value: 7
  misc_feature: MA Experiment 20001248 PARAMETER Experiment Name: At_Far-red-induction_P Parameter: Light Value: Far-red vs. White
  misc_feature: MA Experiment 20001248 PARAMETER Experiment Name: At_Far-red-induction_P Parameter: Organism Value: A. thaliana
  misc_feature: MA Experiment 20001248 PARAMETER Experiment Name: At_Far-red-induction_P Parameter: Plant Line Value: Columbia
  misc_feature: MA Experiment 20001248 PARAMETER Experiment Name: At_Far-red-induction_P Parameter: Timepoint (hr) Value: 4
  misc_feature: MA Experiment 20001248 PARAMETER Experiment Name: At_Far-red-induction_P Parameter: Tissue Value: Whole Plant
  misc_feature: MA Experiment ID: 20001450 Result: Down-regulated in Transcription
  misc_feature: MA Experiment 20001450 PARAMETER Experiment Name: At_Far-red-induction_P Parameter: Age (day) Value: 7
  misc_feature: MA Experiment 20001450 PARAMETER Experiment Name: At_Far-red-induction_P Parameter: Light Value: Far-red vs. White
  misc_feature: MA Experiment 20001450 PARAMETER Experiment Name: At_Far-red-induction_P Parameter: Organism Value: A. thaliana
  misc_feature: MA Experiment 20001450 PARAMETER Experiment Name: At_Far-red-induction_P Parameter: Plant Line Value: Columbia
  misc_feature: MA Experiment 20001450 PARAMETER Experiment Name: At_Far-red-induction_P Parameter: Timepoint (hr) Value: 8
  misc_feature: MA Experiment 20001450 PARAMETER Experiment Name: At_Far-red-induction_P Parameter: Tissue Value: Whole Plant
  misc_feature: MA Experiment ID: 20001906 Result: Up-regulated in Transcription
  misc_feature: MA Experiment 20001906 PARAMETER Experiment Name: At_Drought_Reproduction_P Parameter: Age (day) Value: 35
  misc_feature: MA Experiment 20001906 PARAMETER Experiment Name: At_Drought_Reproduction_P Parameter: Organism Value: A. thaliana
  misc_feature: MA Experiment 20001906 PARAMETER Experiment Name: At_Drought_Reproduction_P Parameter: Plant Line Value: WS
  misc_feature: MA Experiment 20001906 PARAMETER Experiment Name: At_Drought_Reproduction_P Parameter: Timepoint (day) Value: 5
  misc_feature: MA Experiment 20001906 PARAMETER Experiment Name: At_Drought_Reproduction_P Parameter: Tissue Value: Siliques
  misc_feature: MA Experiment 20001906 PARAMETER Experiment Name: At_Drought_Reproduction_P Parameter: Treatment Value: Drought vs. No Drought
  misc_feature: MA Experiment ID: 20001911 Result: Down-regulated in Transcription
  misc_feature: MA Experiment 20001911 PARAMETER Experiment Name: At_Drought_Reproduction_P Parameter: Age (day) Value: 40
  misc_feature: MA Experiment 20001911 PARAMETER Experiment Name: At_Drought_Reproduction_P Parameter: Organism Value: A. thaliana
  misc_feature: MA Experiment 20001911 PARAMETER Experiment Name: At_Drought_Reproduction_P Parameter: Plant Line Value: WS
  misc_feature: MA Experiment 20001911 PARAMETER Experiment Name: At_Drought_Reproduction_P Parameter: Timepoint (day) Value: 10
  misc_feature: MA Experiment 20001911 PARAMETER Experiment Name: At_Drought_Reproduction_P Parameter: Tissue Value: Flowers
  misc_feature: MA Experiment 20001911 PARAMETER Experiment Name: At_Drought_Reproduction_P Parameter: Treatment Value: Drought vs. No Drought
atggatacccctcagaagagtattactcagatcggaactccaatttccaaatccagattcgaggattctccagtgttcaattacataaacagtttgtctccaataagaccagtcagatccataccaaatcctaaccaatttagctctctgaatttcacttcccctccctctgttttcacttcacctcacctaacttcttctcacaaagaatccagattcttcaaaactcacaactcttcttcttctgatcctaccaattccgttgaatctcaagaagacgagtctacttctcatgaagaagttccagcagaaggagaagatacaaaaggtcttaacatagatgattgcatgcgagaagaagcttcagttgaaacgaatcttgatgattccgttgcttcaccgtgtggtggaaatactactgatctttcgcttgttccttacgctcctactcgaggagaggatggttcttgtgaggataatggaatggagctgcagaagatgcatgataatgttcaggggaaaactgaaactccggattgggaaagtttgattgcagatgcttctgagctgttaatctttgactcacctgatgcttctgaggcttttagatgctttatgatgcagagagcatcaaactctgaagcacgttttagaaatggtgtggagaagcaaacaatgcagcacgattcaaacaaggaaccggagtccgcgaatgcgattccttatgaggtaaactcaggagtaatatcacaagctgtttcactcttgcaccgtggtataagaagacgttgtcttgactttgagatgcccgggaataagcaaacatcaagtgagaataacaccgcggcttgtgaatcctcttcgagatgtgttgtaccgagtattggtcttcatctaaatgccattttaatgtcttcaaaggactgtaaaaccaatgttactcaagattactcatgttctgcgaatatacaagtgggtttacaaaggtccatctctacactgcaagattctttggaccaaacagaaaatgaaatccgggaagatgcagatcaagatgttcctgttgaaccagctttgcaagagttaaatttgagcagccctaagaagaagagttactgtgaatgctttgctgctggagtctattgcatagagccatgttcatgtatagactgcttcaataaacctatccatgaagacgttgtcctggcgactcgcaaacagattgaatctcggaatccacttgcatttgctcctaaagtcattaggaactctgactcagttcaagaaaccggggatgatgcaagcaaaactccagcttctgcgcgccataaacgtggctgcaactgcaagaaatcaaactgtctgaagaaatactgtgaatgctatcagggtggtgtgggctgttccataaactgtagatgtgaaggatgtaagaacgcattcggccggaaagatgggtcttccattgacatggaagccgaacaagaagaggaaaatgaaacatctgagaaaagcagaacagccaaaagccaacaaaacactgaggttttaatgagaaaggacatgagttctgctctacctacgacaccaacgccgatttacagaccagaactggttcaactacctttctcatcatctaagaacaggatgcctcctccacagtctcttcttggaggtggatcttcctcagggatatttaacagtcaatatctaagaaaaccagacattagtttgtctcaatccagaatcgagaagtcattcgagacagtcgcagttgatggagctgaacaaatgcctgagattctcatccattcccctatacctaacatcaagagtgtctctcccaacggaaagagggtctctcctcctcatatggaatcatctagctcaggctcaatcttagggagaagaaatggcgggcggaaactgatattgcagtcgattccatcgtttccttctctcactccccaacactga

SEQ ID NO: 69438 - protein, 658 aa, Arabidopsis thaliana
  peptide (1)..(658): Ceres Seq. ID no. 1814537
  misc_feature (442)..(483): Pfam Name: Tesmin/TSO1-like CXC domain Pfam Description: Tesmin/TSO1-like CXC domain
  misc_feature (1)..(370): Homolog of NCBI NO: 6739821 NR Description: putative DNA binding protein [Arabidopsis >gi|7767425|gb|AAF69124.1|AF204059_1 CXC domain protein TSO1
  misc_feature (1)..(370): Homolog of NCBI NO: 30686784 NR Description: DNA binding protein -related [Arabidopsis
  misc_feature (370)..(656): Homolog of NCBI NO: 6739821 NR Description: putative DNA binding protein [Arabidopsis >gi|7767425|gb|AAF69124.1|AF204059_1 CXC domain protein TSO1
  misc_feature (370)..(656): Homolog of NCBI NO: 30686784 NR Description: DNA binding protein -related [Arabidopsis
  misc_feature (370)..(656): Homolog of NCBI NO: 23297130 NR Description: putative DNA binding protein [Arabidopsis
  misc_feature (162)..(388): Homolog of NCBI NO: 23297130 NR Description: putative DNA binding protein [Arabidopsis
  misc_feature (370)..(656): Homolog of NCBI NO: 15028139 NR Description: putative DNA binding protein [Arabidopsis
  misc_feature (162)..(388): Homolog of NCBI NO: 15028139 NR Description: putative DNA binding protein [Arabidopsis
  misc_feature (119)..(630): Homolog of NCBI NO: 18403510 NR Description: expressed protein; protein id: At3g22760.1, by cDNA: gi_20466373, supported by cDNA: gi_7767426 [Arabidopsis >gi|20466374|gb|AAM20504.1| unknown protein [Arabidopsis
  misc_feature (1)..(109): Homolog of NCBI NO: 18403510 NR Description: expressed protein; protein id: At3g22760.1, by cDNA: gi_20466373, supported by cDNA: gi_7767426 [Arabidopsis >gi|20466374|gb|AAM20504.1| unknown protein [Arabidopsis
MDTPQKSITQIGTPISKSRFEDSPVFNYINSLSPIRPVRSIPNPNQFSSLNFTSPPSVFTSPHLTSSHKESRFFKTHNSSSSDPTNSVESQEDESTSHEEVPAEGEDTKGLNIDDCMREEASVETNLDDSVASPCGGNTTDLSLVPYAPTRGEDGSCEDNGMELQKMHDNVQGKTETPDWESLIADASELLIFDSPDASEAFRCFMMQRASNSEARFRNGVEKQTMQHDSNKEPESANAIPYEVNSGVISQAVSLLHRGIRRRCLDFEMPGNKQTSSENNTAACESSSRCVVPSIGLHLNAILMSSKDCKTNVTQDYSCSANIQVGLQRSISTLQDSLDQTENEIREDADQDVPVEPALQELNLSSPKKKSYCECFAAGVYCIEPCSCIDCFNKPIHEDVVLATRKQIESRNPLAFAPKVIRNSDSVQETGDDASKTPASARHKRGCNCKKSNCLKKYCECYQGGVGCSINCRCEGCKNAFGRKDGSSIDMEAEQEEENETSEKSRTAKSQQNTEVLMRKDMSSALPTTPTPIYRPELVQLPFSSSKNRMPPPQSLLGGGSSSGIFNSQYLRKPDISLSQSRIEKSFETVAVDGAEQMPEILIHSPIPNIKSVSPNGKRVSPPHMESSSSGSILGRRNGGRKLILQSIPSFPSLTPQH

SEQ ID NO: 69439 - protein, 542 aa, Arabidopsis thaliana
  peptide (1)..(542): Ceres Seq. ID no. 1814538
  misc_feature (326)..(367): Pfam Name: Tesmin/TSO1-like CXC domain Pfam Description: Tesmin/TSO1-like CXC domain
  misc_feature (1)..(254): Homolog of NCBI NO: 6739821 NR Description: putative DNA binding protein [Arabidopsis >gi|7767425|gb|AAF69124.1|AF204059_1 CXC domain protein TSO1
  misc_feature (1)..(254): Homolog of NCBI NO: 30686784 NR Description: DNA binding protein -related [Arabidopsis
  misc_feature (254)..(540): Homolog of NCBI NO: 6739821 NR Description: putative DNA binding protein [Arabidopsis >gi|7767425|gb|AAF69124.1|AF204059_1 CXC domain protein TSO1
  misc_feature (254)..(540): Homolog of NCBI NO: 30686784 NR Description: DNA binding protein -related [Arabidopsis
  misc_feature (254)..(540): Homolog of NCBI NO: 23297130 NR Description: putative DNA binding protein [Arabidopsis
  misc_feature (46)..(272): Homolog of NCBI NO: 23297130 NR Description: putative DNA binding protein [Arabidopsis
  misc_feature (254)..(540): Homolog of NCBI NO: 15028139 NR Description: putative DNA binding protein [Arabidopsis
  misc_feature (46)..(272): Homolog of NCBI NO: 15028139 NR Description: putative DNA binding protein [Arabidopsis
  misc_feature (3)..(514): Homolog of NCBI NO: 18403510 NR Description: expressed protein; protein id: At3g22760.1, by cDNA: gi_20466373, supported by cDNA: gi_7767426 [Arabidopsis >gi|20466374|gb|AAM20504.1| unknown protein [Arabidopsis
  misc_feature (3)..(514): Homolog of NCBI NO: 7767427 NR Description: CXC domain containing TSO1-like protein 1
MREEASVETNLDDSVASPCGGNTTDLSLVPYAPTRGEDGSCEDNGMELQKMHDNVQGKTETPDWESLIADASELLIFDSPDASEAFRCFMMQRASNSEARFRNGVEKQTMQHDSNKEPESANAIPYEVNSGVISQAVSLLHRGIRRRCLDFEMPGNKQTSSENNTAACESSSRCVVPSIGLHLNAILMSSKDCKTNVTQDYSCSANIQVGLQRSISTLQDSLDQTENEIREDADQDVPVEPALQELNLSSPKKKSYCECFAAGVYCIEPCSCIDCFNKPIHEDVVLATRKQIESRNPLAFAPKVIRNSDSVQETGDDASKTPASARHKRGCNCKKSNCLKKYCECYQGGVGCSINCRCEGCKNAFGRKDGSSIDMEAEQEEENETSEKSRTAKSQQNTEVLMRKDMSSALPTTPTPIYRPELVQLPFSSSKNRMPPPQSLLGGGSSSGIFNSQYLRKPDISLSQSRIEKSFETVAVDGAEQMPEILIHSPIPNIKSVSPNGKRVSPPHMESSSSGSILGRRNGGRKLILQSIPSFPSLTPQH

SEQ ID NO: 69440 - protein, 497 aa, Arabidopsis thaliana
  peptide (1)..(497): Ceres Seq. ID no. 1814539
  misc_feature (281)..(322): Pfam Name: Tesmin/TSO1-like CXC domain Pfam Description: Tesmin/TSO1-like CXC domain
  misc_feature (1)..(209): Homolog of NCBI NO: 6739821 NR Description: putative DNA binding protein [Arabidopsis >gi|7767425|gb|AAF69124.1|AF204059_1 CXC domain protein TSO1
  misc_feature (1)..(209): Homolog of NCBI NO: 30686784 NR Description: DNA binding protein -related [Arabidopsis
  misc_feature (209)..(495): Homolog of NCBI NO: 6739821 NR Description: putative DNA binding protein [Arabidopsis >gi|7767425|gb|AAF69124.1|AF204059_1 CXC domain protein TSO1
  misc_feature (209)..(495): Homolog of NCBI NO: 30686784 NR Description: DNA binding protein -related [Arabidopsis
  misc_feature (209)..(495): Homolog of NCBI NO: 23297130 NR Description: putative DNA binding protein [Arabidopsis
  misc_feature (1)..(227): Homolog of NCBI NO: 23297130 NR Description: putative DNA binding protein [Arabidopsis
  misc_feature (209)..(495): Homolog of NCBI NO: 15028139 NR Description: putative DNA binding protein [Arabidopsis
  misc_feature (1)..(227): Homolog of NCBI NO: 15028139 NR Description: putative DNA binding protein [Arabidopsis
  misc_feature (1)..(469): Homolog of NCBI NO: 18403510 NR Description: expressed protein; protein id: At3g22760.1, by cDNA: gi_20466373, supported by cDNA: gi_7767426 [Arabidopsis >gi|20466374|gb|AAM20504.1| unknown protein [Arabidopsis
  misc_feature (1)..(469): Homolog of NCBI NO: 7767427 NR Description: CXC domain containing TSO1-like protein 1
MELQKMHDNVQGKTETPDWESLIADASELLIFDSPDASEAFRCFMMQRASNSEARFRNGVEKQTMQHDSNKEPESANAIPYEVNSGVISQAVSLLHRGIRRRCLDFEMPGNKQTSSENNTAACESSSRCVVPSIGLHLNAILMSSKDCKTNVTQDYSCSANIQVGLQRSISTLQDSLDQTENEIREDADQDVPVEPALQELNLSSPKKKSYCECFAAGVYCIEPCSCIDCFNKPIHEDVVLATRKQIESRNPLAFAPKVIRNSDSVQETGDDASKTPASARHKRGCNCKKSNCLKKYCECYQGGVGCSINCRCEGCKNAFGRKDGSSIDMEAEQEEENETSEKSRTAKSQQNTEVLMRKDMSSALPTTPTPIYRPELVQLPFSSSKNRMPPPQSLLGGGSSSGIFNSQYLRKPDISLSQSRIEKSFETVAVDGAEQMPEILIHSPIPNIKSVSPNGKRVSPPHMESSSSGSILGRRNGGRKLILQSIPSFPSLTPQH

SEQ ID NO: 69441 - DNA, 1563 bp, Arabidopsis thaliana
  misc_feature (1)..(1563): Ceres Seq. ID no. 1814621
  misc_feature: MA Experiment ID: 20000227 Result: Down-regulated in Transcription
  misc_feature: MA Experiment 20000227 PARAMETER Experiment Name: At_Root-Tips-vs-Tops_P Parameter: Tissue Value: Root Tips vs. Root Tops
atgaaccaaacgagacgtaagagacgacctgattcatctctctctagactcgattctctttcgccggaaatgctctttccggccaaatctccgtcgctaacttcttctcgcatcagaaacatcttcttattactcatcttttgtttcatcatctacatcatcttctcctacggcaccaatttccgccgtgaacagatttcatcaatcgctcgatcgttatctgtgttctccactcgtcgccgtcacttactcttctcgatcgccgcttctcacgactcttggctccgtcgtagctcgtacgttcgtctctggtactctcctgaatctacacgcgccgtcgtgtttctcgatcgcggtggattggagtccgatctaactcttcctcctgtgattgtctctaaagacgtttctaggtttccttataatttccctggtggtctccgatcggcgattcgtgtggctcgtgttgttaaagagacggttgatagaggagataaagatgtgcggtggtttgttttcggtgatgatgatactgtcttctttgtagataatttggtgacggttttatctaagtatgatcaccggaagtggttttacgtcggaagtaattcggagttttatgatcagaatgttaggtattcgtttgatatggcgtttggtggtggtggatttgctattagtgcttcgcttgcgaaggttttagctaaggttttggattcttgtttgatgaggtattcacatatgtatggaagtgattctaggatcttctcttgcgtcgctgagcttggtgttacattaactcatgaacctggatttcatcagattgatgtcagagggaacatatttggtctgctatgtgcgcaccctttatctccattggtatctcttcatcacttggatgcagttgatccgttttttccaaaaaggaacaggacagaatccgtggctcatcttatcggagctgcaagttttgattccgggaggattttacagcagagtgtttgttatgattctttgaacacagtgactgtttcggttgtgtggggttacgcggttcaagtttatgaaggaaataaacttcttccggatcttctcacactgcaaaagacattttctacatggaggagagggtcaggggtccaaagcaactatatgttcagtacaagagaatatccgagggatccatgtgggagaccgctcgtctttttcttggacagtgtaggatcagatggaactgagggaacatggagtaactataacatccatagagttggacactgtcacagagcagaagctgttgagcgtctagaacgcatcagagttctgtctcctaaactggaacgcaacgttgaacaggtaggatttataaatactgatcgcttctctgttaaagtaccttcaattttgcctggattcacctttttttttggtttcctgaaaataaaatgtcagatgggtttgcctcgccgccaatgttgtgacatctcatcgccatataataagtcaatggtcattaatataaggcaatgcatgccggatgagctaatcgccatgaacacttag

SEQ ID NO: 69442 - protein, 520 aa, Arabidopsis thaliana
  peptide (1)..(520): Ceres Seq. ID no. 1814622
  misc_feature (209)..(494): Pfam Name: Protein of unknown function, DUF604 Pfam Description: Protein of unknown function, DUF604
  misc_feature (1)..(520): Homolog of NCBI NO: 7459604 NR Description: hypothetical protein - Arabidopsis thaliana hypothetical protein [Arabidopsis thaliana]
  misc_feature (1)..(454): Homolog of NCBI NO: 30683185 NR Description: fringe-related protein [Arabidopsis thaliana]
  misc_feature (484)..(520): Homolog of NCBI NO: 30683185 NR Description: fringe-related protein [Arabidopsis thaliana]
  misc_feature (28)..(452): Homolog of NCBI NO: 15220466 NR Description: hypothetical protein; protein id: At1g05280.1
  misc_feature (28)..(452): Homolog of NCBI NO: 25336191 NR Description: hypothetical protein [imported] - Arabidopsis >gi|2388569|gb|AAB71450.1| Similar to hypothetical protein
  misc_feature (81)..(426): Homolog of NCBI NO: 15238082 NR Description: putative protein; protein id: At5g41460.1 thaliana] >gi|9758054|dbj|BAB08517.1|
  misc_feature (63)..(446): Homolog of NCBI NO: 38636837 NR Description: putative fringe-related protein [Oryza sativa
  misc_feature (60)..(426): Homolog of NCBI NO: 18416156 NR Description: Expressed protein; protein id: At4g23490.1, by cDNA: gi_15529152 [Arabidopsis thaliana]
  misc_feature (123)..(442): Homolog of NCBI NO: 15223021 NR Description: hypothetical protein; protein id: At1g07850.1
  misc_feature (75)..(141): Homolog of NCBI NO: 15223021 NR Description: hypothetical protein; protein id: At1g07850.1
MNQTRRKRRPDSSLSRLDSLSPEMLFPAKSPSLTSSRIRNIFLLLIFCFIIYIIFSYGTNFRREQISSIARSLSVFSTRRRHLLFSIAASHDSWLRRSSYVRLWYSPESTRAVVFLDRGGLESDLTLPPVIVSKDVSRFPYNFPGGLRSAIRVARVVKETVDRGDKDVRWFVFGDDDTVFFVDNLVTVLSKYDHRKWFYVGSNSEFYDQNVRYSFDMAFGGGGFAISASLAKVLAKVLDSCLMRYSHMYGSDSRIFSCVAELGVTLTHEPGFHQIDVRGNIFGLLCAHPLSPLVSLHHLDAVDPFFPKRNRTESVAHLIGAASFDSGRILQQSVCYDSLNTVTVSVVWGYAVQVYEGNKLLPDLLTLQKTFSTWRRGSGVQSNYMFSTREYPRDPCGRPLVFFLDSVGSDGTEGTWSNYNIHRVGHCHRAEAVERLERIRVLSPKLERNVEQVGFINTDRFSVKVPSILPGFTFFFGFLKIKCQMGLPRRQCCDISSPYNKSMVINIRQCMPDELIAMNT

SEQ ID NO: 69443 - protein, 497 aa, Arabidopsis thaliana
  peptide (1)..(497): Ceres Seq. ID no. 1814623
  misc_feature (186)..(471): Pfam Name: Protein of unknown function, DUF604 Pfam Description: Protein of unknown function, DUF604
  misc_feature (1)..(497): Homolog of NCBI NO: 7459604 NR Description: hypothetical protein - Arabidopsis thaliana hypothetical protein [Arabidopsis thaliana]
  misc_feature (1)..(431): Homolog of NCBI NO: 30683185 NR Description: fringe-related protein [Arabidopsis thaliana]
  misc_feature (461)..(497): Homolog of NCBI NO: 30683185 NR Description: fringe-related protein [Arabidopsis thaliana]
  misc_feature (5)..(429): Homolog of NCBI NO: 15220466 NR Description: hypothetical protein; protein id: At1g05280.1
  misc_feature (5)..(429): Homolog of NCBI NO: 25336191 NR Description: hypothetical protein [imported] - Arabidopsis >gi|2388569|gb|AAB71450.1| Similar to hypothetical protein
  misc_feature (58)..(403): Homolog of NCBI NO: 15238082 NR Description: putative protein; protein id: At5g41460.1 thaliana] >gi|9758054|dbj|BAB08517.1|
  misc_feature (40)..(423): Homolog of NCBI NO: 38636837 NR Description: putative fringe-related protein [Oryza sativa
  misc_feature (37)..(403): Homolog of NCBI NO: 18416156 NR Description: Expressed protein; protein id: At4g23490.1, by cDNA: gi_15529152 [Arabidopsis thaliana]
  misc_feature (100)..(419): Homolog of NCBI NO: 15223021 NR Description: hypothetical protein; protein id: At1g07850.1
  misc_feature (52)..(118): Homolog of NCBI NO: 15223021 NR Description: hypothetical protein; protein id: At1g07850.1
MLFPAKSPSLTSSRIRNIFLLLIFCFIIYIIFSYGTNFRREQISSIARSLSVFSTRRRHLLFSIAASHDSWLRRSSYVRLWYSPESTRAVVFLDRGGLESDLTLPPVIVSKDVSRFPYNFPGGLRSAIRVARVVKETVDRGDKDVRWFVFGDDDTVFFVDNLVTVLSKYDHRKWFYVGSNSEFYDQNVRYSFDMAFGGGGFAISASLAKVLAKVLDSCLMRYSHMYGSDSRIFSCVAELGVTLTHEPGFHQIDVRGNIFGLLCAHPLSPLVSLHHLDAVDPFFPKRNRTESVAHLIGAASFDSGRILQQSVCYDSLNTVTVSVVWGYAVQVYEGNKLLPDLLTLQKTFSTWRRGSGVQSNYMFSTREYPRDPCGRPLVFFLDSVGSDGTEGTWSNYNIHRVGHCHRAEAVERLERIRVLSPKLERNVEQVGFINTDRFSVKVPSILPGFTFFFGFLKIKCQMGLPRRQCCDISSPYNKSMVINIRQCMPDELIAMNT

SEQ ID NO: 69444 - protein, 304 aa, Arabidopsis thaliana
  peptide (1)..(304): Ceres Seq. ID no. 1814624
  misc_feature (1)..(278): Pfam Name: Protein of unknown function, DUF604 Pfam Description: Protein of unknown function, DUF604
  misc_feature (1)..(304): Homolog of NCBI NO: 7459604 NR Description: hypothetical protein - Arabidopsis thaliana hypothetical protein [Arabidopsis thaliana]
  misc_feature (1)..(238): Homolog of NCBI NO: 30683185 NR Description: fringe-related protein [Arabidopsis thaliana]
  misc_feature (268)..(304): Homolog of NCBI NO: 30683185 NR Description: fringe-related protein [Arabidopsis thaliana]
  misc_feature (1)..(236): Homolog of NCBI NO: 15220466 NR Description: hypothetical protein; protein id: At1g05280.1
  misc_feature (1)..(236): Homolog of NCBI NO: 25336191 NR Description: hypothetical protein [imported] - Arabidopsis >gi|2388569|gb|AAB71450.1| Similar to hypothetical protein
  misc_feature (1)..(210): Homolog of NCBI NO: 15238082 NR Description: putative protein; protein id: At5g41460.1 thaliana] >gi|9758054|dbj|BAB08517.1|
  misc_feature (1)..(230): Homolog of NCBI NO: 38636837 NR Description: putative fringe-related protein [Oryza sativa
  misc_feature (1)..(210): Homolog of NCBI NO: 18416156 NR Description: Expressed protein; protein id: At4g23490.1, by cDNA: gi_15529152 [Arabidopsis thaliana]
  misc_feature (1)..(226): Homolog of NCBI NO: 15223021 NR Description: hypothetical protein; protein id: At1g07850.1
  misc_feature (1)..(210): Homolog of NCBI NO: 15529153 NR Description: AT4g23490/F16G20_190 [Arabidopsis thaliana]
MAFGGGGFAISASLAKVLAKVLDSCLMRYSHMYGSDSRIFSCVAELGVTLTHEPGFHQIDVRGNIFGLLCAHPLSPLVSLHHLDAVDPFFPKRNRTESVAHLIGAASFDSGRILQQSVCYDSLNTVTVSVVWGYAVQVYEGNKLLPDLLTLQKTFSTWRRGSGVQSNYMFSTREYPRDPCGRPLVFFLDSVGSDGTEGTWSNYNIHRVGHCHRAEAVERLERIRVLSPKLERNVEQVGFINTDRFSVKVPSILPGFTFFFGFLKIKCQMGLPRRQCCDISSPYNKSMVINIRQCMPDELIAMNT

SEQ ID NO: 69445 - DNA, 1023 bp, Arabidopsis thaliana
  misc_feature (1)..(1023): Ceres Seq. ID no. 1814805
  misc_feature: MA Experiment ID: 20000179 Result: Up-regulated in Transcription
  misc_feature: MA Experiment 20000179 PARAMETER Experiment Name: At_Germinating_Seeds_P Parameter: Age (hr) Value: 6 vs. 0
  misc_feature: MA Experiment 20000179 PARAMETER Experiment Name: At_Germinating_Seeds_P Parameter: Tissue Value: Germinating Seeds
  misc_feature: MA Experiment ID: 20000180 Result: Up-regulated in Transcription
  misc_feature: MA Experiment 20000180 PARAMETER Experiment Name: At_Germinating_Seeds_P Parameter: Age (hr) Value: 24 vs. 0
  misc_feature: MA Experiment 20000180 PARAMETER Experiment Name: At_Germinating_Seeds_P Parameter: Tissue Value: Germinating Seeds
  misc_feature: MA Experiment ID: 20000451 Result: Up-regulated in Transcription
  misc_feature: MA Experiment 20000451 PARAMETER Experiment Name: At_CS6879_Shoots-Roots_P Parameter: Age (day) Value: 14
  misc_feature: MA Experiment 20000451 PARAMETER Experiment Name: At_CS6879_Shoots-Roots_P Parameter: Organism Value: A. thaliana
  misc_feature: MA Experiment 20000451 PARAMETER Experiment Name: At_CS6879_Shoots-Roots_P Parameter: Plant Line Value: CS6879 vs. WS
  misc_feature: MA Experiment 20000451 PARAMETER Experiment Name: At_CS6879_Shoots-Roots_P Parameter: Tissue Value: Roots
atgtcgttgcttgtatttctttgccaaattatagtattatcggtcttgttcttctccgaggtgtgccttgccggtaaaaaaattccagcaaattttgtgttcggagattcattggtggatgccggaaacaacaactacttagccacattgtcaaaggctaattatgttcctaatgggatcgattttggatcacctactggtcgattcactaacggaagaacaatcgtcgatatcgtatatcaagcattaggttccgacgagttaactccaccatacttagcaccaacaacaagcggatctctcattctcaatggcgttaattatgcttcgggcggaagtggaattctcaattccaccggaaaattatttagattgtaccaattgggtgcgaggaaaatcgtggtgattaatattggtcccatcggttgtataccattcgagagagagtctgatccagccgctggaaataactgtttggccgaacctaatgaggtattatttctgaaattttacactcgagtgtgtgttgaattcgaacttcatttccacaagtttctctacaatagactcatttcagaccccatcggttgtataccgttcgagagagagtctgacccaatggctggatatgaatgttctgtcgaacctaatgaagtggctcaaatgtataatctcaagctgaaaatactcgtcgaggagttaaacaataatctacaaggttcaagattcgtctacggtgacgtttttcgcattgtttatgatattatacaaaattattcatcttacggttttgagagtgagaagattccttgttgttcgttagttgggaaagtaggtgggctgattccatgcggcccgccttcaaaagtatgtatggaccgttccaaatatgtattttgggatccttaccatcctaccgaagctgctaacatcatcattgctaggcgtctactctccggcgacacctccgatatttatccgatcaatctccggcaactcgctaacctcaagatatatgcatga

SEQ ID NO: 69446 - protein, 340 aa, Arabidopsis thaliana
  peptide (1)..(340): Ceres Seq. ID no. 1814806
  misc_feature (32)..(317): Pfam Name: GDSL-like Lipase/Acylhydrolase Pfam Description: GDSL-like Lipase/Acylhydrolase
  misc_feature (1)..(340): Homolog of NCBI NO: 15234857 NR Description: proline-rich, APG like protein; protein id:
  misc_feature (178)..(336): Homolog of NCBI NO: 15227849 NR Description: putative GDSL-motif lipase/hydrolase; protein id:
  misc_feature (25)..(129): Homolog of NCBI NO: 15227849 NR Description: putative GDSL-motif lipase/hydrolase; protein id:
  misc_feature (178)..(336): Homolog of NCBI NO: 15229742 NR Description: putative protein; protein id: At3g50400.1 thaliana] >gi|7630026|emb|CAB88323.1| putative protein thaliana] >gi|26450386|dbj|BAC42308.1| unknown protein
  misc_feature (1)..(129): Homolog of NCBI NO: 15229742 NR Description: putative protein; protein id: At3g50400.1 thaliana] >gi|7630026|emb|CAB88323.1| putative protein thaliana] >gi|26450386|dbj|BAC42308.1| unknown protein
  misc_feature (178)..(336): Homolog of NCBI NO: 34899288 NR Description: similar to GDSL-motif lipase/hydrolase [Oryza
  misc_feature (1)..(123): Homolog of NCBI NO: 34899288 NR Description: similar to GDSL-motif lipase/hydrolase [Oryza
  misc_feature (194)..(333): Homolog of NCBI NO: 38345537 NR Description: OSJNBa0020J04.12 [Oryza sativa (japonica
  misc_feature (14)..(123): Homolog of NCBI NO: 38345537 NR Description: OSJNBa0020J04.12 [Oryza sativa (japonica
  misc_feature (194)..(336): Homolog of NCBI NO: 15238210 NR Description: GDSL-motif lipase/hydrolase-like protein; protein
MSLLVFLCQIIVLSVLFFSEVCLAGKKIPANFVFGDSLVDAGNNNYLATLSKANYVPNGIDFGSPTGRFTNGRTIVDIVYQALGSDELTPPYLAPTTSGSLILNGVNYASGGSGILNSTGKLFRLYQLGARKIVVINIGPIGCIPFERESDPAAGNNCLAEPNEVLFLKFYTRVCVEFELHFHKFLYNRLISDPIGCIPFERESDPMAGYECSVEPNEVAQMYNLKLKILVEELNNNLQGSRFVYGDVFRIVYDIIQNYSSYGFESEKIPCCSLVGKVGGLIPCGPPSKVCMDRSKYVFWDPYHPTEAANIIIARRLLSGDTSDIYPINLRQLANLKIYA

SEQ ID NO: 69447 - DNA, 1224 bp, Arabidopsis thaliana
  misc_feature (1)..(1224): Ceres Seq. ID no. 1815028
  misc_feature: MA Experiment ID: 20000180 Result: Up-regulated in Transcription
  misc_feature: MA Experiment 20000180 PARAMETER Experiment Name: At_Germinating_Seeds_P Parameter: Age (hr) Value: 24 vs. 0
  misc_feature: MA Experiment 20000180 PARAMETER Experiment Name: At_Germinating_Seeds_P Parameter: Tissue Value: Germinating Seeds
  misc_feature: MA Experiment ID: 20001247 Result: Down-regulated in Transcription
  misc_feature: MA Experiment 20001247 PARAMETER Experiment Name: At_Far-red-induction_P Parameter: Age (day) Value: 7
  misc_feature: MA Experiment 20001247 PARAMETER Experiment Name: At_Far-red-induction_P Parameter: Light Value: Far-red vs. White
  misc_feature: MA Experiment 20001247 PARAMETER Experiment Name: At_Far-red-induction_P Parameter: Organism Value: A. thaliana
  misc_feature: MA Experiment 20001247 PARAMETER Experiment Name: At_Far-red-induction_P Parameter: Plant Line Value: Columbia
  misc_feature: MA Experiment 20001247 PARAMETER Experiment Name: At_Far-red-induction_P Parameter: Timepoint (hr) Value: 1
  misc_feature: MA Experiment 20001247 PARAMETER Experiment Name: At_Far-red-induction_P Parameter: Tissue Value: Whole Plant
  misc_feature: MA Experiment ID: 20001451 Result: Down-regulated in Transcription
  misc_feature: MA Experiment 20001451 PARAMETER Experiment Name: At_Far-red-induction_P Parameter: Age (day) Value: 7
  misc_feature: MA Experiment 20001451 PARAMETER Experiment Name: At_Far-red-induction_P Parameter: Light Value: Far-red vs. White
  misc_feature: MA Experiment 20001451 PARAMETER Experiment Name: At_Far-red-induction_P Parameter: Organism Value: A. thaliana
  misc_feature: MA Experiment 20001451 PARAMETER Experiment Name: At_Far-red-induction_P Parameter: Plant Line Value: Columbia
  misc_feature: MA Experiment 20001451 PARAMETER Experiment Name: At_Far-red-induction_P Parameter: Timepoint (hr) Value: 24
  misc_feature: MA Experiment 20001451 PARAMETER Experiment Name: At_Far-red-induction_P Parameter: Tissue Value: Whole Plant
  misc_feature: MA Experiment ID: 20001911 Result: Down-regulated in Transcription
  misc_feature: MA Experiment 20001911 PARAMETER Experiment Name: At_Drought_Reproduction_P Parameter: Age (day) Value: 40
  misc_feature: MA Experiment 20001911 PARAMETER Experiment Name: At_Drought_Reproduction_P Parameter: Organism Value: A. thaliana
  misc_feature: MA Experiment 20001911 PARAMETER Experiment Name: At_Drought_Reproduction_P Parameter: Plant Line Value: WS
  misc_feature: MA Experiment 20001911 PARAMETER Experiment Name: At_Drought_Reproduction_P Parameter: Timepoint (day) Value: 10
  misc_feature: MA Experiment 20001911 PARAMETER Experiment Name: At_Drought_Reproduction_P Parameter: Tissue Value: Flowers
  misc_feature: MA Experiment 20001911 PARAMETER Experiment Name: At_Drought_Reproduction_P Parameter: Treatment Value: Drought vs. No Drought
atggtggtgatgatgaaggcaactcgagggacgagagatccagatctacttgggctaatgttcgtacatcatcaattcctcttctgcgttatcagttttttttatttattgttgagagattttgaatttctgttgaacgattcttcttctggaatctggacatggtcgcaggtggtttccgaaacccaggctcttccttacctgcaaaaagcctttaatattcagcattttgatttccccacgcaggaggaccaggaagagaatacatatgcggctaaagtgagcgagaaacaagacttctcgaaggagcaatggcaagattacaaacgcccagcaagtgaacaacactactcagacgaagttgaaacttatggaaacctagaaccctcacaactagagctctcaggtctctcagaagcttgcaacaaactgtgggagctcgatttaaaccgccttgttcctggaaggattatcaaatcgactgcggagatgggaaaagggtccatgagagagctgatatggctgaaggactactgttctcttggattctgttcattgcttgacaactacaaccccaacgaaggttacaaagaagtggtcacagaagaagagaggcaagagcaagcggctttcattgaagaaattagcagaacctctgtgatcaagtaccttcacaggtaccttgtgctcaaggacgtcgctcctggaagctacttagagttcaagagaatgttgacaagtctctggttcgatctgtatggccgcggaggtacatctggctcatcttctgcgtttgagcatgtctttgtaggtgagatcaaacaatctggtgggaacaagtctctggattccataactggcttcagtacttcaaaaccggtgactgaccgagaaaccacacttttgcttcgtatgcagcctgattcagagactcagctgctaacaatccaattcgagtggaacggtgttctaaaatcagtctcaagtactctagttggagtaagtccagagttcgagttggctctatacaccatgtgtttcttcatgggcacagaagataaccacattcagttgggtccatacaatgtcaatgtcaaatgttaccgacttggcaacaaccgtatcgcgctcagctttccccattgcagaatcttgaaacctctcttgatggctctggtcacaaaatatctgccccttgcgcagtactgtattgaattattgtga

SEQ ID NO: 69448 - protein, 407 aa, Arabidopsis thaliana
  peptide (1)..(407): Ceres Seq. ID no. 1815029
  misc_feature (1)..(407): Homolog of NCBI NO: 25407557 NR Description: probable serine proteinase-like protein
  misc_feature (1)..(288): Homolog of NCBI NO: 30683929 NR Description: serine protease protein -related [Arabidopsis
  misc_feature (67)..(380): Homolog of NCBI NO: 20260612 NR Description: putative serine protease-like protein
  misc_feature (71)..(380): Homolog of NCBI NO: 38345945 NR Description: OSJNBb0103I08.16 [Oryza sativa (japonica
  misc_feature (108)..(380): Homolog of NCBI NO: 29367523 NR Description: putative serine protease-like protein [Oryza
  misc_feature (155)..(288): Homolog of NCBI NO: 7488185 NR Description: probable serine proteinase - Arabidopsis thaliana
  misc_feature (38)..(60): Homolog of NCBI NO: 7488185 NR Description: probable serine proteinase - Arabidopsis thaliana
  misc_feature (1)..(27): Homolog of NCBI NO: 7488185 NR Description: probable serine proteinase - Arabidopsis thaliana
  misc_feature (183)..(380): Homolog of NCBI NO: 22797893 NR Description: endoU protein [Xenopus laevis]
  misc_feature (183)..(368): Homolog of NCBI NO: 5174623 NR Description: placental protein 11 precursor [Homo sapiens]
MVVMMKATRGTRDPDLLGLMFVHHQFLFCVISFFYLLLRDFEFLLNDSSSGIWTWSQVVSETQALPYLQKAFNIQHFDFPTQEDQEENTYAAKVSEKQDFSKEQWQDYKRPASEQHYSDEVETYGNLEPSQLELSGLSEACNKLWELDLNRLVPGRIIKSTAEMGKGSMRELIWLKDYCSLGFCSLLDNYNPNEGYKEVVTEEERQEQAAFIEEISRTSVIKYLHRYLVLKDVAPGSYLEFKRMLTSLWFDLYGRGGTSGSSSAFEHVFVGEIKQSGGNKSLDSITGFSTSKPVTDRETTLLLRMQPDSETQLLTIQFEWNGVLKSVSSTLVGVSPEFELALYTMCFFMGTEDNHIQLGPYNVNVKCYRLGNNRIALSFPHCRILKPLLMALVTKYLPLAQYCIELL

SEQ ID NO: 69449 - protein, 404 aa, Arabidopsis thaliana
  peptide (1)..(404): Ceres Seq. ID no. 1815030
  misc_feature (1)..(404): Homolog of NCBI NO: 25407557 NR Description: probable serine proteinase-like protein
  misc_feature (1)..(285): Homolog of NCBI NO: 30683929 NR Description: serine protease protein -related [Arabidopsis
  misc_feature (64)..(377): Homolog of NCBI NO: 20260612 NR Description: putative serine protease-like protein
  misc_feature (68)..(377): Homolog of NCBI NO: 38345945 NR Description: OSJNBb0103I08.16 [Oryza sativa (japonica
  misc_feature (105)..(377): Homolog of NCBI NO: 29367523 NR Description: putative serine protease-like protein [Oryza
  misc_feature (152)..(285): Homolog of NCBI NO: 7488185 NR Description: probable serine proteinase - Arabidopsis thaliana
  misc_feature (35)..(57): Homolog of NCBI NO: 7488185 NR Description: probable serine proteinase - Arabidopsis thaliana
  misc_feature (1)..(24): Homolog of NCBI NO: 7488185 NR Description: probable serine proteinase - Arabidopsis thaliana
  misc_feature (180)..(377): Homolog of NCBI NO: 22797893 NR Description: endoU protein [Xenopus laevis]
  misc_feature (180)..(365): Homolog of NCBI NO: 5174623 NR Description: placental protein 11 precursor [Homo sapiens]
MMKATRGTRDPDLLGLMFVHHQFLFCVISFFYLLLRDFEFLLNDSSSGIWTWSQVVSETQALPYLQKAFNIQHFDFPTQEDQEENTYAAKVSEKQDFSKEQWQDYKRPASEQHYSDEVETYGNLEPSQLELSGLSEACNKLWELDLNRLVPGRIIKSTAEMGKGSMRELIWLKDYCSLGFCSLLDNYNPNEGYKEVVTEEERQEQAAFIEEISRTSVIKYLHRYLVLKDVAPGSYLEFKRMLTSLWFDLYGRGGTSGSSSAFEHVFVGEIKQSGGNKSLDSITGFSTSKPVTDRETTLLLRMQPDSETQLLTIQFEWNGVLKSVSSTLVGVSPEFELALYTMCFFMGTEDNHIQLGPYNVNVKCYRLGNNRIALSFPHCRILKPLLMALVTKYLPLAQYCIELL

SEQ ID NO: 69450 - protein, 403 aa, Arabidopsis thaliana
  peptide (1)..(403): Ceres Seq. ID no. 1815031
  misc_feature (1)..(403): Homolog of NCBI NO: 25407557 NR Description: probable serine proteinase-like protein
  misc_feature (1)..(284): Homolog of NCBI NO: 30683929 NR Description: serine protease protein -related [Arabidopsis
  misc_feature (63)..(376): Homolog of NCBI NO: 20260612 NR Description: putative serine protease-like protein
  misc_feature (67)..(376): Homolog of NCBI NO: 38345945 NR Description: OSJNBb0103I08.16 [Oryza sativa (japonica
  misc_feature (104)..(376): Homolog of NCBI NO: 29367523 NR Description: putative serine protease-like protein [Oryza
  misc_feature (151)..(284): Homolog of NCBI NO: 7488185 NR Description: probable serine proteinase - Arabidopsis thaliana
  misc_feature (34)..(56): Homolog of NCBI NO: 7488185 NR Description: probable serine proteinase - Arabidopsis thaliana
  misc_feature (1)..(23): Homolog of NCBI NO: 7488185 NR Description: probable serine proteinase - Arabidopsis thaliana
  misc_feature (179)..(376): Homolog of NCBI NO: 22797893 NR Description: endoU protein [Xenopus laevis]
  misc_feature (179)..(364): Homolog of NCBI NO: 5174623 NR Description: placental protein 11 precursor [Homo sapiens]
MKATRGTRDPDLLGLMFVHHQFLFCVISFFYLLLRDFEFLLNDSSSGIWTWSQVVSETQALPYLQKAFNIQHFDFPTQEDQEENTYAAKVSEKQDFSKEQWQDYKRPASEQHYSDEVETYGNLEPSQLELSGLSEACNKLWELDLNRLVPGRIIKSTAEMGKGSMRELIWLKDYCSLGFCSLLDNYNPNEGYKEVVTEEERQEQAAFIEEISRTSVIKYLHRYLVLKDVAPGSYLEFKRMLTSLWFDLYGRGGTSGSSSAFEHVFVGEIKQSGGNKSLDSITGFSTSKPVTDRETTLLLRMQPDSETQLLTIQFEWNGVLKSVSSTLVGVSPEFELALYTMCFFMGTEDNHIQLGPYNVNVKCYRLGNNRIALSFPHCRILKPLLMALVTKYLPLAQYCIELL

SEQ ID NO: 69451 - DNA, 1116 bp, Arabidopsis thaliana
  misc_feature (1)..(1116): Ceres Seq. ID no. 1815137
atggagaaagagaaaaaaaacataagaggaagagagttcttgcaaaagtcagctccagaattaacgacgagaaagacaactttgtcgttcaatctcccaacaccaagatctctgccatctccaacgagtatcaaagacttgtacacagacagagaacaaaatcaaaatcaaaacctgagggttttttctttcaaggaactgagtgacgccacttgtgagtttagcaggaagctaaagatcggagaaggtggctttggtagtgtctataaagccaccattaacaatcccaccgtaggagattctcattcttctccacttaccgtagccgttaagaaactcaatagacaaagtctacagggtcacaagcaatggctagcagaggttcactttttgggagtggtgaatcaccctaacgttgtgaggctcttagggtattgctcagaggacagagagagacttttggtttacgagttgatgtctaatcgcagcttggaggatcatctcttcactctaagaaccttaacgttgtcgtggaaacaaaggctcgagatcatgcttggtgcagctcaaggattggcttatttgcacgaaatccaggtaatatacagagacttcaaatcatcaaatgtgctattaaatgaagaattccatccgaaattatccgattttggtctcgctagagaaggtcccgaaggagacaatactcacgttacaaccgcaagagttggaacagacggctatgccgctcccgagtatgtaataaccggtcacctcaagacacattgcgatgtatatagctttggagttgttttgtacgaaattatcactggtcgtcgcacattggaacgaatgaaacctttagctgaacaaaagcttctagaatgggtcaaaaaatatcctattaatagcaaaagattcaaaatgatcgttgactccaagctatgcaataagtatccaattgctatggtcaggagagtggctaaattggctgatcattgtgtgaacaagatcgataaagaaagacctaccatggcctttgtcgtcgaaagtcttacgaatatcattgaggaatcaaattctgaagatatgggaagttctgttggcattagaggctag

SEQ ID NO: 69452 - protein, 371 aa, Arabidopsis thaliana
  peptide (1)..(371): Ceres Seq. ID no. 1815138
  misc_feature (56)..(365): Homolog of NCBI NO: 7248457 NR Description: protein serine/threonine kinase [Lophopyrum >gi|13022177|gb|AAK11674.1|AF339747_1 protein kinase [Lophopyrum
  misc_feature (1)..(371): Homolog of NCBI NO: 7434305 NR Description: probable protein kinase - Arabidopsis thaliana NAK like protein kinase [Arabidopsis thaliana]
  misc_feature (1)..(371): Homolog of NCBI NO: 30684132 NR Description: protein kinase, putative [Arabidopsis thaliana]
  misc_feature (2)..(362): Homolog of NCBI NO: 15238002 NR Description: protein serine threonine kinase-like; protein id:
  misc_feature (34)..(357): Homolog of NCBI NO: 7488278 NR Description: probable protein kinase [imported] - Arabidopsis >gi|3461836|gb|AAC33222.1| putative protein kinase [Arabidopsis >gi|20197438|gb|AAM15076.1| putative protein kinase [Arabidopsis
  misc_feature (17)..(351): Homolog of NCBI NO: 38345946 NR Description: OSJNBb0103I08.17 [Oryza sativa (japonica
  misc_feature (58)..(359): Homolog of NCBI NO: 15232764 NR Description: putative protein kinase; protein id: At3g09830.1, by cDNA: gi_20268726 [Arabidopsis thaliana] putative protein kinase [Arabidopsis thaliana]
  misc_feature (5)..(351): Homolog of NCBI NO: 34901778 NR Description: protein serine/threonine kinase-like [Oryza
  misc_feature (42)..(359): Homolog of NCBI NO: 28416693 NR Description: At2g39110 [Arabidopsis thaliana]
  misc_feature (42)..(359): Homolog of NCBI NO: 30687780 NR Description: protein kinase, putative [Arabidopsis thaliana]
MEKEKKNIRGREFLQKSAPELTTRKTTLSFNLPTPRSLPSPTSIKDLYTDREQNQNQNLRVFSFKELSDATCEFSRKLKIGEGGFGSVYKATINNPTVGDSHSSPLTVAVKKLNRQSLQGHKQWLAEVHFLGVVNHPNVVRLLGYCSEDRERLLVYELMSNRSLEDHLFTLRTLTLSWKQRLEIMLGAAQGLAYLHEIQVIYRDFKSSNVLLNEEFHPKLSDFGLAREGPEGDNTHVTTARVGTDGYAAPEYVITGHLKTHCDVYSFGVVLYEIITGRRTLERMKPLAEQKLLEWVKKYPINSKRFKMIVDSKLCNKYPIAMVRRVAKLADHCVNKIDKERPTMAFVVESLTNIIEESNSEDMGSSVGIRG

SEQ ID NO: 69453 - protein, 213 aa, Arabidopsis thaliana
  peptide (1)..(213): Ceres Seq. ID no. 1815139
  misc_feature (1)..(213): Homolog of NCBI NO: 7434305 NR Description: probable protein kinase - Arabidopsis thaliana NAK like protein kinase [Arabidopsis thaliana]
  misc_feature (1)..(213): Homolog of NCBI NO: 30684132 NR Description: protein kinase, putative [Arabidopsis thaliana]
  misc_feature (1)..(204): Homolog of NCBI NO: 15238002 NR Description: protein serine threonine kinase-like; protein id:
  misc_feature (1)..(199): Homolog of NCBI NO: 7488278 NR Description: probable protein kinase [imported] - Arabidopsis >gi|3461836|gb|AAC33222.1| putative protein kinase [Arabidopsis >gi|20197438|gb|AAM15076.1| putative protein kinase [Arabidopsis
  misc_feature (1)..(193): Homolog of NCBI NO: 38345946 NR Description: OSJNBb0103I08.17 [Oryza sativa (japonica
  misc_feature (1)..(201): Homolog of NCBI NO: 15232764 NR Description: putative protein kinase; protein id: At3g09830.1, by cDNA: gi_20268726 [Arabidopsis thaliana] putative protein kinase [Arabidopsis thaliana]
  misc_feature (1)..(193): Homolog of NCBI NO: 34901778 NR Description: protein serine/threonine kinase-like [Oryza
  misc_feature (1)..(201): Homolog of NCBI NO: 28416693 NR Description: At2g39110 [Arabidopsis thaliana]
  misc_feature (1)..(201): Homolog of NCBI NO: 30687780 NR Description: protein kinase, putative [Arabidopsis thaliana]
  misc_feature (1)..(207): Homolog of NCBI NO: 7248457 NR Description: protein serine/threonine kinase [Lophopyrum >gi|13022177|gb|AAK11674.1|AF339747_1 protein kinase [Lophopyrum
MSNRSLEDHLFTLRTLTLSWKQRLEIMLGAAQGLAYLHEIQVIYRDFKSSNVLLNEEFHPKLSDFGLAREGPEGDNTHVTTARVGTDGYAAPEYVITGHLKTHCDVYSFGVVLYEIITGRRTLERMKPLAEQKLLEWVKKYPINSKRFKMIVDSKLCNKYPIAMVRRVAKLADHCVNKIDKERPTMAFVVESLTNIIEESNSEDMGSSVGIRG

SEQ ID NO: 69454 - protein, 187 aa, Arabidopsis thaliana
  peptide (1)..(187): Ceres Seq. ID no. 1815140
  misc_feature (1)..(187): Homolog of NCBI NO: 7434305 NR Description: probable protein kinase - Arabidopsis thaliana NAK like protein kinase [Arabidopsis thaliana]
  misc_feature (1)..(187): Homolog of NCBI NO: 30684132 NR Description: protein kinase, putative [Arabidopsis thaliana]
  misc_feature (1)..(178): Homolog of NCBI NO: 15238002 NR Description: protein serine threonine kinase-like; protein id:
  misc_feature (1)..(173): Homolog of NCBI NO: 7488278 NR Description: probable protein kinase [imported] - Arabidopsis >gi|3461836|gb|AAC33222.1| putative protein kinase [Arabidopsis >gi|20197438|gb|AAM15076.1| putative protein kinase [Arabidopsis
  misc_feature (1)..(167): Homolog of NCBI NO: 38345946 NR Description: OSJNBb0103I08.17 [Oryza sativa (japonica
  misc_feature (1)..(175): Homolog of NCBI NO: 15232764 NR Description: putative protein kinase; protein id: At3g09830.1, by cDNA: gi_20268726 [Arabidopsis thaliana] putative protein kinase [Arabidopsis thaliana]
  misc_feature (1)..(167): Homolog of NCBI NO: 34901778 NR Description: protein serine/threonine kinase-like [Oryza
  misc_feature (1)..(175): Homolog of NCBI NO: 28416693 NR Description: At2g39110 [Arabidopsis thaliana]
  misc_feature (1)..(175): Homolog of NCBI NO: 30687780 NR Description: protein kinase, putative [Arabidopsis thaliana]
  misc_feature (1)..(181): Homolog of NCBI NO: 7248457 NR Description: protein serine/threonine kinase [Lophopyrum >gi|13022177|gb|AAK11674.1|AF339747_1 protein kinase [Lophopyrum
MLGAAQGLAYLHEIQVIYRDFKSSNVLLNEEFHPKLSDFGLAREGPEGDNTHVTTARVGTDGYAAPEYVITGHLKTHCDVYSFGVVLYEIITGRRTLERMKPLAEQKLLEWVKKYPINSKRFKMIVDSKLCNKYPIAMVRRVAKLADHCVNKIDKERPTMAFVVESLTNIIEESNSEDMGSSVGIRG

SEQ ID NO: 69455 - DNA, 1095 bp, Arabidopsis thaliana
  misc_feature (1)..(1095): Ceres Seq. ID no. 1815216
  misc_feature: MA Experiment ID: 20000184 Result: Down-regulated in Transcription
  misc_feature: MA Experiment 20000184 PARAMETER Experiment Name: At_Shoots__P Parameter: Age (day) Value: 7
  misc_feature: MA Experiment 20000184 PARAMETER Experiment Name: At_Shoots__P Parameter: Tissue Value: Shoots vs. Whole Plant
  misc_feature: MA Experiment ID: 20000234 Result: Down-regulated in Transcription
  misc_feature: MA Experiment 20000234 PARAMETER Experiment Name: At_Siliques_P Parameter: Age (day) Value: 21
  misc_feature: MA Experiment 20000234 PARAMETER Experiment Name: At_Siliques_P Parameter: Organism Value: A. thaliana
  misc_feature: MA Experiment 20000234 PARAMETER Experiment Name: At_Siliques_P Parameter: Plant Line Value: WS
  misc_feature: MA Experiment 20000234 PARAMETER Experiment Name: At_Siliques_P Parameter: Tissue Value: Less Than 5mm Siliques vs. Whole Plant
  misc_feature: MA Experiment ID: 20000235 Result: Down-regulated in Transcription
  misc_feature: MA Experiment 20000235 PARAMETER Experiment Name: At_Siliques_P Parameter: Age (day) Value: 21
  misc_feature: MA Experiment 20000235 PARAMETER Experiment Name: At_Siliques_P Parameter: Organism Value: A. thaliana
  misc_feature: MA Experiment 20000235 PARAMETER Experiment Name: At_Siliques_P Parameter: Plant Line Value: WS
  misc_feature: MA Experiment 20000235 PARAMETER Experiment Name: At_Siliques_P Parameter: Tissue Value: 5-10mm Siliques vs. Whole Plant
  misc_feature: MA Experiment ID: 20000264 Result: Down-regulated in Transcription
  misc_feature: MA Experiment 20000264 PARAMETER Experiment Name: At_Open_Flower_P Parameter: Age (day) Value: 21
  misc_feature: MA Experiment 20000264 PARAMETER Experiment Name: At_Open_Flower_P Parameter: Plant Line Value: WS
  misc_feature: MA Experiment 20000264 PARAMETER Experiment Name: At_Open_Flower_P Parameter: Tissue Value: Open Flower vs. Whole Plant
  misc_feature: MA Experiment ID: 20000265 Result: Down-regulated in Transcription
  misc_feature: MA Experiment 20000265 PARAMETER Experiment Name: At_Open_Flower_P Parameter: Age (day) Value: 21
  misc_feature: MA Experiment 20000265 PARAMETER Experiment Name: At_Open_Flower_P Parameter: Plant Line Value: WS
  misc_feature: MA Experiment 20000265 PARAMETER Experiment Name: At_Open_Flower_P Parameter: Tissue Value: Closed Flower vs. Whole Plant
  misc_feature: MA Experiment ID: 20000286 Result: Down-regulated in Transcription
  misc_feature: MA Experiment 20000286 PARAMETER Experiment Name: At_Open_Flower_P Parameter: Age (day) Value: 21
  misc_feature: MA Experiment 20000286 PARAMETER Experiment Name: At_Open_Flower_P Parameter: Plant Line Value: WS
  misc_feature: MA Experiment 20000286 PARAMETER Experiment Name: At_Open_Flower_P Parameter: Tissue Value: Half Open vs. Whole Plant
atggcggatgttaaggactcagtgattaccaagtacggaatcgtagggattggtatgatgggaagagaacatctcatcaatcttcaccatctccgtgaccaaggcctcgccgtcgtttgcatcgccgatcctcaccctccttcacagctcctggccattgaactcgctcaatcttttggatgggagcttaaggttttctcaggacacgaggagttgctcaagagtgagctgtgtgacgttattgttgtctcttctccaaatatgactcatcatcagattcttatggacattatcaattattcaaaaccgcatcatgttcttgttgagaagcctttatgcaccacagttgcagattgcaaacaggttttggaggctgcaaagaaaaggtcagatatggtggtgcaagttgggttggagtacagatacatgccgccagttgctaagctaatagaacaagtaaaaggcagagactttggtaatgtcaagatggtagcaatccgagaacatagattccctttcttggttaaggtaggcttaaacaagatgggactatggaccttagtggagaaatgctgccacttctttgatctaatgaggctctttgccggtgcaaatcctgtctgtgtgatggcttctggaggcatggatgtgaaccacaaggatgaagtttatggtggaaaggtgcctgatataattgataacgcatatgttattattgagtttgacaatggatgtcgtgggatgctcgatctttgcatgtttgctgaaggaagcaaaaacgagcaagaaatttctgttactggtgacattggaaagggggaggcacttgttccagagggtatagttcgatctggcagtcgtattggaggaagagaacacgttcaaacaataaaagcagaagatgaaagaataaaatatgaagggttgcatcacgggtcaagttacttggaacacctcaccttcttatcagcaatcagaggtgaaggaatagcagctgttgatttggaagacggattgatggctgttgccatgggagttgctgcacagctctccattcaggagcgccgctatgtaaccattgacgaggtcttgtga

SEQ ID NO: 69456 - protein, 364 aa, Arabidopsis thaliana
  peptide (1)..(364): Ceres Seq. ID no. 1815217
  misc_feature (10)..(138): Pfam Name: Oxidoreductase family, NAD-binding Rossmann fold Pfam Description: Oxidoreductase family, NAD-binding Rossmann fold
  misc_feature (1)..(364): Homolog of NCBI NO: 15236047 NR Description: putative protein; protein id: At4g17370.1
  misc_feature (64)..(362): Homolog of NCBI NO: 37573125 NR Description: organic cation transporter-like protein [Oryza
  misc_feature (11)..(56): Homolog of NCBI NO: 37573125 NR Description: organic cation transporter-like protein [Oryza
  misc_feature (64)..(364): Homolog of NCBI NO: 15643180 NR Description: dehydrogenase [Thermotoga maritima]
  misc_feature (11)..(223): Homolog of NCBI NO: 27381029 NR Description: bll5918 [Bradyrhizobium japonicum]
  misc_feature (14)..(353): Homolog of NCBI NO: 16766065 NR Description: putative dehydrogenase [Salmonella typhimurium >gi|16421300|gb|AAL21639.1| putative dehydrogenase [Salmonella
  misc_feature (11)..(169): Homolog of NCBI NO: 16767671 NR Description: putative dehydrogenase [Salmonella typhimurium >gi|16422988|gb|AAL23245.1| putative dehydrogenase [Salmonella
  misc_feature (8)..(349): Homolog of NCBI NO: 40743395 NR Description: hypothetical protein AN5425.2 [Aspergillus
  misc_feature (4)..(271): Homolog of NCBI NO: 21229154 NR Description: oxidoreductase [Methanosarcina mazei Goe1]
  misc_feature (11)..(364): Homolog of NCBI NO: 15614783 NR Description: dehydrogenase [Bacillus halodurans]
MADVKDSVITKYGIVGIGMMGREHLINLHHLRDQGLAVVCIADPHPPSQLLAIELAQSFGWELKVFSGHEELLKSELCDVIVVSSPNMTHHQILMDIINYSKPHHVLVEKPLCTTVADCKQVLEAAKKRSDMVVQVGLEYRYMPPVAKLIEQVKGRDFGNVKMVAIREHRFPFLVKVGLNKMGLWTLVEKCCHFFDLMRLFAGANPVCVMASGGMDVNHKDEVYGGKVPDIIDNAYVIIEFDNGCRGMLDLCMFAEGSKNEQEISVTGDIGKGEALVPEGIVRSGSRIGGREHVQTIKAEDERIKYEGLHHGSSYLEHLTFLSAIRGEGIAAVDLEDGLMAVAMGVAAQLSIQERRYVTIDEVL

SEQ ID NO: 69457 - protein, 346 aa, Arabidopsis thaliana
  peptide (1)..(346): Ceres Seq. ID no. 1815218
  misc_feature (1)..(120): Pfam Name: Oxidoreductase family, NAD-binding Rossmann fold Pfam Description: Oxidoreductase family, NAD-binding Rossmann fold
  misc_feature (1)..(346): Homolog of NCBI NO: 15236047 NR Description: putative protein; protein id: At4g17370.1
  misc_feature (46)..(344): Homolog of NCBI NO: 37573125 NR Description: organic cation transporter-like protein [Oryza
  misc_feature (1)..(38): Homolog of NCBI NO: 37573125 NR Description: organic cation transporter-like protein [Oryza
  misc_feature (46)..(346): Homolog of NCBI NO: 15643180 NR Description: dehydrogenase [Thermotoga maritima]
  misc_feature (1)..(205): Homolog of NCBI NO: 27381029 NR Description: bll5918 [Bradyrhizobium japonicum]
  misc_feature (1)..(335): Homolog of NCBI NO: 16766065 NR Description: putative dehydrogenase [Salmonella typhimurium >gi|16421300|gb|AAL21639.1| putative dehydrogenase [Salmonella
  misc_feature (1)..(151): Homolog of NCBI NO: 16767671 NR Description: putative dehydrogenase [Salmonella typhimurium >gi|16422988|gb|AAL23245.1| putative dehydrogenase [Salmonella
  misc_feature (1)..(331): Homolog of NCBI NO: 40743395 NR Description: hypothetical protein AN5425.2 [Aspergillus
  misc_feature (1)..(253): Homolog of NCBI NO: 21229154 NR Description: oxidoreductase [Methanosarcina mazei Goe1]
  misc_feature (1)..(346): Homolog of NCBI NO: 15614783 NR Description: dehydrogenase [Bacillus halodurans]
MMGREHLINLHHLRDQGLAVVCIADPHPPSQLLAIELAQSFGWELKVFSGHEELLKSELCDVIVVSSPNMTHHQILMDIINYSKPHHVLVEKPLCTTVADCKQVLEAAKKRSDMVVQVGLEYRYMPPVAKLIEQVKGRDFGNVKMVAIREHRFPFLVKVGLNKMGLWTLVEKCCHFFDLMRLFAGANPVCVMASGGMDVNHKDEVYGGKVPDIIDNAYVIIEFDNGCRGMLDLCMFAEGSKNEQEISVTGDIGKGEALVPEGIVRSGSRIGGREHVQTIKAEDERIKYEGLHHGSSYLEHLTFLSAIRGEGIAAVDLEDGLMAVAMGVAAQLSIQERRYVTIDEVL

SEQ ID NO: 69458 - protein, 345 aa, Arabidopsis thaliana
  peptide (1)..(345): Ceres Seq. ID no. 1815219
  misc_feature (1)..(119): Pfam Name: Oxidoreductase family, NAD-binding Rossmann fold Pfam Description: Oxidoreductase family, NAD-binding Rossmann fold
  misc_feature (1)..(345): Homolog of NCBI NO: 15236047 NR Description: putative protein; protein id: At4g17370.1
  misc_feature (45)..(343): Homolog of NCBI NO: 37573125 NR Description: organic cation transporter-like protein [Oryza
  misc_feature (1)..(37): Homolog of NCBI NO: 37573125 NR Description: organic cation transporter-like protein [Oryza
  misc_feature (45)..(345): Homolog of NCBI NO: 15643180 NR Description: dehydrogenase [Thermotoga maritima]
  misc_feature (1)..(204): Homolog of NCBI NO: 27381029 NR Description: bll5918 [Bradyrhizobium japonicum]
  misc_feature (1)..(334): Homolog of NCBI NO: 16766065 NR Description: putative dehydrogenase [Salmonella typhimurium >gi|16421300|gb|AAL21639.1| putative dehydrogenase [Salmonella
  misc_feature (1)..(150): Homolog of NCBI NO: 16767671 NR Description: putative dehydrogenase [Salmonella typhimurium >gi|16422988|gb|AAL23245.1| putative dehydrogenase [Salmonella
  misc_feature (1)..(330): Homolog of NCBI NO: 40743395 NR Description: hypothetical protein AN5425.2 [Aspergillus
  misc_feature (1)..(252): Homolog of NCBI NO: 21229154 NR Description: oxidoreductase [Methanosarcina mazei Goe1]
  misc_feature (1)..(345): Homolog of NCBI NO: 15614783 NR Description: dehydrogenase [Bacillus halodurans]
MGREHLINLHHLRDQGLAVVCIADPHPPSQLLAIELAQSFGWELKVFSGHEELLKSELCDVIVVSSPNMTHHQILMDIINYSKPHHVLVEKPLCTTVADCKQVLEAAKKRSDMVVQVGLEYRYMPPVAKLIEQVKGRDFGNVKMVAIREHRFPFLVKVGLNKMGLWTLVEKCCHFFDLMRLFAGANPVCVMASGGMDVNHKDEVYGGKVPDIIDNAYVIIEFDNGCRGMLDLCMFAEGSKNEQEISVTGDIGKGEALVPEGIVRSGSRIGGREHVQTIKAEDERIKYEGLHHGSSYLEHLTFLSAIRGEGIAAVDLEDGLMAVAMGVAAQLSIQERRYVTIDEVL

SEQ ID NO: 69459 - DNA, 951 bp, Arabidopsis thaliana
  misc_feature (1)..(951): Ceres Seq. ID no. 1815443
  misc_feature: MA Experiment ID: 20000179 Result: Up-regulated in Transcription
  misc_feature: MA Experiment 20000179 PARAMETER Experiment Name: At_Germinating_Seeds_P Parameter: Age (hr) Value: 6 vs. 0
  misc_feature: MA Experiment 20000179 PARAMETER Experiment Name: At_Germinating_Seeds_P Parameter: Tissue Value: Germinating Seeds
  misc_feature: MA Experiment ID: 20000182 Result: Down-regulated in Transcription
  misc_feature: MA Experiment 20000182 PARAMETER Experiment Name: At_2mM_SA_P Parameter: Age (day) Value: 14
  misc_feature: MA Experiment 20000182 PARAMETER Experiment Name: At_2mM_SA_P Parameter: Organism Value: A. thaliana
  misc_feature: MA Experiment 20000182 PARAMETER Experiment Name: At_2mM_SA_P Parameter: Plant Line Value: WS
  misc_feature: MA Experiment 20000182 PARAMETER Experiment Name: At_2mM_SA_P Parameter: Timepoint (hr) Value: 6
  misc_feature: MA Experiment 20000182 PARAMETER Experiment Name: At_2mM_SA_P Parameter: Tissue Value: Aerial
  misc_feature: MA Experiment 20000182 PARAMETER Experiment Name: At_2mM_SA_P Parameter: Treatment Value: 2mM SA vs. No Treatment
  misc_feature: MA Experiment ID: 20000234 Result: Up-regulated in Transcription
  misc_feature: MA Experiment 20000234 PARAMETER Experiment Name: At_Siliques_P Parameter: Age (day) Value: 21
  misc_feature: MA Experiment 20000234 PARAMETER Experiment Name: At_Siliques_P Parameter: Organism Value: A. thaliana
  misc_feature: MA Experiment 20000234 PARAMETER Experiment Name: At_Siliques_P Parameter: Plant Line Value: WS
  misc_feature: MA Experiment 20000234 PARAMETER Experiment Name: At_Siliques_P Parameter: Tissue Value: Less Than 5mm Siliques vs. Whole Plant
  misc_feature: MA Experiment ID: 20000265 Result: Up-regulated in Transcription
  misc_feature: MA Experiment 20000265 PARAMETER Experiment Name: At_Open_Flower_P Parameter: Age (day) Value: 21
  misc_feature: MA Experiment 20000265 PARAMETER Experiment Name: At_Open_Flower_P Parameter: Plant Line Value: WS
  misc_feature: MA Experiment 20000265 PARAMETER Experiment Name: At_Open_Flower_P Parameter: Tissue Value: Closed Flower vs. Whole Plant
  misc_feature: MA Experiment ID: 20000495 Result: Up-regulated in Transcription
  misc_feature: MA Experiment 20000495 PARAMETER Experiment Name: At_Guard_Cells_P Parameter: Harvest Date Value: 8/2/2002
  misc_feature: MA Experiment 20000495 PARAMETER Experiment Name: At_Guard_Cells_P Parameter: Organism Value: A. thaliana
  misc_feature: MA Experiment 20000495 PARAMETER Experiment Name: At_Guard_Cells_P Parameter: Tissue Value: Guard Cells vs. Leaves
atgtcttcttcgtctcctcctttctgttccggtggaagtcggaaggagctccgagataaagaaattacgagtaagagtgatgatacacaggcgagttatgttttaggatctaaatttgtggacccgacacgtgttcttcaactttcatggctaccaaggaatgtatgttttactgcttcaaattttaggggtctgaagcaatttggtatgtatagggtctttctataccgcgggttcttgtcggaggaagagtgtgatcatctgatatctctgagaaaggagactacagaggtttactcagtggatgctgatggaaagacgcaacttgatccagtagttgctgggattgaagaaaaagtttctgcgtggactttcctcccaggaggtctcttttcttgtggccaaactgctggcttatgtttctctcttgacgcacatttttcagaaaatggcggctctatcaaggtaagaagttacacttctgagaagtcaggaaagaagttggattattttggagaggaacctagctccgtattgcatgaatctttgctggcaaccgtcgttctctacctctcaaacacaactcaaggaggagagcttctcttcccaaattcagagatgaaacccaaaaacagttgcttggagggcggtaacattttaagaccagtaaaaggaaacgcaattctgttcttcaccaggctcttgaatgcatctttggatgggaaaagcactcatttgaggtgccctgtggtgaaaggagaactgttagtggcaacaaaactgatctatgcgaagaaacaagcaagaattgaggagagtggggaatgcagtgatgaagacgaaaactgtggacgatgggctaagcttggggagtgcaagaaaaaccctgtctatatgattggctctcctgattactacggtacctgcagaaagagttgtaacgcttgttga

SEQ ID NO: 69460 - protein, 316 aa, Arabidopsis thaliana
  peptide (1)..(316): Ceres Seq. ID no. 1815444
  misc_feature (275)..(316): Pfam Name: ShTK domain Pfam Description: ShTK domain
  misc_feature (1)..(316): Homolog of NCBI NO: 7486817 NR Description: hypothetical protein M7J2.30 - Arabidopsis >gi|2980790|emb|CAA18166.1| hypothetical protein [Arabidopsis
  misc_feature (2)..(316): Homolog of NCBI NO: 25365919 NR Description: hypothetical protein AT4g25600 [imported] - thaliana >gi|7269410|emb|CAB81370.1| hypothetical protein
  misc_feature (149)..(316): Homolog of NCBI NO: 30686940 NR Description: ShTK domain-containing protein [Arabidopsis >gi|26451153|dbj|BAC42680.1| unknown protein [Arabidopsis >gi|29893542|gb|AAP06823.1| unknown protein [Arabidopsis
  misc_feature (72)..(128): Homolog of NCBI NO: 30686940 NR Description: ShTK domain-containing protein [Arabidopsis >gi|26451153|dbj|BAC42680.1| unknown protein [Arabidopsis >gi|29893542|gb|AAP06823.1| unknown protein [Arabidopsis
  misc_feature (1)..(53): Homolog of NCBI NO: 30686940 NR Description: ShTK domain-containing protein [Arabidopsis >gi|26451153|dbj|BAC42680.1| unknown protein [Arabidopsis >gi|29893542|gb|AAP06823.1| unknown protein [Arabidopsis
  misc_feature (3)..(316): Homolog of NCBI NO: 9294583 NR Description: prolyl 4-hydroxylase alpha subunit-like protein
  misc_feature (108)..(316): Homolog of NCBI NO: 37534316 NR Description: unknown protein [Oryza sativa (japonica
  misc_feature (72)..(107): Homolog of NCBI NO: 37534316 NR Description: unknown protein [Oryza sativa (japonica
  misc_feature (41)..(316): Homolog of NCBI NO: 18405808 NR Description: prolyl 4-hydroxylase, putative; protein id: supported by cDNA: 8330., supported by cDNA: gi_18086436
  misc_feature (41)..(316): Homolog of NCBI NO: 18086437 NR Description: AT3g28480/MFJ20_16 [Arabidopsis thaliana]
MSSSSPPFCSGGSRKELRDKEITSKSDDTQASYVLGSKFVDPTRVLQLSWLPRNVCFTASNFRGLKQFGMYRVFLYRGFLSEEECDHLISLRKETTEVYSVDADGKTQLDPVVAGIEEKVSAWTFLPGGLFSCGQTAGLCFSLDAHFSENGGSIKVRSYTSEKSGKKLDYFGEEPSSVLHESLLATVVLYLSNTTQGGELLFPNSEMKPKNSCLEGGNILRPVKGNAILFFTRLLNASLDGKSTHLRCPVVKGELLVATKLIYAKKQARIEESGECSDEDENCGRWAKLGECKKNPVYMIGSPDYYGTCRKSCNAC

SEQ ID NO: 69461 - protein, 247 aa, Arabidopsis thaliana
  peptide (1)..(247): Ceres Seq. ID no. 1815445
  misc_feature (206)..(247): Pfam Name: ShTK domain Pfam Description: ShTK domain
  misc_feature (1)..(247): Homolog of NCBI NO: 7486817 NR Description: hypothetical protein M7J2.30 - Arabidopsis >gi|2980790|emb|CAA18166.1| hypothetical protein [Arabidopsis
  misc_feature (1)..(247): Homolog of NCBI NO: 25365919 NR Description: hypothetical protein AT4g25600 [imported] - thaliana >gi|7269410|emb|CAB81370.1| hypothetical protein
  misc_feature (80)..(247): Homolog of NCBI NO: 30686940 NR Description: ShTK domain-containing protein [Arabidopsis >gi|26451153|dbj|BAC42680.1| unknown protein [Arabidopsis >gi|29893542|gb|AAP06823.1| unknown protein [Arabidopsis
  misc_feature (3)..(59): Homolog of NCBI NO: 30686940 NR Description: ShTK domain-containing protein [Arabidopsis >gi|26451153|dbj|BAC42680.1| unknown protein [Arabidopsis >gi|29893542|gb|AAP06823.1| unknown protein [Arabidopsis
  misc_feature (1)..(247): Homolog of NCBI NO: 9294583 NR Description: prolyl 4-hydroxylase alpha subunit-like protein
  misc_feature (39)..(247): Homolog of NCBI NO: 37534316 NR Description: unknown protein [Oryza sativa (japonica
  misc_feature (3)..(38): Homolog of NCBI NO: 37534316 NR Description: unknown protein [Oryza sativa (japonica
  misc_feature (1)..(247): Homolog of NCBI NO: 18405808 NR Description: prolyl 4-hydroxylase, putative; protein id: supported by cDNA: 8330., supported by cDNA: gi_18086436
  misc_feature (1)..(247): Homolog of NCBI NO: 18086437 NR Description: AT3g28480/MFJ20_16 [Arabidopsis thaliana]
  misc_feature (1)..(247): Homolog of NCBI NO: 30689216 NR Description: oxidoreductase, 2OG-Fe(II) oxygenase family
MYRVFLYRGFLSEEECDHLISLRKETTEVYSVDADGKTQLDPVVAGIEEKVSAWTFLPGGLFSCGQTAGLCFSLDAHFSENGGSIKVRSYTSEKSGKKLDYFGEEPSSVLHESLLATVVLYLSNTTQGGELLFPNSEMKPKNSCLEGGNILRPVKGNAILFFTRLLNASLDGKSTHLRCPVVKGELLVATKLIYAKKQARIEESGECSDEDENCGRWAKLGECKKNPVYMIGSPDYYGTCRKSCNAC

SEQ ID NO: 69462 - DNA, 771 bp, Arabidopsis thaliana
  misc_feature (1)..(771): Ceres Seq. ID no. 1815508
  misc_feature: MA Experiment ID: 20000264 Result: Up-regulated in Transcription
  misc_feature: MA Experiment 20000264 PARAMETER Experiment Name: At_Open_Flower_P Parameter: Age (day) Value: 21
  misc_feature: MA Experiment 20000264 PARAMETER Experiment Name: At_Open_Flower_P Parameter: Plant Line Value: WS
  misc_feature: MA Experiment 20000264 PARAMETER Experiment Name: At_Open_Flower_P Parameter: Tissue Value: Open Flower vs. Whole Plant
  misc_feature: MA Experiment ID: 20000265 Result: Up-regulated in Transcription
  misc_feature: MA Experiment 20000265 PARAMETER Experiment Name: At_Open_Flower_P Parameter: Age (day) Value: 21
  misc_feature: MA Experiment 20000265 PARAMETER Experiment Name: At_Open_Flower_P Parameter: Plant Line Value: WS
  misc_feature: MA Experiment 20000265 PARAMETER Experiment Name: At_Open_Flower_P Parameter: Tissue Value: Closed Flower vs. Whole Plant
  misc_feature: MA Experiment ID: 20000286 Result: Up-regulated in Transcription
  misc_feature: MA Experiment 20000286 PARAMETER Experiment Name: At_Open_Flower_P Parameter: Age (day) Value: 21
  misc_feature: MA Experiment 20000286 PARAMETER Experiment Name: At_Open_Flower_P Parameter: Plant Line Value: WS
  misc_feature: MA Experiment 20000286 PARAMETER Experiment Name: At_Open_Flower_P Parameter: Tissue Value: Half Open vs. Whole Plant
  misc_feature: MA Experiment ID: 20000794 Result: Up-regulated in Transcription
  misc_feature: MA Experiment 20000794 PARAMETER Experiment Name: At_Petals_P Parameter: Age (day) Value: 23-25 days
  misc_feature: MA Experiment 20000794 PARAMETER Experiment Name: At_Petals_P Parameter: Plant Line Value: WS
  misc_feature: MA Experiment 20000794 PARAMETER Experiment Name: At_Petals_P Parameter: Tissue Value: Petals vs. Whole plant
atgagaagaatgattccaacatcgttttcaagtaagtttcaaggagtactaagtatgaatgcgttgagatgttatgtatcagagtttatctcaaccttcttcttcgtcctcgcagccgttggttctgtcatgtcttcaaggaaattgatggctggtgatgtgtctggtccgtttggtgttttaataccggcgattgctaatgcgttggcgttatcatcgtcagtttacatctcttggaacgtctctggtggtcatgtgaatccagcggttacgtttgcgatggctgttgctggtcggattagcgttccaaccgctatgttttattggacttctcagatgattgcctctgttatggcttgccttgttcttaaagtaaccgtcatggaacagcacgtaccgatttataagattgctggagaaatgactggatttggagcatctgttcttgaaggtgttttagctttcgtcttggtttatactgtgttcacggctagcgatcccagacgtgggctacctttagcagtgggacctatatttatagggtttgttgcgggagccaatgttctagccgctggtccattctctggaggttcaatgaatcctgcgtgtgcctttgggtcggcgatggtttacggaagctttaagaaccaagctgtgtattgggttgggcctctgcttggaggagccacagctgctttagtgtatgataacgtggtggtccctgtagaagatgatcgtggttcatctactggtgatgccattggtgtgtaa

SEQ ID NO: 69463 - protein, 256 aa, Arabidopsis thaliana
  peptide (1)..(256): Ceres Seq. ID no. 1815509
  misc_feature (15)..(235): Pfam Name: Major intrinsic protein Pfam Description: Major intrinsic protein
  misc_feature (1)..(256): Homolog of NCBI NO: 15232798 NR Description: aquaporin-like protein; protein id: At3g47440.1
  misc_feature (21)..(241): Homolog of NCBI NO: 9623336 NR Description: tonoplast intrinsic protein 2 [Hordeum vulgare]
  misc_feature (18)..(241): Homolog of NCBI NO: 13447837 NR Description: tonoplast membrane integral protein ZmTIP5-1 [Zea
  misc_feature (4)..(240): Homolog of NCBI NO: 2058706 NR Description: Rb7 [Lycopersicon esculentum]
  misc_feature (4)..(240): Homolog of NCBI NO: 267135 NR Description: TONOPLAST INTRINSIC PROTEIN, ROOT-SPECIFIC
  misc_feature (21)..(241): Homolog of NCBI NO: 38605853 NR Description: OSJNBb0034G17.11 [Oryza sativa (japonica
  misc_feature (4)..(240): Homolog of NCBI NO: 126959 NR Description: Tonoplast intrinsic protein, root-specific RB7-5A
  misc_feature (4)..(240): Homolog of NCBI NO: 11276918 NR Description: membrane channel protein [imported] - potato >gi|1518057|gb|AAB67881.1| membrane channel protein [Solanum
  misc_feature (4)..(244): Homolog of NCBI NO: 14140156 NR Description: putative aquaporin [Oryza sativa]
  misc_feature (4)..(240): Homolog of NCBI NO: 9623335 NR Description: tonoplast intrinsic protein 1 [Hordeum vulgare]
MRRMIPTSFSSKFQGVLSMNALRCYVSEFISTFFFVLAAVGSVMSSRKLMAGDVSGPFGVLIPAIANALALSSSVYISWNVSGGHVNPAVTFAMAVAGRISVPTAMFYWTSQMIASVMACLVLKVTVMEQHVPIYKIAGEMTGFGASVLEGVLAFVLVYTVFTASDPRRGLPLAVGPIFIGFVAGANVLAAGPFSGGSMNPACAFGSAMVYGSFKNQAVYWVGPLLGGATAALVYDNVVVPVEDDRGSSTGDAIGV

SEQ ID NO: 69464 - protein, 253 aa, Arabidopsis thaliana
  peptide (1)..(253): Ceres Seq. ID no. 1815510
  misc_feature (12)..(232): Pfam Name: Major intrinsic protein Pfam Description: Major intrinsic protein
  misc_feature (1)..(253): Homolog of NCBI NO: 15232798 NR Description: aquaporin-like protein; protein id: At3g47440.1
  misc_feature (18)..(238): Homolog of NCBI NO: 9623336 NR Description: tonoplast intrinsic protein 2 [Hordeum vulgare]
  misc_feature (15)..(238): Homolog of NCBI NO: 13447837 NR Description: tonoplast membrane integral protein ZmTIP5-1 [Zea
  misc_feature (1)..(237): Homolog of NCBI NO: 2058706 NR Description: Rb7 [Lycopersicon esculentum]
  misc_feature (1)..(237): Homolog of NCBI NO: 267135 NR Description: TONOPLAST INTRINSIC PROTEIN, ROOT-SPECIFIC
  misc_feature (18)..(238): Homolog of NCBI NO: 38605853 NR Description: OSJNBb0034G17.11 [Oryza sativa (japonica
  misc_feature (1)..(237): Homolog of NCBI NO: 126959 NR Description: Tonoplast intrinsic protein, root-specific RB7-5A
  misc_feature (1)..(237): Homolog of NCBI NO: 11276918 NR Description: membrane channel protein [imported] - potato >gi|1518057|gb|AAB67881.1| membrane channel protein [Solanum
  misc_feature (1)..(241): Homolog of NCBI NO: 14140156 NR Description: putative aquaporin [Oryza sativa]
  misc_feature (1)..(237): Homolog of NCBI NO: 9623335 NR Description: tonoplast intrinsic protein 1 [Hordeum vulgare]
MIPTSFSSKFQGVLSMNALRCYVSEFISTFFFVLAAVGSVMSSRKLMAGDVSGPFGVLIPAIANALALSSSVYISWNVSGGHVNPAVTFAMAVAGRISVPTAMFYWTSQMIASVMACLVLKVTVMEQHVPIYKIAGEMTGFGASVLEGVLAFVLVYTVFTASDPRRGLPLAVGPIFIGFVAGANVLAAGPFSGGSMNPACAFGSAMVYGSFKNQAVYWVGPLLGGATAALVYDNVVVPVEDDRGSSTGDAIGV

SEQ ID NO: 69465 - protein, 238 aa, Arabidopsis thaliana
  peptide (1)..(238): Ceres Seq. ID no. 1815511
  misc_feature (1)..(217): Pfam Name: Major intrinsic protein Pfam Description: Major intrinsic protein
  misc_feature (1)..(238): Homolog of NCBI NO: 15232798 NR Description: aquaporin-like protein; protein id: At3g47440.1
  misc_feature (3)..(223): Homolog of NCBI NO: 9623336 NR Description: tonoplast intrinsic protein 2 [Hordeum vulgare]
  misc_feature (1)..(223): Homolog of NCBI NO: 13447837 NR Description: tonoplast membrane integral protein ZmTIP5-1 [Zea
  misc_feature (1)..(222): Homolog of NCBI NO: 2058706 NR Description: Rb7 [Lycopersicon esculentum]
  misc_feature (1)..(222): Homolog of NCBI NO: 267135 NR Description: TONOPLAST INTRINSIC PROTEIN, ROOT-SPECIFIC
  misc_feature (3)..(223): Homolog of NCBI NO: 38605853 NR Description: OSJNBb0034G17.11 [Oryza sativa (japonica
  misc_feature (1)..(222): Homolog of NCBI NO: 126959 NR Description: Tonoplast intrinsic protein, root-specific RB7-5A
  misc_feature (1)..(222): Homolog of NCBI NO: 11276918 NR Description: membrane channel protein [imported] - potato >gi|1518057|gb|AAB67881.1| membrane channel protein [Solanum
  misc_feature (1)..(226): Homolog of NCBI NO: 14140156 NR Description: putative aquaporin [Oryza sativa]
  misc_feature (1)..(222): Homolog of NCBI NO: 9623335 NR Description: tonoplast intrinsic protein 1 [Hordeum vulgare]
MNALRCYVSEFISTFFFVLAAVGSVMSSRKLMAGDVSGPFGVLIPAIANALALSSSVYISWNVSGGHVNPAVTFAMAVAGRISVPTAMFYWTSQMIASVMACLVLKVTVMEQHVPIYKIAGEMTGFGASVLEGVLAFVLVYTVFTASDPRRGLPLAVGPIFIGFVAGANVLAAGPFSGGSMNPACAFGSAMVYGSFKNQAVYWVGPLLGGATAALVYDNVVVPVEDDRGSSTGDAIGV

SEQ ID NO: 69466 - DNA, 603 bp, Arabidopsis thaliana
  misc_feature (1)..(603): Ceres Seq. ID no. 1815672
  misc_feature: MA Experiment ID: 20000180 Result: Up-regulated in Transcription
  misc_feature: MA Experiment 20000180 PARAMETER Experiment Name: At_Germinating_Seeds_P Parameter: Age (hr) Value: 24 vs. 0
  misc_feature: MA Experiment 20000180 PARAMETER Experiment Name: At_Germinating_Seeds_P Parameter: Tissue Value: Germinating Seeds
  misc_feature: MA Experiment ID: 20000184 Result: Up-regulated in Transcription
  misc_feature: MA Experiment 20000184 PARAMETER Experiment Name: At_Shoots__P Parameter: Age (day) Value: 7
  misc_feature: MA Experiment 20000184 PARAMETER Experiment Name: At_Shoots__P Parameter: Tissue Value: Shoots vs. Whole Plant
  misc_feature: MA Experiment ID: 20000436 Result: Down-regulated in Transcription
  misc_feature: MA Experiment 20000436 PARAMETER Experiment Name: At_Drought_P Parameter: Age (day) Value: 7
  misc_feature: MA Experiment 20000436 PARAMETER Experiment Name: At_Drought_P Parameter: Organism Value: A. thaliana
  misc_feature: MA Experiment 20000436 PARAMETER Experiment Name: At_Drought_P Parameter: Plant Line Value: WS
  misc_feature: MA Experiment 20000436 PARAMETER Experiment Name: At_Drought_P Parameter: Timepoint (hr) Value: 12
  misc_feature: MA Experiment 20000436 PARAMETER Experiment Name: At_Drought_P Parameter: Tissue Value: Whole Plant
  misc_feature: MA Experiment 20000436 PARAMETER Experiment Name: At_Drought_P Parameter: Treatment Value: Drought vs. No Drought
  misc_feature: MA Experiment ID: 20000437 Result: Down-regulated in Transcription
  misc_feature: MA Experiment 20000437 PARAMETER Experiment Name: At_Drought_P Parameter: Age (day) Value: 8
  misc_feature: MA Experiment 20000437 PARAMETER Experiment Name: At_Drought_P Parameter: Organism Value: A. thaliana
  misc_feature: MA Experiment 20000437 PARAMETER Experiment Name: At_Drought_P Parameter: Plant Line Value: WS
  misc_feature: MA Experiment 20000437 PARAMETER Experiment Name: At_Drought_P Parameter: Timepoint (hr) Value: 24
  misc_feature: MA Experiment 20000437 PARAMETER Experiment Name: At_Drought_P Parameter: Tissue Value: Whole Plant
  misc_feature: MA Experiment 20000437 PARAMETER Experiment Name: At_Drought_P Parameter: Treatment Value: Drought vs. No Drought
  misc_feature: MA Experiment ID: 20000438 Result: Up-regulated in Transcription
  misc_feature: MA Experiment 20000438 PARAMETER Experiment Name: At_Shoots__P Parameter: Age (day) Value: 14
  misc_feature: MA Experiment 20000438 PARAMETER Experiment Name: At_Shoots__P Parameter: Tissue Value: Shoots vs. Whole Plant
  misc_feature: MA Experiment ID: 20000495 Result: Down-regulated in Transcription
  misc_feature: MA Experiment 20000495 PARAMETER Experiment Name: At_Guard_Cells_P Parameter: Harvest Date Value: 8/2/2002
  misc_feature: MA Experiment 20000495 PARAMETER Experiment Name: At_Guard_Cells_P Parameter: Organism Value: A. thaliana
  misc_feature: MA Experiment 20000495 PARAMETER Experiment Name: At_Guard_Cells_P Parameter: Tissue Value: Guard Cells vs. Leaves
  misc_feature: MA Experiment ID: 20000527 Result: Up-regulated in Transcription
  misc_feature: MA Experiment 20000527 PARAMETER Experiment Name: At_10percent_PEG_P Parameter: Age (day) Value: 20
  misc_feature: MA Experiment 20000527 PARAMETER Experiment Name: At_10percent_PEG_P Parameter: Organism Value: A. thaliana
  misc_feature: MA Experiment 20000527 PARAMETER Experiment Name: At_10percent_PEG_P Parameter: Plant Line Value: WS
  misc_feature: MA Experiment 20000527 PARAMETER Experiment Name: At_10percent_PEG_P Parameter: Timepoint (day) Value: 20
  misc_feature: MA Experiment 20000527 PARAMETER Experiment Name: At_10percent_PEG_P Parameter: Tissue Value: Whole Plant
  misc_feature: MA Experiment 20000527 PARAMETER Experiment Name: At_10percent_PEG_P Parameter: Treatment Value: 10percent PEG vs. No Treatment
  misc_feature: MA Experiment ID: 20001248 Result: Down-regulated in Transcription
  misc_feature: MA Experiment 20001248 PARAMETER Experiment Name: At_Far-red-induction_P Parameter: Age (day) Value: 7
  misc_feature: MA Experiment 20001248 PARAMETER Experiment Name: At_Far-red-induction_P Parameter: Light Value: Far-red vs. White
  misc_feature: MA Experiment 20001248 PARAMETER Experiment Name: At_Far-red-induction_P Parameter: Organism Value: A. thaliana
  misc_feature: MA Experiment 20001248 PARAMETER Experiment Name: At_Far-red-induction_P Parameter: Plant Line Value: Columbia
  misc_feature: MA Experiment 20001248 PARAMETER Experiment Name: At_Far-red-induction_P Parameter: Timepoint (hr) Value: 4
  misc_feature: MA Experiment 20001248 PARAMETER Experiment Name: At_Far-red-induction_P Parameter: Tissue Value: Whole Plant
  misc_feature: MA Experiment ID: 20001905 Result: Down-regulated in Transcription
  misc_feature: MA Experiment 20001905 PARAMETER Experiment Name: At_Drought_Reproduction_P Parameter: Age (day) Value: 40
  misc_feature: MA Experiment 20001905 PARAMETER Experiment Name: At_Drought_Reproduction_P Parameter: Organism Value: A. thaliana
  misc_feature: MA Experiment 20001905 PARAMETER Experiment Name: At_Drought_Reproduction_P Parameter: Plant Line Value: WS
  misc_feature: MA Experiment 20001905 PARAMETER Experiment Name: At_Drought_Reproduction_P Parameter: Timepoint (day) Value: 10
  misc_feature: MA Experiment 20001905 PARAMETER Experiment Name: At_Drought_Reproduction_P Parameter: Tissue Value: Rosettes
  misc_feature: MA Experiment 20001905 PARAMETER Experiment Name: At_Drought_Reproduction_P Parameter: Treatment Value: Drought vs. No Drought
atggcgccggtcaacctccgtacgaatctctccgtgcgcaggaccgtacggtgtatggcgaacccgaggagagttaagatggtggctaagcagataatgagagaactctccgacatgcttctaacagacacggttttacaacacgctgtcttacctgaagctgcacttggagctgaccgctacctctcttctctcaccaccattagcgatgttgaagtctctaatgatttgcaggtgatgagaaaccctaattggaaactcttgtgtaatgtggttaaagtatatgtatccgtgtttggagatgatagagggaaagacgttgcaattgcggggttgaaatcgaaagctaagtacgttaggagtgagcttgggaagcgaatgaagttgagattgacgcctgaggtcaggtttattgaggatgaagccatggaaagaggaagcaggaaactgaattggagactgtttcaggtaattgcaatactggacaaaataaaagctgagaaaggaagcggtgaagggaaaacagaaccatctgactcaacagaagatgatcaagattgggaagtggatgaccccgacgaagacataatctatgtaaagtaa

SEQ ID NO: 69467 - protein, 200 aa, Arabidopsis thaliana
  peptide (1)..(200): Ceres Seq. ID no. 1815673
  misc_feature (24)..(154): Pfam Name: Ribosome-binding factor A Pfam Description: Ribosome-binding factor A
  misc_feature (1)..(200): Homolog of NCBI NO: 3914555 NR Description: Putative ribosome-binding factor A, chloroplast
  misc_feature (1)..(189): Homolog of NCBI NO: 30690114 NR Description: expressed protein [Arabidopsis thaliana] putative protein [Arabidopsis thaliana]
  misc_feature (41)..(200): Homolog of NCBI NO: 30690114 NR Description: expressed protein [Arabidopsis thaliana] putative protein [Arabidopsis thaliana]
  misc_feature (59)..(186): Homolog of NCBI NO: 23127176 NR Description: hypothetical protein [Nostoc punctiforme]
  misc_feature (59)..(184): Homolog of NCBI NO: 17227559 NR Description: ribosome binding facror A [Nostoc sp. PCC 7120]
  misc_feature (65)..(186): Homolog of NCBI NO: 23039367 NR Description: hypothetical protein [Trichodesmium erythraeum
  misc_feature (59)..(162): Homolog of NCBI NO: 16331339 NR Description: hypothetical protein [Synechocystis sp. PCC 6803]
  misc_feature (59)..(172): Homolog of NCBI NO: 22299172 NR Description: ribosome binding factor A [Thermosynechococcus
  misc_feature (67)..(148): Homolog of NCBI NO: 23099055 NR Description: ribosome-binding factor A [Oceanobacillus
  misc_feature (67)..(148): Homolog of NCBI NO: 16078728 NR Description: ribosome-binding factor A [Bacillus subtilis]
MAPVNLRTNLSVRRTVRCMANPRRVKMVAKQIMRELSDMLLTDTVLQHAVLPEAALGADRYLSSLTTISDVEVSNDLQVMRNPNWKLLCNVVKVYVSVFGDDRGKDVAIAGLKSKAKYVRSELGKRMKLRLTPEVRFIEDEAMERGSRKLNWRLFQVIAILDKIKAEKGSGEGKTEPSDSTEDDQDWEVDDPDEDIIYVK

SEQ ID NO: 69468 - protein, 182 aa, Arabidopsis thaliana
  peptide (1)..(182): Ceres Seq. ID no. 1815674
  misc_feature (6)..(136): Pfam Name: Ribosome-binding factor A Pfam Description: Ribosome-binding factor A
  misc_feature (1)..(182): Homolog of NCBI NO: 3914555 NR Description: Putative ribosome-binding factor A, chloroplast
  misc_feature (1)..(171): Homolog of NCBI NO: 30690114 NR Description: expressed protein [Arabidopsis thaliana] putative protein [Arabidopsis thaliana]
  misc_feature (23)..(182): Homolog of NCBI NO: 30690114 NR Description: expressed protein [Arabidopsis thaliana] putative protein [Arabidopsis thaliana]
  misc_feature (41)..(168): Homolog of NCBI NO: 23127176 NR Description: hypothetical protein [Nostoc punctiforme]
  misc_feature (41)..(166): Homolog of NCBI NO: 17227559 NR Description: ribosome binding facror A [Nostoc sp. PCC 7120]
  misc_feature (47)..(168): Homolog of NCBI NO: 23039367 NR Description: hypothetical protein [Trichodesmium erythraeum
  misc_feature (41)..(144): Homolog of NCBI NO: 16331339 NR Description: hypothetical protein [Synechocystis sp. PCC 6803]
  misc_feature (41)..(154): Homolog of NCBI NO: 22299172 NR Description: ribosome binding factor A [Thermosynechococcus
  misc_feature (49)..(130): Homolog of NCBI NO: 23099055 NR Description: ribosome-binding factor A [Oceanobacillus
  misc_feature (49)..(130): Homolog of NCBI NO: 16078728 NR Description: ribosome-binding factor A [Bacillus subtilis]
MANPRRVKMVAKQIMRELSDMLLTDTVLQHAVLPEAALGADRYLSSLTTISDVEVSNDLQVMRNPNWKLLCNVVKVYVSVFGDDRGKDVAIAGLKSKAKYVRSELGKRMKLRLTPEVRFIEDEAMERGSRKLNWRLFQVIAILDKIKAEKGSGEGKTEPSDSTEDDQDWEVDDPDEDIIYVK

SEQ ID NO: 69469 - protein, 174 aa, Arabidopsis thaliana
  peptide (1)..(174): Ceres Seq. ID no. 1815675
  misc_feature (1)..(128): Pfam Name: Ribosome-binding factor A Pfam Description: Ribosome-binding factor A
  misc_feature (1)..(174): Homolog of NCBI NO: 3914555 NR Description: Putative ribosome-binding factor A, chloroplast
  misc_feature (1)..(163): Homolog of NCBI NO: 30690114 NR Description: expressed protein [Arabidopsis thaliana] putative protein [Arabidopsis thaliana]
  misc_feature (15)..(174): Homolog of NCBI NO: 30690114 NR Description: expressed protein [Arabidopsis thaliana] putative protein [Arabidopsis thaliana]
  misc_feature (33)..(160): Homolog of NCBI NO: 23127176 NR Description: hypothetical protein [Nostoc punctiforme]
  misc_feature (33)..(158): Homolog of NCBI NO: 17227559 NR Description: ribosome binding facror A [Nostoc sp. PCC 7120]
  misc_feature (39)..(160): Homolog of NCBI NO: 23039367 NR Description: hypothetical protein [Trichodesmium erythraeum
  misc_feature (33)..(136): Homolog of NCBI NO: 16331339 NR Description: hypothetical protein [Synechocystis sp. PCC 6803]
  misc_feature (33)..(146): Homolog of NCBI NO: 22299172 NR Description: ribosome binding factor A [Thermosynechococcus
  misc_feature (41)..(122): Homolog of NCBI NO: 23099055 NR Description: ribosome-binding factor A [Oceanobacillus
  misc_feature (41)..(122): Homolog of NCBI NO: 16078728 NR Description: ribosome-binding factor A [Bacillus subtilis]
MVAKQIMRELSDMLLTDTVLQHAVLPEAALGADRYLSSLTTISDVEVSNDLQVMRNPNWKLLCNVVKVYVSVFGDDRGKDVAIAGLKSKAKYVRSELGKRMKLRLTPEVRFIEDEAMERGSRKLNWRLFQVIAILDKIKAEKGSGEGKTEPSDSTEDDQDWEVDDPDEDIIYVK

SEQ ID NO: 69470 - DNA, 1683 bp, Arabidopsis thaliana
  misc_feature (1)..(1683): Ceres Seq. ID no. 1815696
  misc_feature: MA Experiment ID: 20000307 Result: Up-regulated in Transcription
  misc_feature: MA Experiment 20000307 PARAMETER Experiment Name: At_Germinating_Seeds_Sub_P Parameter: Age (hr) Value: 24 vs. 0
  misc_feature: MA Experiment 20000307 PARAMETER Experiment Name: At_Germinating_Seeds_Sub_P Parameter: Organism Value: A. thaliana
  misc_feature: MA Experiment 20000307 PARAMETER Experiment Name: At_Germinating_Seeds_Sub_P Parameter: Plant Line Value: WS
  misc_feature: MA Experiment 20000307 PARAMETER Experiment Name: At_Germinating_Seeds_Sub_P Parameter: Tissue Value: Germinating Seeds
  misc_feature: MA Experiment ID: 20000314 Result: Up-regulated in Transcription
  misc_feature: MA Experiment 20000314 PARAMETER Experiment Name: At_14day_Shoots-Roots_Sub_P Parameter: Age (day) Value: 14
  misc_feature: MA Experiment 20000314 PARAMETER Experiment Name: At_14day_Shoots-Roots_Sub_P Parameter: Organism Value: A. thaliana
  misc_feature: MA Experiment 20000314 PARAMETER Experiment Name: At_14day_Shoots-Roots_Sub_P Parameter: Plant Line Value: WS
  misc_feature: MA Experiment 20000314 PARAMETER Experiment Name: At_14day_Shoots-Roots_Sub_P Parameter: Tissue Value: Roots vs. Whole Plant
  misc_feature: MA Experiment ID: 20000440 Result: Up-regulated in Transcription
  misc_feature: MA Experiment 20000440 PARAMETER Experiment Name: At_Closed-Flower__Sub_P Parameter: Tissue Value: Closed Flower vs. Whole Plant
atggctgagaccaaacctgaaatagagatgtcggaggaagagaggaagatagtgaagataagctcgctgaagaagaaagcgataaatgcatccaacagattcaagaactccttcaagaaaaaaggtcggagaagcagcagcagagtcatgtccgttccgattgaggacgacattgacgcagaagatcttcaagctcttgatgcttttcgtcaagctcttatccttgacgagcttttgccatccaaactcgatgatctccacatgatgcttcgatttttgagagcaagaaagtttgacattgagaaagctaagcaaatgtggagtgacatgatccaatggaggaaagatttcggcgctgacacaatcattgaggattttgatttcgaagaaattgatgaagtgatgaagcactaccctcaaggctatcatggagttgacaaggaaggcagaccagtttacattgagagactaggtcaaatcgatgctaacaagctactccaagtgacaacaatggaccggtacgtgaaatatcatgtcaaagagttcgagaagactttcaaggtcaagttcccttcttgttctgtagcagcaaataaacacattgatcagagcacaacaattcttgacgtgcaaggcgtgggtcttaagaacttcagcaaatctgcaagagagcttcttcaaaggctttgcaagattgacaatgaaaattaccctgagactttgaaccggatgtttatcatcaatgctggttctggattccggctcttgtggagcacagttaagtcgtttcttgatcccaagaccacagcaaagattcatgttcttgggaacaaatatcatagcaaattgctcgaggtcatcgatgctagtgaattgcctgagttctttggaggtgcttgcacttgtgaagacaaaggaggttgtatgcgctctgacaaaggtccatggaatgatcctgaagttctcaagatcgctataaaccgtgaagctaagtgttcaccgatttcagaagatgaacacaagcatgtagaccaaggaagatcaacttcaggtttcgaaagtcttgagagaatcaagaagaaaaccgatgaagataatgtgtatgagaagcaaattgcaaccattgacaagtcaatggatatggcatggcttgccaaaactcagaaagctgaaaactttccaatctctaaaggtataactaaactcatgaaaggggcacccaagaaaggagatggattacttgtgggaggggtcatggcctttgtgatgggaatagttgcaatggttaggctatcaaaagacgttccacgcaaactcaccgaggctgctttatatggaaactcagtctgttatgaggaatctacaaagtctaagcagaatcaaggtcaattcgcagcaccagtctcgagctctgaatatatgttgatggtgaaacgtatggctgagctggaagataagtgcatgttccttgacttgaaacctgctcatgtcgaatctgagaaagaagagaaacttcaggccgcgcttaatcgcgttcaagtgcttgagcaagagttgactgagaccaagaaggctttggaagaagcacttgtgagccagaaggagattttggcatacatcgagaaaaagaagaagaagaagaagctggtaagaacaaaacattcacacacatcggttatttaa

SEQ ID NO: 69471 - protein, 560 aa, Arabidopsis thaliana
  peptide (1)..(560): Ceres Seq. ID no. 1815697
  misc_feature (139)..(325): Pfam Name: CRAL/TRIO domain Pfam Description: CRAL/TRIO domain
  misc_feature (1)..(560): Homolog of NCBI NO: 15236152 NR Description: putative protein; protein id: At4g34580.1
  misc_feature (1)..(550): Homolog of NCBI NO: 38707281 NR Description: can of worms 1 protein [Arabidopsis thaliana]
  misc_feature (1)..(549): Homolog of NCBI NO: 18398094 NR Description: putative phosphatidylinositol/phosphatidylcholine protein; protein id: At2g16380.1, supported by cDNA: gi_16612282 thaliana] >gi|16612283|gb|AAL27507.1|AF439836_1
  misc_feature (7)..(560): Homolog of NCBI NO: 25411704 NR Description: hypothetical protein At2g16380 [imported] -
  misc_feature (5)..(548): Homolog of NCBI NO: 18399733 NR Description: putative phosphatidylinositol phophatidylcholine protein; protein id: At2g21540.1, supported by cDNA: gi_16209641 thaliana] >gi|16209642|gb|AAL14382.1| At2g21540/F2G1.19
  misc_feature (19)..(549): Homolog of NCBI NO: 14517816 NR Description: phosphatidylinositol transfer-like protein II
  misc_feature (5)..(524): Homolog of NCBI NO: 15234966 NR Description: SEC14 - like protein; protein id: At4g39180.1
  misc_feature (20)..(551): Homolog of NCBI NO: 15224125 NR Description: putative phosphatidylinositol/phophatidylcholine protein; protein id: At2g18180.1 [Arabidopsis thaliana]
  misc_feature (19)..(549): Homolog of NCBI NO: 18419847 NR Description: expressed protein; protein id: At4g36490.1, by cDNA: gi_15215779 [Arabidopsis thaliana] C7A10_870/C7A10_870 [Arabidopsis thaliana]
  misc_feature (19)..(549): Homolog of NCBI NO: 25407729 NR Description: hypothetical protein AT4g36490 [imported] - thaliana >gi|4006913|emb|CAB16843.1| hypothetical protein thaliana] >gi|7270597|emb|CAB80315.1| hypothetical protein
MAETKPEIEMSEEERKIVKISSLKKKAINASNRFKNSFKKKGRRSSSRVMSVPIEDDIDAEDLQALDAFRQALILDELLPSKLDDLHMMLRFLRARKFDIEKAKQMWSDMIQWRKDFGADTIIEDFDFEEIDEVMKHYPQGYHGVDKEGRPVYIERLGQIDANKLLQVTTMDRYVKYHVKEFEKTFKVKFPSCSVAANKHIDQSTTILDVQGVGLKNFSKSARELLQRLCKIDNENYPETLNRMFIINAGSGFRLLWSTVKSFLDPKTTAKIHVLGNKYHSKLLEVIDASELPEFFGGACTCEDKGGCMRSDKGPWNDPEVLKIAINREAKCSPISEDEHKHVDQGRSTSGFESLERIKKKTDEDNVYEKQIATIDKSMDMAWLAKTQKAENFPISKGITKLMKGAPKKGDGLLVGGVMAFVMGIVAMVRLSKDVPRKLTEAALYGNSVCYEESTKSKQNQGQFAAPVSSSEYMLMVKRMAELEDKCMFLDLKPAHVESEKEEKLQAALNRVQVLEQELTETKKALEEALVSQKEILAYIEKKKKKKKLVRTKHSHTSVI

SEQ ID NO: 69472 - protein, 551 aa, Arabidopsis thaliana
  peptide (1)..(551): Ceres Seq. ID no. 1815698
  misc_feature (130)..(316): Pfam Name: CRAL/TRIO domain Pfam Description: CRAL/TRIO domain
  misc_feature (1)..(551): Homolog of NCBI NO: 15236152 NR Description: putative protein; protein id: At4g34580.1
  misc_feature (1)..(541): Homolog of NCBI NO: 38707281 NR Description: can of worms 1 protein [Arabidopsis thaliana]
  misc_feature (1)..(540): Homolog of NCBI NO: 18398094 NR Description: putative phosphatidylinositol/phosphatidylcholine protein; protein id: At2g16380.1, supported by cDNA: gi_16612282 thaliana] >gi|16612283|gb|AAL27507.1|AF439836_1
  misc_feature (1)..(551): Homolog of NCBI NO: 25411704 NR Description: hypothetical protein At2g16380 [imported] -
  misc_feature (1)..(539): Homolog of NCBI NO: 18399733 NR Description: putative phosphatidylinositol phophatidylcholine protein; protein id: At2g21540.1, supported by cDNA: gi_16209641 thaliana] >gi|16209642|gb|AAL14382.1| At2g21540/F2G1.19
  misc_feature (10)..(540): Homolog of NCBI NO: 14517816 NR Description: phosphatidylinositol transfer-like protein II
  misc_feature (1)..(515): Homolog of NCBI NO: 15234966 NR Description: SEC14 - like protein; protein id: At4g39180.1
  misc_feature (11)..(542): Homolog of NCBI NO: 15224125 NR Description: putative phosphatidylinositol/phophatidylcholine protein; protein id: At2g18180.1 [Arabidopsis thaliana]
  misc_feature (10)..(540): Homolog of NCBI NO: 18419847 NR Description: expressed protein; protein id: At4g36490.1, by cDNA: gi_15215779 [Arabidopsis thaliana] C7A10_870/C7A10_870 [Arabidopsis thaliana]
  misc_feature (10)..(540): Homolog of NCBI NO: 25407729 NR Description: hypothetical protein AT4g36490 [imported] - thaliana >gi|4006913|emb|CAB16843.1| hypothetical protein thaliana] >gi|7270597|emb|CAB80315.1| hypothetical protein
MSEEERKIVKISSLKKKAINASNRFKNSFKKKGRRSSSRVMSVPIEDDIDAEDLQALDAFRQALILDELLPSKLDDLHMMLRFLRARKFDIEKAKQMWSDMIQWRKDFGADTIIEDFDFEEIDEVMKHYPQGYHGVDKEGRPVYIERLGQIDANKLLQVTTMDRYVKYHVKEFEKTFKVKFPSCSVAANKHIDQSTTILDVQGVGLKNFSKSARELLQRLCKIDNENYPETLNRMFIINAGSGFRLLWSTVKSFLDPKTTAKIHVLGNKYHSKLLEVIDASELPEFFGGACTCEDKGGCMRSDKGPWNDPEVLKIAINREAKCSPISEDEHKHVDQGRSTSGFESLERIKKKTDEDNVYEKQIATIDKSMDMAWLAKTQKAENFPISKGITKLMKGAPKKGDGLLVGGVMAFVMGIVAMVRLSKDVPRKLTEAALYGNSVCYEESTKSKQNQGQFAAPVSSSEYMLMVKRMAELEDKCMFLDLKPAHVESEKEEKLQAALNRVQVLEQELTETKKALEEALVSQKEILAYIEKKKKKKKLVRTKHSHTSVI

SEQ ID NO: 69473 - protein, 511 aa, Arabidopsis thaliana
  peptide (1)..(511): Ceres Seq. ID no. 1815699
  misc_feature (90)..(276): Pfam Name: CRAL/TRIO domain Pfam Description: CRAL/TRIO domain
  misc_feature (1)..(511): Homolog of NCBI NO: 15236152 NR Description: putative protein; protein id: At4g34580.1
  misc_feature (1)..(501): Homolog of NCBI NO: 38707281 NR Description: can of worms 1 protein [Arabidopsis thaliana]
  misc_feature (1)..(500): Homolog of NCBI NO: 18398094 NR Description: putative phosphatidylinositol/phosphatidylcholine protein; protein id: At2g16380.1, supported by cDNA: gi_16612282 thaliana] >gi|16612283|gb|AAL27507.1|AF439836_1
  misc_feature (1)..(511): Homolog of NCBI NO: 25411704 NR Description: hypothetical protein At2g16380 [imported] -
  misc_feature (1)..(499): Homolog of NCBI NO: 18399733 NR Description: putative phosphatidylinositol phophatidylcholine protein; protein id: At2g21540.1, supported by cDNA: gi_16209641 thaliana] >gi|16209642|gb|AAL14382.1| At2g21540/F2G1.19
  misc_feature (1)..(500): Homolog of NCBI NO: 14517816 NR Description: phosphatidylinositol transfer-like protein II
  misc_feature (1)..(475): Homolog of NCBI NO: 15234966 NR Description: SEC14 - like protein; protein id: At4g39180.1
  misc_feature (1)..(502): Homolog of NCBI NO: 15224125 NR Description: putative phosphatidylinositol/phophatidylcholine protein; protein id: At2g18180.1 [Arabidopsis thaliana]
  misc_feature (1)..(500): Homolog of NCBI NO: 18419847 NR Description: expressed protein; protein id: At4g36490.1, by cDNA: gi_15215779 [Arabidopsis thaliana] C7A10_870/C7A10_870 [Arabidopsis thaliana]
  misc_feature (1)..(500): Homolog of NCBI NO: 25407729 NR Description: hypothetical protein AT4g36490 [imported] - thaliana >gi|4006913|emb|CAB16843.1| hypothetical protein thaliana] >gi|7270597|emb|CAB80315.1| hypothetical protein
MSVPIEDDIDAEDLQALDAFRQALILDELLPSKLDDLHMMLRFLRARKFDIEKAKQMWSDMIQWRKDFGADTIIEDFDFEEIDEVMKHYPQGYHGVDKEGRPVYIERLGQIDANKLLQVTTMDRYVKYHVKEFEKTFKVKFPSCSVAANKHIDQSTTILDVQGVGLKNFSKSARELLQRLCKIDNENYPETLNRMFIINAGSGFRLLWSTVKSFLDPKTTAKIHVLGNKYHSKLLEVIDASELPEFFGGACTCEDKGGCMRSDKGPWNDPEVLKIAINREAKCSPISEDEHKHVDQGRSTSGFESLERIKKKTDEDNVYEKQIATIDKSMDMAWLAKTQKAENFPISKGITKLMKGAPKKGDGLLVGGVMAFVMGIVAMVRLSKDVPRKLTEAALYGNSVCYEESTKSKQNQGQFAAPVSSSEYMLMVKRMAELEDKCMFLDLKPAHVESEKEEKLQAALNRVQVLEQELTETKKALEEALVSQKEILAYIEKKKKKKKLVRTKHSHTSVI

SEQ ID NO: 69474 - DNA, 2025 bp, Arabidopsis thaliana
  misc_feature (1)..(2025): Ceres Seq. ID no. 1815726
  misc_feature: MA Experiment ID: 20001910 Result: Up-regulated in Transcription
  misc_feature: MA Experiment 20001910 PARAMETER Experiment Name: At_Drought_Reproduction_P Parameter: Age (day) Value: 37
  misc_feature: MA Experiment 20001910 PARAMETER Experiment Name: At_Drought_Reproduction_P Parameter: Organism Value: A. thaliana
  misc_feature: MA Experiment 20001910 PARAMETER Experiment Name: At_Drought_Reproduction_P Parameter: Plant Line Value: WS
  misc_feature: MA Experiment 20001910 PARAMETER Experiment Name: At_Drought_Reproduction_P Parameter: Timepoint (day) Value: 7
  misc_feature: MA Experiment 20001910 PARAMETER Experiment Name: At_Drought_Reproduction_P Parameter: Tissue Value: Flowers
  misc_feature: MA Experiment 20001910 PARAMETER Experiment Name: At_Drought_Reproduction_P Parameter: Treatment Value: Drought vs. No Drought
atggcggactcaccggtggattcatctcctgcccctgaaacctcaaatgggacaccaccgtcaaacggaacatcgccgtctaatgagtcatcgccgccaacaccaccttcttcaccaccaccatcatcaatatctgctcctccgccagatatctccgcttctttttcaccgccgcctgcaccaccaacgcaagaaacgtcacctcctacatctccgtcctcatcgccgcctgttgtagctaatccgtcaccgcagactccagagaatccttctccacctgcacctgaaggctcaactcctgtaacgccacctgcaccaccacaaacaccgtcgaaccaatcaccggaaagaccaactcctccttctcctggtgccaatgatgaccgaaacagaaccaatggcggaaacaacaacagagacggctccacaccatcaccaccgtcgtcagggaacagaacttccggtgacggtggctcaccttcaccacctcggtcgataagccctcctcagaatagtggagattcagactcatcatcggggcttttgcttctacttgcagtgtgtatttgcatctgttgcaacaggaagaagaagaagaaatctcctcaggtcaaccacatgcactactacaataacaatccttatggaggagcaccctcaggtaatggtggttattacaagggaacacctcaagatcatgtggtgaatatggctggtcaaggaggtgggaattggggtccacagcaacctgtgtctggtcctcacagtgatgcttccaacttaaccggtcgaactgctataccgtcacctcaagctgcaactcttggtcacaaccaaagcactttcacatacgatgaactgtccattgcaacagaaggtttcgctcagtcaaatttgctaggacaaggaggatttgggtatgttcataaaggagttctgcctagtggcaaagaagttgcagtgaagagtcttaaacttggaagtggacaaggggaacgcgagtttcaagcagaggttgatatcattagccgtgtccatcatcgtcatctcgtttctcttgttggatattgcatctctggtggtcaaagacttttggtttatgagtttatacctaacaacactcttgaatttcatcttcatggaaagggtcgtccggttttggattggcctacaagagtgaagattgcattgggatcagctagaggccttgcatatttgcatgaagactgtaagaaaatctttatctcacatatttgcatcagtcaccctcgcattatccacagagatatcaaagctgcaaacattcttcttgatttcagttttgagaccaaggtggcagattttggattggctaagctatctcaagacaactatactcatgtctccactcgcgtcatgggaacttttggatacttagctccagagtatgcatcaagcggaaagttatccgacaaatctgatgttttctcatttggagtaatgcttcttgagctcataaccggaagacctcctctggatctaactggagaaatggaagatagcttggtagattgggcaaggcctttgtgtttgaaagcagctcaagatggagattacaaccaattggctgatccacgtctagagctaaactacagtcatcaagagatggttcaaatggcttcttgtgcagctgcagcaatcagacattcagcaagaagacggcctaagatgagccaggttcaaaaactcataccacttgttggttctattattgtacgagcactagaaggagatatgtcaatggatgatctaagtgagggaacaagaccaggacaaagcacgtacttgagccccgggagcgtgagctcagagtatgacgcaagctcgtacacggcagacatgaaaaagttcaagaaactggcgttagagaataaagaatatcaaagcagtgaatatggtggaacaagtgagtatggcttaaacccttctgcttcaagtagtgaagaaatgaatagaggctcaatgaaacgcaatcctcagctttga

SEQ ID NO: 69475 - protein, 674 aa, Arabidopsis thaliana
  peptide (1)..(674): Ceres Seq. ID no. 1815727
  misc_feature (4)..(577): Homolog of NCBI NO: 30690042 NR Description: serine threonine protein kinase -related thaliana] >gi|26452004|dbj|BAC43092.1| putative serine/threonine kinase [Arabidopsis thaliana] >gi|29029022|gb|AAO64890.1|
  misc_feature (422)..(674): Homolog of NCBI NO: 30690042 NR Description: serine threonine protein kinase -related thaliana] >gi|26452004|dbj|BAC43092.1| putative serine/threonine kinase [Arabidopsis thaliana] >gi|29029022|gb|AAO64890.1|
  misc_feature (1)..(213): Homolog of NCBI NO: 30690042 NR Description: serine threonine protein kinase -related thaliana] >gi|26452004|dbj|BAC43092.1| putative serine/threonine kinase [Arabidopsis thaliana] >gi|29029022|gb|AAO64890.1|
  misc_feature (119)..(671): Homolog of NCBI NO: 15230209 NR Description: protein kinase, putative; protein id: At3g18810.1
  misc_feature (11)..(180): Homolog of NCBI NO: 15230209 NR Description: protein kinase, putative; protein id: At3g18810.1
  misc_feature (208)..(666): Homolog of NCBI NO: 15222081 NR Description: hypothetical protein; protein id: At1g49270.1
  misc_feature (21)..(226): Homolog of NCBI NO: 15222081 NR Description: hypothetical protein; protein id: At1g49270.1
  misc_feature (4)..(253): Homolog of NCBI NO: 15222081 NR Description: hypothetical protein; protein id: At1g49270.1
  misc_feature (211)..(671): Homolog of NCBI NO: 9293906 NR Description: somatic embryogenesis receptor kinase-like
  misc_feature (11)..(180): Homolog of NCBI NO: 9293906 NR Description: somatic embryogenesis receptor kinase-like
MADSPVDSSPAPETSNGTPPSNGTSPSNESSPPTPPSSPPPSSISAPPPDISASFSPPPAPPTQETSPPTSPSSSPPVVANPSPQTPENPSPPAPEGSTPVTPPAPPQTPSNQSPERPTPPSPGANDDRNRTNGGNNNRDGSTPSPPSSGNRTSGDGGSPSPPRSISPPQNSGDSDSSSGLLLLLAVCICICCNRKKKKKSPQVNHMHYYNNNPYGGAPSGNGGYYKGTPQDHVVNMAGQGGGNWGPQQPVSGPHSDASNLTGRTAIPSPQAATLGHNQSTFTYDELSIATEGFAQSNLLGQGGFGYVHKGVLPSGKEVAVKSLKLGSGQGEREFQAEVDIISRVHHRHLVSLVGYCISGGQRLLVYEFIPNNTLEFHLHGKGRPVLDWPTRVKIALGSARGLAYLHEDCKKIFISHICISHPRIIHRDIKAANILLDFSFETKVADFGLAKLSQDNYTHVSTRVMGTFGYLAPEYASSGKLSDKSDVFSFGVMLLELITGRPPLDLTGEMEDSLVDWARPLCLKAAQDGDYNQLADPRLELNYSHQEMVQMASCAAAAIRHSARRRPKMSQVQKLIPLVGSIIVRALEGDMSMDDLSEGTRPGQSTYLSPGSVSSEYDASSYTADMKKFKKLALENKEYQSSEYGGTSEYGLNPSASSSEEMNRGSMKRNPQL

SEQ ID NO: 69476 - protein, 468 aa, Arabidopsis thaliana
  peptide (1)..(468): Ceres Seq. ID no. 1815728
  misc_feature (1)..(371): Homolog of NCBI NO: 30690042 NR Description: serine threonine protein kinase -related thaliana] >gi|26452004|dbj|BAC43092.1| putative serine/threonine kinase [Arabidopsis thaliana] >gi|29029022|gb|AAO64890.1|
  misc_feature (216)..(468): Homolog of NCBI NO: 30690042 NR Description: serine threonine protein kinase -related thaliana] >gi|26452004|dbj|BAC43092.1| putative serine/threonine kinase [Arabidopsis thaliana] >gi|29029022|gb|AAO64890.1|
  misc_feature (1)..(465): Homolog of NCBI NO: 15230209 NR Description: protein kinase, putative; protein id: At3g18810.1
  misc_feature (2)..(460): Homolog of NCBI NO: 15222081 NR Description: hypothetical protein; protein id: At1g49270.1
  misc_feature (1)..(20): Homolog of NCBI NO: 15222081 NR Description: hypothetical protein; protein id: At1g49270.1
  misc_feature (1)..(47): Homolog of NCBI NO: 15222081 NR Description: hypothetical protein; protein id: At1g49270.1
  misc_feature (5)..(465): Homolog of NCBI NO: 9293906 NR Description: somatic embryogenesis receptor kinase-like
  misc_feature (1)..(467): Homolog of NCBI NO: 13877617 NR Description: protein kinase-like protein [Arabidopsis thaliana]
  misc_feature (1)..(467): Homolog of NCBI NO: 15230130 NR Description: protein kinase, putative; protein id: supported by cDNA: 17909., supported by cDNA: gi_13877616,
  misc_feature (1)..(384): Homolog of NCBI NO: 15224182 NR Description: putative protein kinase; protein id: At2g18470.1
MHYYNNNPYGGAPSGNGGYYKGTPQDHVVNMAGQGGGNWGPQQPVSGPHSDASNLTGRTAIPSPQAATLGHNQSTFTYDELSIATEGFAQSNLLGQGGFGYVHKGVLPSGKEVAVKSLKLGSGQGEREFQAEVDIISRVHHRHLVSLVGYCISGGQRLLVYEFIPNNTLEFHLHGKGRPVLDWPTRVKIALGSARGLAYLHEDCKKIFISHICISHPRIIHRDIKAANILLDFSFETKVADFGLAKLSQDNYTHVSTRVMGTFGYLAPEYASSGKLSDKSDVFSFGVMLLELITGRPPLDLTGEMEDSLVDWARPLCLKAAQDGDYNQLADPRLELNYSHQEMVQMASCAAAAIRHSARRRPKMSQVQKLIPLVGSIIVRALEGDMSMDDLSEGTRPGQSTYLSPGSVSSEYDASSYTADMKKFKKLALENKEYQSSEYGGTSEYGLNPSASSSEEMNRGSMKRNPQL

SEQ ID NO: 69477 - protein, 438 aa, Arabidopsis thaliana
  peptide (1)..(438): Ceres Seq. ID no. 1815729
  misc_feature (1)..(341): Homolog of NCBI NO: 30690042 NR Description: serine threonine protein kinase -related thaliana] >gi|26452004|dbj|BAC43092.1| putative serine/threonine kinase [Arabidopsis thaliana] >gi|29029022|gb|AAO64890.1|
  misc_feature (186)..(438): Homolog of NCBI NO: 30690042 NR Description: serine threonine protein kinase -related thaliana] >gi|26452004|dbj|BAC43092.1| putative serine/threonine kinase [Arabidopsis thaliana] >gi|29029022|gb|AAO64890.1|
  misc_feature (1)..(435): Homolog of NCBI NO: 15230209 NR Description: protein kinase, putative; protein id: At3g18810.1
  misc_feature (1)..(430): Homolog of NCBI NO: 15222081 NR Description: hypothetical protein; protein id: At1g49270.1
  misc_feature (1)..(17): Homolog of NCBI NO: 15222081 NR Description: hypothetical protein; protein id: At1g49270.1
  misc_feature (1)..(435): Homolog of NCBI NO: 9293906 NR Description: somatic embryogenesis receptor kinase-like
  misc_feature (1)..(437): Homolog of NCBI NO: 13877617 NR Description: protein kinase-like protein [Arabidopsis thaliana]
  misc_feature (1)..(437): Homolog of NCBI NO: 15230130 NR Description: protein kinase, putative; protein id: supported by cDNA: 17909., supported by cDNA: gi_13877616,
  misc_feature (1)..(354): Homolog of NCBI NO: 15224182 NR Description: putative protein kinase; protein id: At2g18470.1
  misc_feature (1)..(437): Homolog of NCBI NO: 13447449 NR Description: receptor protein kinase PERK1 [Brassica napus]
MAGQGGGNWGPQQPVSGPHSDASNLTGRTAIPSPQAATLGHNQSTFTYDELSIATEGFAQSNLLGQGGFGYVHKGVLPSGKEVAVKSLKLGSGQGEREFQAEVDIISRVHHRHLVSLVGYCISGGQRLLVYEFIPNNTLEFHLHGKGRPVLDWPTRVKIALGSARGLAYLHEDCKKIFISHICISHPRIIHRDIKAANILLDFSFETKVADFGLAKLSQDNYTHVSTRVMGTFGYLAPEYASSGKLSDKSDVFSFGVMLLELITGRPPLDLTGEMEDSLVDWARPLCLKAAQDGDYNQLADPRLELNYSHQEMVQMASCAAAAIRHSARRRPKMSQVQKLIPLVGSIIVRALEGDMSMDDLSEGTRPGQSTYLSPGSVSSEYDASSYTADMKKFKKLALENKEYQSSEYGGTSEYGLNPSASSSEEMNRGSMKRNPQL

SEQ ID NO: 69478 - DNA, 1158 bp, Arabidopsis thaliana
  misc_feature (1)..(1158): Ceres Seq. ID no. 1815740
  misc_feature: MA Experiment ID: 20000306 Result: Up-regulated in Transcription
  misc_feature: MA Experiment 20000306 PARAMETER Experiment Name: At_Germinating_Seeds_Sub_P Parameter: Age (hr) Value: 6 vs. 0
  misc_feature: MA Experiment 20000306 PARAMETER Experiment Name: At_Germinating_Seeds_Sub_P Parameter: Organism Value: A. thaliana
  misc_feature: MA Experiment 20000306 PARAMETER Experiment Name: At_Germinating_Seeds_Sub_P Parameter: Plant Line Value: WS
  misc_feature: MA Experiment 20000306 PARAMETER Experiment Name: At_Germinating_Seeds_Sub_P Parameter: Tissue Value: Germinating Seeds
  misc_feature: MA Experiment ID: 20000307 Result: Up-regulated in Transcription
  misc_feature: MA Experiment 20000307 PARAMETER Experiment Name: At_Germinating_Seeds_Sub_P Parameter: Age (hr) Value: 24 vs. 0
  misc_feature: MA Experiment 20000307 PARAMETER Experiment Name: At_Germinating_Seeds_Sub_P Parameter: Organism Value: A. thaliana
  misc_feature: MA Experiment 20000307 PARAMETER Experiment Name: At_Germinating_Seeds_Sub_P Parameter: Plant Line Value: WS
  misc_feature: MA Experiment 20000307 PARAMETER Experiment Name: At_Germinating_Seeds_Sub_P Parameter: Tissue Value: Germinating Seeds
  misc_feature: MA Experiment ID: 20000314 Result: Up-regulated in Transcription
  misc_feature: MA Experiment 20000314 PARAMETER Experiment Name: At_14day_Shoots-Roots_Sub_P Parameter: Age (day) Value: 14
  misc_feature: MA Experiment 20000314 PARAMETER Experiment Name: At_14day_Shoots-Roots_Sub_P Parameter: Organism Value: A. thaliana
  misc_feature: MA Experiment 20000314 PARAMETER Experiment Name: At_14day_Shoots-Roots_Sub_P Parameter: Plant Line Value: WS
  misc_feature: MA Experiment 20000314 PARAMETER Experiment Name: At_14day_Shoots-Roots_Sub_P Parameter: Tissue Value: Roots vs. Whole Plant
  misc_feature: MA Experiment ID: 20000347 Result: Up-regulated in Transcription
  misc_feature: MA Experiment 20000347 PARAMETER Experiment Name: At_2mM_SA_Sub_P Parameter: Age (day) Value: 14
  misc_feature: MA Experiment 20000347 PARAMETER Experiment Name: At_2mM_SA_Sub_P Parameter: Organism Value: A. thaliana
  misc_feature: MA Experiment 20000347 PARAMETER Experiment Name: At_2mM_SA_Sub_P Parameter: Plant Line Value: WS
  misc_feature: MA Experiment 20000347 PARAMETER Experiment Name: At_2mM_SA_Sub_P Parameter: Timepoint (hr) Value: 6
  misc_feature: MA Experiment 20000347 PARAMETER Experiment Name: At_2mM_SA_Sub_P Parameter: Tissue Value: Aerial
  misc_feature: MA Experiment 20000347 PARAMETER Experiment Name: At_2mM_SA_Sub_P Parameter: Treatment Value: 2mM SA vs. No Treatment
  misc_feature: MA Experiment ID: 20000440 Result: Down-regulated in Transcription
  misc_feature: MA Experiment 20000440 PARAMETER Experiment Name: At_Closed-Flower__Sub_P Parameter: Tissue Value: Closed Flower vs. Whole Plant
atggagaaaagagtagagaagagaaggatagtgttggttccacttccattactaggacatttcactccgatgatgcaactcggccaagcccttatcttgaagggattctcaattatagttcctcagggagaattcaatcgagtaaactcttcgcagaagttccctgctgaggagttgaagcttcccaatttcatcttcagtactcaaactgctacacataaagtttgctgcaatgttttaagcaaacttaatgccaagaagtacttgatcgacatggaagagcatgacgtgcaaaacaaggtagtggaaaatatgcatccattaagatacaaagacttaccaactgcaacatttggagaactagaaccttttttggagctctgtagagatgtagtcaacaaaagaacagcctctgctgttatcatcaacaccgtgacctgtctagagagctcgtctctcacaaggctgcaacaagaactccaaattccggtgtatccattaggccctcttcacattacagattcatcgacaggatttactgtgctgcaagaggataggagctgcgttgaatggctgaacaagcagaaaccaaggtctgtcatatacataagtttaggaagcatggttctcatggaaaccaaggagatgttagagatggcttggggaatgttgaatagcaaccaacctttcttatgggtcatccgacctggatctgtctcaggctccgaggggatagagtcattgccagaggaagtcagtaagatggttttagagaaaggatacattgtgaaatgggcaccacaaatagaagtactaggacatccctcagtgggaggcttttggagccactgtggatggaactcaacactcgagagcattgtggaaggagttccaatgatttgcaggccttatcaaggcgagcagatgttaaatgcaatatatctagagagtgtatggagaatagggattcaggtaggaggtgaactggaaagaggagccgtcgagagagctgtgaagaggttgattgtggataaagaaggtgcaagcatgagggagagaacccttgttttaaaagagaagctcaaagcctctattagaggtggaggctcctcatgcaatgcattagatgagcttgtcaagcacttgaagacagagtga

SEQ ID NO: 69479 - protein, 385 aa, Arabidopsis thaliana
  peptide (1)..(385): Ceres Seq. ID no. 1815741
  misc_feature (9)..(383): Pfam Name: UDP-glucoronosyl and UDP-glucosyl transferase Pfam Description: UDP-glucoronosyl and UDP-glucosyl transferase
  misc_feature (1)..(385): Homolog of NCBI NO: 15232621 NR Description: glucuronosyl transferase-like protein; protein At3g46700.1 [Arabidopsis thaliana] >gi|7487760|pir||T12980
  misc_feature (56)..(379): Homolog of NCBI NO: 15232619 NR Description: glucosyltransferase-like protein; protein id: [Arabidopsis thaliana] >gi|11258173|pir||T45605
  misc_feature (1)..(94): Homolog of NCBI NO: 15232619 NR Description: glucosyltransferase-like protein; protein id: [Arabidopsis thaliana] >gi|11258173|pir||T45605
  misc_feature (56)..(385): Homolog of NCBI NO: 15232620 NR Description: glucuronosyl transferase-like protein; protein At3g46690.1 [Arabidopsis thaliana] >gi|7433909|pir||T12981
  misc_feature (56)..(385): Homolog of NCBI NO: 26449469 NR Description: putative glucuronosyl transferase [Arabidopsis
  misc_feature (57)..(383): Homolog of NCBI NO: 30697251 NR Description: glycosyltransferase family [Arabidopsis thaliana]
  misc_feature (1)..(54): Homolog of NCBI NO: 30697251 NR Description: glycosyltransferase family [Arabidopsis thaliana]
  misc_feature (56)..(385): Homolog of NCBI NO: 15232623 NR Description: glucuronosyl transferase-like protein; protein At3g46720.1 [Arabidopsis thaliana] >gi|7433908|pir||T12978
  misc_feature (56)..(384): Homolog of NCBI NO: 11258169 NR Description: glucosyltransferase-like protein - Arabidopsis
  misc_feature (56)..(384): Homolog of NCBI NO: 18408251 NR Description: glucosyltransferase-like protein; protein id: supported by cDNA: gi_15081808 [Arabidopsis thaliana]
MEKRVEKRRIVLVPLPLLGHFTPMMQLGQALILKGFSIIVPQGEFNRVNSSQKFPAEELKLPNFIFSTQTATHKVCCNVLSKLNAKKYLIDMEEHDVQNKVVENMHPLRYKDLPTATFGELEPFLELCRDVVNKRTASAVIINTVTCLESSSLTRLQQELQIPVYPLGPLHITDSSTGFTVLQEDRSCVEWLNKQKPRSVIYISLGSMVLMETKEMLEMAWGMLNSNQPFLWVIRPGSVSGSEGIESLPEEVSKMVLEKGYIVKWAPQIEVLGHPSVGGFWSHCGWNSTLESIVEGVPMICRPYQGEQMLNAIYLESVWRIGIQVGGELERGAVERAVKRLIVDKEGASMRERTLVLKEKLKASIRGGGSSCNALDELVKHLKTE

SEQ ID NO: 69480 - protein, 362 aa, Arabidopsis thaliana
  peptide (1)..(362): Ceres Seq. ID no. 1815742
  misc_feature (1)..(360): Pfam Name: UDP-glucoronosyl and UDP-glucosyl transferase Pfam Description: UDP-glucoronosyl and UDP-glucosyl transferase
  misc_feature (33)..(362): Homolog of NCBI NO: 15232620 NR Description: glucuronosyl transferase-like protein; protein At3g46690.1 [Arabidopsis thaliana] >gi|7433909|pir||T12981
  misc_feature (33)..(362): Homolog of NCBI NO: 26449469 NR Description: putative glucuronosyl transferase [Arabidopsis
  misc_feature (34)..(360): Homolog of NCBI NO: 30697251 NR Description: glycosyltransferase family [Arabidopsis thaliana]
  misc_feature (1)..(31): Homolog of NCBI NO: 30697251 NR Description: glycosyltransferase family [Arabidopsis thaliana]
  misc_feature (33)..(356): Homolog of NCBI NO: 15232619 NR Description: glucosyltransferase-like protein; protein id: [Arabidopsis thaliana] >gi|11258173|pir||T45605
  misc_feature (1)..(71): Homolog of NCBI NO: 15232619 NR Description: glucosyltransferase-like protein; protein id: [Arabidopsis thaliana] >gi|11258173|pir||T45605
  misc_feature (1)..(362): Homolog of NCBI NO: 15232621 NR Description: glucuronosyl transferase-like protein; protein At3g46700.1 [Arabidopsis thaliana] >gi|7487760|pir||T12980
  misc_feature (33)..(362): Homolog of NCBI NO: 15232623 NR Description: glucuronosyl transferase-like protein; protein At3g46720.1 [Arabidopsis thaliana] >gi|7433908|pir||T12978
  misc_feature (33)..(361): Homolog of NCBI NO: 11258169 NR Description: glucosyltransferase-like protein - Arabidopsis
  misc_feature (33)..(361): Homolog of NCBI NO: 18408251 NR Description: glucosyltransferase-like protein; protein id: supported by cDNA: gi_15081808 [Arabidopsis thaliana]
MMQLGQALILKGFSIIVPQGEFNRVNSSQKFPAEELKLPNFIFSTQTATHKVCCNVLSKLNAKKYLIDMEEHDVQNKVVENMHPLRYKDLPTATFGELEPFLELCRDVVNKRTASAVIINTVTCLESSSLTRLQQELQIPVYPLGPLHITDSSTGFTVLQEDRSCVEWLNKQKPRSVIYISLGSMVLMETKEMLEMAWGMLNSNQPFLWVIRPGSVSGSEGIESLPEEVSKMVLEKGYIVKWAPQIEVLGHPSVGGFWSHCGWNSTLESIVEGVPMICRPYQGEQMLNAIYLESVWRIGIQVGGELERGAVERAVKRLIVDKEGASMRERTLVLKEKLKASIRGGGSSCNALDELVKHLKTE

SEQ ID NO: 69481 - protein, 361 aa, Arabidopsis thaliana
  peptide (1)..(361): Ceres Seq. ID no. 1815743
  misc_feature (1)..(359): Pfam Name: UDP-glucoronosyl and UDP-glucosyl transferase Pfam Description: UDP-glucoronosyl and UDP-glucosyl transferase
  misc_feature (1)..(361): Homolog of NCBI NO: 15232621 NR Description: glucuronosyl transferase-like protein; protein At3g46700.1 [Arabidopsis thaliana] >gi|7487760|pir||T12980
  misc_feature (32)..(355): Homolog of NCBI NO: 15232619 NR Description: glucosyltransferase-like protein; protein id: [Arabidopsis thaliana] >gi|11258173|pir||T45605
  misc_feature (1)..(70): Homolog of NCBI NO: 15232619 NR Description: glucosyltransferase-like protein; protein id: [Arabidopsis thaliana] >gi|11258173|pir||T45605
  misc_feature (32)..(361): Homolog of NCBI NO: 15232620 NR Description: glucuronosyl transferase-like protein; protein At3g46690.1 [Arabidopsis thaliana] >gi|7433909|pir||T12981
  misc_feature (32)..(361): Homolog of NCBI NO: 26449469 NR Description: putative glucuronosyl transferase [Arabidopsis
  misc_feature (33)..(359): Homolog of NCBI NO: 30697251 NR Description: glycosyltransferase family [Arabidopsis thaliana]
  misc_feature (1)..(30): Homolog of NCBI NO: 30697251 NR Description: glycosyltransferase family [Arabidopsis thaliana]
  misc_feature (32)..(361): Homolog of NCBI NO: 15232623 NR Description: glucuronosyl transferase-like protein; protein At3g46720.1 [Arabidopsis thaliana] >gi|7433908|pir||T12978
  misc_feature (32)..(360): Homolog of NCBI NO: 11258169 NR Description: glucosyltransferase-like protein - Arabidopsis
  misc_feature (32)..(360): Homolog of NCBI NO: 18408251 NR Description: glucosyltransferase-like protein; protein id: supported by cDNA: gi_15081808 [Arabidopsis thaliana]
MQLGQALILKGFSIIVPQGEFNRVNSSQKFPAEELKLPNFIFSTQTATHKVCCNVLSKLNAKKYLIDMEEHDVQNKVVENMHPLRYKDLPTATFGELEPFLELCRDVVNKRTASAVIINTVTCLESSSLTRLQQELQIPVYPLGPLHITDSSTGFTVLQEDRSCVEWLNKQKPRSVIYISLGSMVLMETKEMLEMAWGMLNSNQPFLWVIRPGSVSGSEGIESLPEEVSKMVLEKGYIVKWAPQIEVLGHPSVGGFWSHCGWNSTLESIVEGVPMICRPYQGEQMLNAIYLESVWRIGIQVGGELERGAVERAVKRLIVDKEGASMRERTLVLKEKLKASIRGGGSSCNALDELVKHLKTE

SEQ ID NO: 69482 - DNA, 1014 bp, Arabidopsis thaliana
  misc_feature (1)..(1014): Ceres Seq. ID no. 1815760
  misc_feature: MA Experiment ID: 20000227 Result: Up-regulated in Transcription
  misc_feature: MA Experiment 20000227 PARAMETER Experiment Name: At_Root-Tips-vs-Tops_P Parameter: Tissue Value: Root Tips vs. Root Tops
  misc_feature: Pfam Name: Pkinase Pfam Description: Protein kinase domain
atgtttgcaggtatatttctaagaatgggagcagcattaagatcaatgtatgtgaacagcaagtatgaagaagtacgagaagaatgggaggaagattacagtcctcagaggttttcttacaaagctctctacaaagcaaccaaagggttcaaagagagcgagttattcggtacagaggctaacgggacagtctacaaaggaaagctctcttctaatgcacagattgctgtaaagagagtttctttagatgcagaacaagataccaaacaccttgtttctcagattgttggtattgggaagttaaggcacaagaaccttgtgcagctcttaggatactgcagaagaaaaggtgaattactcttggtctatgattatatgccttatggaaatcttgatgatttcttgtttaatgaggaaaggcctaatctaagttggtcacaaaggtttcatataatcaaaggagttgcttcagctcttctttatttgcatgaacagatcgttcttcaccgagatgtaaaagccgcaaatgtactcttggatgaggatttaaacgggcgactagattacggtctagcaagatttggtacaaacaggaacccaatgctaggaagcgtaggttatgtggctccagagctaataataacaggaatgccgacaaccaaagccgatgtttattcattcggagcattactacttgagtttgcttgtggaagaatgttcattgagtatccagggaagcctgaagagtttaacttaatcagctgggtgtgtcaatgctggaaaagagggaacttggttggcgcccgagacgctagattggaaggagactacgtctgcaaggagatagagatggtactaaagcttggtctactatgtgcacagtacaatccagaggataggcctagtatgtcccaagtggtaaactatcttgaaggaaatgatgttttgcctgagatgcctccagacactcctgggatcagtattccaacaccgtaccatgaagttcttgcgtag

SEQ ID NO: 69483 - protein, 337 aa, Arabidopsis thaliana
  peptide (1)..(337): Ceres Seq. ID no. 1815761
  misc_feature: Pfam Name: Pkinase Pfam Description: Protein kinase domain
  misc_feature (1)..(337): Homolog of NCBI NO: 15232629 NR Description: receptor-like protein kinase; protein id: [Arabidopsis thaliana] >gi|7434319|pir||T12973 protein kinase
  misc_feature (6)..(336): Homolog of NCBI NO: 15237850 NR Description: receptor-like protein kinase; protein id:
  misc_feature (6)..(336): Homolog of NCBI NO: 15237849 NR Description: receptor-like protein kinase; protein id: [Arabidopsis thaliana] >gi|9759247|dbj|BAB09771.1|
  misc_feature (5)..(331): Homolog of NCBI NO: 15230700 NR Description: receptor like protein kinase; protein id:
  misc_feature (11)..(331): Homolog of NCBI NO: 15230698 NR Description: receptor like protein kinase; protein id:
  misc_feature (5)..(331): Homolog of NCBI NO: 15239261 NR Description: receptor like protein kinase; protein id:
  misc_feature (16)..(331): Homolog of NCBI NO: 15230670 NR Description: receptor-like protein kinase; protein id:
  misc_feature (21)..(319): Homolog of NCBI NO: 38112427 NR Description: lectin-like receptor kinase 7;2 [Medicago
  misc_feature (3)..(323): Homolog of NCBI NO: 34899514 NR Description: putative receptor-like protein kinase [Oryza
  misc_feature (6)..(331): Homolog of NCBI NO: 15239260 NR Description: receptor like protein kinase; protein id:
MFAGIFLRMGAALRSMYVNSKYEEVREEWEEDYSPQRFSYKALYKATKGFKESELFGTEANGTVYKGKLSSNAQIAVKRVSLDAEQDTKHLVSQIVGIGKLRHKNLVQLLGYCRRKGELLLVYDYMPYGNLDDFLFNEERPNLSWSQRFHIIKGVASALLYLHEQIVLHRDVKAANVLLDEDLNGRLDYGLARFGTNRNPMLGSVGYVAPELIITGMPTTKADVYSFGALLLEFACGRMFIEYPGKPEEFNLISWVCQCWKRGNLVGARDARLEGDYVCKEIEMVLKLGLLCAQYNPEDRPSMSQVVNYLEGNDVLPEMPPDTPGISIPTPYHEVLA

SEQ ID NO: 69484 - protein, 329 aa, Arabidopsis thaliana
  peptide (1)..(329): Ceres Seq. ID no. 1815762
  misc_feature: Pfam Name: Pkinase Pfam Description: Protein kinase domain
  misc_feature (1)..(329): Homolog of NCBI NO: 15232629 NR Description: receptor-like protein kinase; protein id: [Arabidopsis thaliana] >gi|7434319|pir||T12973 protein kinase
  misc_feature (1)..(328): Homolog of NCBI NO: 15237850 NR Description: receptor-like protein kinase; protein id:
  misc_feature (1)..(328): Homolog of NCBI NO: 15237849 NR Description: receptor-like protein kinase; protein id: [Arabidopsis thaliana] >gi|9759247|dbj|BAB09771.1|
  misc_feature (1)..(323): Homolog of NCBI NO: 15230700 NR Description: receptor like protein kinase; protein id:
  misc_feature (3)..(323): Homolog of NCBI NO: 15230698 NR Description: receptor like protein kinase; protein id:
  misc_feature (1)..(323): Homolog of NCBI NO: 15239261 NR Description: receptor like protein kinase; protein id:
  misc_feature (8)..(323): Homolog of NCBI NO: 15230670 NR Description: receptor-like protein kinase; protein id:
  misc_feature (13)..(311): Homolog of NCBI NO: 38112427 NR Description: lectin-like receptor kinase 7;2 [Medicago
  misc_feature (1)..(315): Homolog of NCBI NO: 34899514 NR Description: putative receptor-like protein kinase [Oryza
  misc_feature (1)..(323): Homolog of NCBI NO: 15239260 NR Description: receptor like protein kinase; protein id:
MGAALRSMYVNSKYEEVREEWEEDYSPQRFSYKALYKATKGFKESELFGTEANGTVYKGKLSSNAQIAVKRVSLDAEQDTKHLVSQIVGIGKLRHKNLVQLLGYCRRKGELLLVYDYMPYGNLDDFLFNEERPNLSWSQRFHIIKGVASALLYLHEQIVLHRDVKAANVLLDEDLNGRLDYGLARFGTNRNPMLGSVGYVAPELIITGMPTTKADVYSFGALLLEFACGRMFIEYPGKPEEFNLISWVCQCWKRGNLVGARDARLEGDYVCKEIEMVLKLGLLCAQYNPEDRPSMSQVVNYLEGNDVLPEMPPDTPGISIPTPYHEVLA

SEQ ID NO: 69485 - protein, 322 aa, Arabidopsis thaliana
  peptide (1)..(322): Ceres Seq. ID no. 1815763
  misc_feature: Pfam Name: Pkinase Pfam Description: Protein kinase domain
  misc_feature (1)..(322): Homolog of NCBI NO: 15232629 NR Description: receptor-like protein kinase; protein id: [Arabidopsis thaliana] >gi|7434319|pir||T12973 protein kinase
  misc_feature (1)..(321): Homolog of NCBI NO: 15237850 NR Description: receptor-like protein kinase; protein id:
  misc_feature (1)..(321): Homolog of NCBI NO: 15237849 NR Description: receptor-like protein kinase; protein id: [Arabidopsis thaliana] >gi|9759247|dbj|BAB09771.1|
  misc_feature (1)..(316): Homolog of NCBI NO: 15230700 NR Description: receptor like protein kinase; protein id:
  misc_feature (1)..(316): Homolog of NCBI NO: 15230698 NR Description: receptor like protein kinase; protein id:
  misc_feature (1)..(316): Homolog of NCBI NO: 15239261 NR Description: receptor like protein kinase; protein id:
  misc_feature (1)..(316): Homolog of NCBI NO: 15230670 NR Description: receptor-like protein kinase; protein id:
  misc_feature (6)..(304): Homolog of NCBI NO: 38112427 NR Description: lectin-like receptor kinase 7;2 [Medicago
  misc_feature (1)..(308): Homolog of NCBI NO: 34899514 NR Description: putative receptor-like protein kinase [Oryza
  misc_feature (1)..(316): Homolog of NCBI NO: 15239260 NR Description: receptor like protein kinase; protein id:
MYVNSKYEEVREEWEEDYSPQRFSYKALYKATKGFKESELFGTEANGTVYKGKLSSNAQIAVKRVSLDAEQDTKHLVSQIVGIGKLRHKNLVQLLGYCRRKGELLLVYDYMPYGNLDDFLFNEERPNLSWSQRFHIIKGVASALLYLHEQIVLHRDVKAANVLLDEDLNGRLDYGLARFGTNRNPMLGSVGYVAPELIITGMPTTKADVYSFGALLLEFACGRMFIEYPGKPEEFNLISWVCQCWKRGNLVGARDARLEGDYVCKEIEMVLKLGLLCAQYNPEDRPSMSQVVNYLEGNDVLPEMPPDTPGISIPTPYHEVLA

SEQ ID NO: 69486 - DNA, 1974 bp, Arabidopsis thaliana
  misc_feature (1)..(1974): Ceres Seq. ID no. 1815764
  misc_feature: MA Experiment ID: 20000315 Result: Down-regulated in Transcription
  misc_feature: MA Experiment 20000315 PARAMETER Experiment Name: At_14day_Shoots-Roots_Sub_P Parameter: Age (day) Value: 14
  misc_feature: MA Experiment 20000315 PARAMETER Experiment Name: At_14day_Shoots-Roots_Sub_P Parameter: Organism Value: A. thaliana
  misc_feature: MA Experiment 20000315 PARAMETER Experiment Name: At_14day_Shoots-Roots_Sub_P Parameter: Plant Line Value: WS
  misc_feature: MA Experiment 20000315 PARAMETER Experiment Name: At_14day_Shoots-Roots_Sub_P Parameter: Tissue Value: Shoots vs. Whole Plant
  misc_feature: MA Experiment ID: 20000328 Result: Down-regulated in Transcription
  misc_feature: MA Experiment 20000328 PARAMETER Experiment Name: At_42deg_Heat_Sub_P Parameter: Age (day) Value: 14
  misc_feature: MA Experiment 20000328 PARAMETER Experiment Name: At_42deg_Heat_Sub_P Parameter: Organism Value: A. thaliana
  misc_feature: MA Experiment 20000328 PARAMETER Experiment Name: At_42deg_Heat_Sub_P Parameter: Plant Line Value: WS
  misc_feature: MA Experiment 20000328 PARAMETER Experiment Name: At_42deg_Heat_Sub_P Parameter: Temperature (deg C) Value: 42 vs. 22
  misc_feature: MA Experiment 20000328 PARAMETER Experiment Name: At_42deg_Heat_Sub_P Parameter: Timepoint (hr) Value: 6
  misc_feature: MA Experiment 20000328 PARAMETER Experiment Name: At_42deg_Heat_Sub_P Parameter: Tissue Value: Aerial
atgtttctgtctcaccctcctcaagtaatacaaccaacttatcatacagttaacttcttacctcgctctcctctgaagccaccgtcgtgttccgttgctttaaacaatccttcaatttcctccggcgccggagctaaaatctctaataatcagctaattcaatcattgtgcaaagagggtaaacttaaacaagcgattcgcgtcttgtctcaggaatctagcccaagtcaacagacttacgagcttctgattctctgctgcggtcatcggagctctctttctgatgctctacgtgttcatcgacatattctggataatgggtctgatcaagatccttttttggctacgaagcttattggtatgtactcggatttgggttctgtggattatgcacggaaggtgttcgataaaacgcgtaagagaactatatatgtctggaacgctttgtttcgagcccttacgttagcaggtcatggagaagaagtgttgggtttgtattggaagatgaataggattggagttgagtcagataggttcacatacacttatgttctcaaggcttgtgttgcatcggaatgcacggtgaatcatctgatgaaagggaaagagattcatgcacatcttactcgacgaggttacagttctcatgtttacattatgactacgttggtggacatgtatgctagatttggctgtgtggattatgccagctatgtgtttgggggaatgccggtgaggaacgttgtttcttggagcgctatgatcgcctgctatgcaaagaacgggaaagcttttgaagctctgaggactttccgtgaaatgatgagagaaaccaaagattcatctccgaattctgtgactatggttagtgtgcttcaagcttgtgcttcgcttgcggctttagagcaagggaaattgattcatgggtacatactcagacgggggcttgactccatattgccagtgatcagtgctcttgtgacgatgtatggtagatgcggtaagcttgaagtgggacaaagagtatttgatcgaatgcatgaccgggatgttgtgtcctggaattccttgatatcaagctatggcgttcacgggtatggaaaaaaagcaattcagatatttgaagagatgctcgccaacggggcttccccaactcccgtaacatttgtcagcgttttgggagcttgcagccacgagggtcttgttgaagaaggaaagagactgtttgaaacaatgtggagagaccatgggataaaaccacaaatcgaacattatgcttgtatggttgatctgttaggtcgggcgaataggttagacgaggcagcaaagatggtacaagacatgaggactgaaccagggcctaaggtttggggttcccttcttggttcttgtagaattcacggtaatgttgagcttgcagagcgggcgagtagaaggctctttgcgcttgaaccaaaaaatgcagggaactatgtgttgttggcagacatttacgcggaagctcagatgtgggatgaggttaagagagtgaagaagcttctagaacacaggggactgcagaagctgcctggtcgatgctggatggaagtgaggaggaaaatgtactcgtttgtctcggttgatgagtttaaccctcttatggaacagattcatgctttcttggttaagttagccgaagatatgaaggagaaagggtacataccacagaccaaaggagttctgtatgagcttgaaacagaagaaaaagagaggatagtgttgggacacagtgagaaacttgcgttggcgtttgggctgataaatacatcgaaaggagaaccaatcagaatcacgaagaacttgcgtttgtgcgaggactgtcacttgtttacaaagttcatctcgaagtttatggagaaagagattctagtcagagatgtgaaccggtttcatcgattcaagaatggagtgtgttcttgtggagattactggtaa

SEQ ID NO: 69487 - protein, 657 aa, Arabidopsis thaliana
  peptide (1)..(657): Ceres Seq. ID no. 1815765
  misc_feature (144)..(178): Pfam Name: PPR repeat Pfam Description: PPR repeat
  misc_feature (50)..(657): Homolog of NCBI NO: 34908292 NR Description: P0005H10.18 [Oryza sativa (japonica
  misc_feature (40)..(657): Homolog of NCBI NO: 11281371 NR Description: hypothetical protein T8H10.30 - Arabidopsis >gi|6706414|emb|CAB66100.1| putative protein [Arabidopsis
  misc_feature (40)..(657): Homolog of NCBI NO: 30694644 NR Description: pentatricopeptide (PPR) repeat-containing protein
  misc_feature (40)..(657): Homolog of NCBI NO: 30794008 NR Description: unknown protein [Arabidopsis thaliana]
  misc_feature (50)..(657): Homolog of NCBI NO: 18418348 NR Description: putative protein; protein id: At4g33990.1
  misc_feature (128)..(657): Homolog of NCBI NO: 15229426 NR Description: hypothetical protein; protein id: At3g23330.1 thaliana] >gi|11994318|dbj|BAB02277.1|
  misc_feature (53)..(657): Homolog of NCBI NO: 15231358 NR Description: hypothetical protein; protein id: At3g13770.1
  misc_feature (108)..(657): Homolog of NCBI NO: 15234006 NR Description: putative protein; protein id: At4g18750.1
  misc_feature (46)..(657): Homolog of NCBI NO: 34897884 NR Description: Similar to Arabidopsis thaliana DNA chromosome 4,
  misc_feature (47)..(657): Homolog of NCBI NO: 15220337 NR Description: hypothetical protein; protein id: At1g11290.1
MFLSHPPQVIQPTYHTVNFLPRSPLKPPSCSVALNNPSISSGAGAKISNNQLIQSLCKEGKLKQAIRVLSQESSPSQQTYELLILCCGHRSSLSDALRVHRHILDNGSDQDPFLATKLIGMYSDLGSVDYARKVFDKTRKRTIYVWNALFRALTLAGHGEEVLGLYWKMNRIGVESDRFTYTYVLKACVASECTVNHLMKGKEIHAHLTRRGYSSHVYIMTTLVDMYARFGCVDYASYVFGGMPVRNVVSWSAMIACYAKNGKAFEALRTFREMMRETKDSSPNSVTMVSVLQACASLAALEQGKLIHGYILRRGLDSILPVISALVTMYGRCGKLEVGQRVFDRMHDRDVVSWNSLISSYGVHGYGKKAIQIFEEMLANGASPTPVTFVSVLGACSHEGLVEEGKRLFETMWRDHGIKPQIEHYACMVDLLGRANRLDEAAKMVQDMRTEPGPKVWGSLLGSCRIHGNVELAERASRRLFALEPKNAGNYVLLADIYAEAQMWDEVKRVKKLLEHRGLQKLPGRCWMEVRRKMYSFVSVDEFNPLMEQIHAFLVKLAEDMKEKGYIPQTKGVLYELETEEKERIVLGHSEKLALAFGLINTSKGEPIRITKNLRLCEDCHLFTKFISKFMEKEILVRDVNRFHRFKNGVCSCGDYW

SEQ ID NO: 69488 - protein, 537 aa, Arabidopsis thaliana
  peptide (1)..(537): Ceres Seq. ID no. 1815766
  misc_feature (24)..(58): Pfam Name: PPR repeat Pfam Description: PPR repeat
  misc_feature (1)..(537): Homolog of NCBI NO: 34908292 NR Description: P0005H10.18 [Oryza sativa (japonica
  misc_feature (1)..(537): Homolog of NCBI NO: 11281371 NR Description: hypothetical protein T8H10.30 - Arabidopsis >gi|6706414|emb|CAB66100.1| putative protein [Arabidopsis
  misc_feature (1)..(537): Homolog of NCBI NO: 30694644 NR Description: pentatricopeptide (PPR) repeat-containing protein
  misc_feature (1)..(537): Homolog of NCBI NO: 30794008 NR Description: unknown protein [Arabidopsis thaliana]
  misc_feature (1)..(537): Homolog of NCBI NO: 18418348 NR Description: putative protein; protein id: At4g33990.1
  misc_feature (8)..(537): Homolog of NCBI NO: 15229426 NR Description: hypothetical protein; protein id: At3g23330.1 thaliana] >gi|11994318|dbj|BAB02277.1|
  misc_feature (1)..(537): Homolog of NCBI NO: 15231358 NR Description: hypothetical protein; protein id: At3g13770.1
  misc_feature (1)..(537): Homolog of NCBI NO: 15234006 NR Description: putative protein; protein id: At4g18750.1
  misc_feature (1)..(537): Homolog of NCBI NO: 34897884 NR Description: Similar to Arabidopsis thaliana DNA chromosome 4,
  misc_feature (1)..(537): Homolog of NCBI NO: 15220337 NR Description: hypothetical protein; protein id: At1g11290.1
MYSDLGSVDYARKVFDKTRKRTIYVWNALFRALTLAGHGEEVLGLYWKMNRIGVESDRFTYTYVLKACVASECTVNHLMKGKEIHAHLTRRGYSSHVYIMTTLVDMYARFGCVDYASYVFGGMPVRNVVSWSAMIACYAKNGKAFEALRTFREMMRETKDSSPNSVTMVSVLQACASLAALEQGKLIHGYILRRGLDSILPVISALVTMYGRCGKLEVGQRVFDRMHDRDVVSWNSLISSYGVHGYGKKAIQIFEEMLANGASPTPVTFVSVLGACSHEGLVEEGKRLFETMWRDHGIKPQIEHYACMVDLLGRANRLDEAAKMVQDMRTEPGPKVWGSLLGSCRIHGNVELAERASRRLFALEPKNAGNYVLLADIYAEAQMWDEVKRVKKLLEHRGLQKLPGRCWMEVRRKMYSFVSVDEFNPLMEQIHAFLVKLAEDMKEKGYIPQTKGVLYELETEEKERIVLGHSEKLALAFGLINTSKGEPIRITKNLRLCEDCHLFTKFISKFMEKEILVRDVNRFHRFKNGVCSCGDYW

SEQ ID NO: 69489 - protein, 489 aa, Arabidopsis thaliana
  peptide (1)..(489): Ceres Seq. ID no. 1815767
  misc_feature (1)..(489): Homolog of NCBI NO: 34908292 NR Description: P0005H10.18 [Oryza sativa (japonica
  misc_feature (1)..(489): Homolog of NCBI NO: 11281371 NR Description: hypothetical protein T8H10.30 - Arabidopsis >gi|6706414|emb|CAB66100.1| putative protein [Arabidopsis
  misc_feature (1)..(489): Homolog of NCBI NO: 30794008 NR Description: unknown protein [Arabidopsis thaliana]
  misc_feature (1)..(489): Homolog of NCBI NO: 30694644 NR Description: pentatricopeptide (PPR) repeat-containing protein
  misc_feature (1)..(489): Homolog of NCBI NO: 18418348 NR Description: putative protein; protein id: At4g33990.1
  misc_feature (1)..(489): Homolog of NCBI NO: 15229426 NR Description: hypothetical protein; protein id: At3g23330.1 thaliana] >gi|11994318|dbj|BAB02277.1|
  misc_feature (1)..(489): Homolog of NCBI NO: 15231358 NR Description: hypothetical protein; protein id: At3g13770.1
  misc_feature (1)..(489): Homolog of NCBI NO: 15234006 NR Description: putative protein; protein id: At4g18750.1
  misc_feature (1)..(489): Homolog of NCBI NO: 34897884 NR Description: Similar to Arabidopsis thaliana DNA chromosome 4,
  misc_feature (1)..(489): Homolog of NCBI NO: 15220337 NR Description: hypothetical protein; protein id: At1g11290.1
MNRIGVESDRFTYTYVLKACVASECTVNHLMKGKEIHAHLTRRGYSSHVYIMTTLVDMYARFGCVDYASYVFGGMPVRNVVSWSAMIACYAKNGKAFEALRTFREMMRETKDSSPNSVTMVSVLQACASLAALEQGKLIHGYILRRGLDSILPVISALVTMYGRCGKLEVGQRVFDRMHDRDVVSWNSLISSYGVHGYGKKAIQIFEEMLANGASPTPVTFVSVLGACSHEGLVEEGKRLFETMWRDHGIKPQIEHYACMVDLLGRANRLDEAAKMVQDMRTEPGPKVWGSLLGSCRIHGNVELAERASRRLFALEPKNAGNYVLLADIYAEAQMWDEVKRVKKLLEHRGLQKLPGRCWMEVRRKMYSFVSVDEFNPLMEQIHAFLVKLAEDMKEKGYIPQTKGVLYELETEEKERIVLGHSEKLALAFGLINTSKGEPIRITKNLRLCEDCHLFTKFISKFMEKEILVRDVNRFHRFKNGVCSCGDYW

SEQ ID NO: 69490 - DNA, 3516 bp, Arabidopsis thaliana
  misc_feature (1)..(3516): Ceres Seq. ID no. 1815799
atggcacatgaacccagtagcccaagttcgaatcttgtttctaatccggccaatctttcagcttctgggttagattatagctctgatttgagtaataagcgtgtctctgatggaattatttctgggtttgggagtgagcaggtaagtattgatgctacgaatagaaacaatccaaatttaggcaataaaagaagtgatatggatgatgaagaattggaaaaggtgaagtttttatgtagctacaatggaaagataatccctagaccaagtgatggcatgttacgttacgttggtggtcaaacaaggatcgttagtgttaaaaagaatgtgagatttgatgaatttgagcaaaagatgattcaggtttatggtcaccctgttgttgttaagtatcagcttcctgatgaggatcttgatgctttggtttctgtttcatctagtgaagatattgataatatgatggaggagtttgagaagttggtagagagatcttctgatgggtcagggaagttgagagtttttttgtttgatgcttcttcgtctgaggtggatgattctttcggaatattggagtatggtgatggagttgatattgggcagagatatgtagaggctgtgaatggtgttgttgtgagtaaggaaagtgtagctagtggtagttctaatccgaattctgattttagtggcgtggatgttgttgatagcttgggcgttggtcagagtgattttgtcgcaactacttggacctcgagtaatttttcacctcagacttatcatagtaatgtatcaagacttgttcctcctgatccacgctcttctgcttatgttgtgccaatgactgtccacgccgatccgcctcattcttttcagcttgagactgtttcagagaaaccaatagttggtaagatgcagcagcaacaacaggggtatactacaccatctgaacatcatccaccggcctatgttgaatctcgccaagaagctttaagacaaccagatattgttcattcacctatccagcttttgccaagtagtacttctttgttctcccaacaaccttttcaagatagtcctttaagtgtctcatcccaccagttccttcctgctgctcacatgtcaatggctcccttgaattctcagattagttccacaccagttttgattaacccggtaatgcaaacccaagaaaatctgttggggaactatcatgctgctcaaaagttagtaccgcttcctacagagccaagaaacactgcatatcaaggtacgatttctcctggtataccatttgatggttatggcgggtctcaagttccaccatctaaccatgttgttctccccgatggaagtttctatcaacaagtaactatggctgaaagttttcaaagggtaaatgattgtcatatgtgccagacatcttttcctcatatgcattctgatccgattatgcgggagggaaatgatggttctacaatgtatgtgccatatgtgagctcagctttctatgcttctcgtccagatgatatcatgagaatccaacaaacggataagtttacgggtcaacaaagcttcctcaatcattcaaatcatcaagaaagagatactttacataacgccaatcttgccactgctcaggtcgagactactgaaccttttgtcaatgagatagtaagagatgttccgataaaagttcaagtaactaggcagcagcaacatcccgtagacccttcagtagcatatgcacaatgccgagaactaagtggattggtggataatgttaacatacatgctcctgaaatatatagcaattgtcagaatttcatctcaccagttgacaaaattgggaaagaagatattatgggtaccagttctcaacaaatggcaaggaagaatatgttcttacatgacacctctggtcagtctccagtaagtccaaacatagatcacactgattcagctaagaggctaacaagagtagttcttccaggccatgaatctcagcctaaggaatcatgtgtgccaacacagtctcccttattaggcaatcctggtttgtatctacaatcattggttggaggtcagcagttcgattcagcggaagcgcagtccagcaatcccgcttatgacgttgttgaatctacatttgatgctgcaaacttaccatcatccttatcatcaaatcctgatgctgctaatttaccatcatccttgtcatctagtgttggtggtgcagaccacaaagaatcatcaaaatcactttttagtaaccaggacccatggaatttgcaaactaactcaaacgaggatgtcaaacctgatctacttaattcttcgaaagttatccttgagaatgatctgttgattggtctttggttctctctgaaaggctccgaggaggagcacatcaaacaagaacttcagaatgttgctgaaggagtcgccgcttctgtgttacagtcaagcacaccttcatatcatgaacctccaattaaggtggatgagtatgcttttaattcgaaaggagaagtttcacgtaatgatgaaatgaaacagcagtctacacacttcaaggatatcaggaaccaacttctagaaagactgaatttcggatattctggttctgattcgctggatcagttgcagattataaaggacagcgaccttgaggaattgcgagaactaggatctggcacatttggcacagtttatcatgggaaatggcgaggcactgatgttgcaatcaaaaggatcaatgatcgatgttttgctggcaaaccatctgagcaagaacgaatgatcgatgacttttggaatgaggcacagaacctagctggcttgcaccatcctaacgtcgttgctttttatggggttgtgctggattcacctggaggttctgtggcaacagttacagagtatatggtcaatggttctttacgaaatgcgttgcagaagaatgttaggaattttgataggtgcaagcgtcaactgatcgctatggacattgcttttgggatggagtatttgcatggaaagaagatagtacactttgatcttaaaagtgacaacctgctcgtcaatctcagggatcctcatcgcccaatttgcaaggttggggatttgggtctctcaaaggtgaaatgtcagacattaatatcaggtggtgttcggggaacacttccatggatggcacccgagcttctaaatggaaccagtagccttgtttctgagaaggtcgatgtgttttcattcggaattgtcctctgggaacttttcaccggtgaagaaccttacgccgacttgcactatggagcgatcataggtggtatagttagtaatacgctacggccgcagattcccgacttttgtgacatggactggaaattgctgatggagagatgttggtctgcagaaccatcagagaggccaagcttcactgagatcgtgaacgaactacggaccatggctacaaagcttccttccaaagaacaaggctcaacacagggaccacaatcttaa

SEQ ID NO: 69491 - protein, 1171 aa, Arabidopsis thaliana
  peptide (1)..(1171): Ceres Seq. ID no. 1815800
  misc_feature (89)..(178): Pfam Name: PB1 domain Pfam Description: PB1 domain
  misc_feature (673)..(1156): Homolog of NCBI NO: 24414006 NR Description: contains EST D23238(C2469)~kinase-like protein
  misc_feature (44)..(429): Homolog of NCBI NO: 24414006 NR Description: contains EST D23238(C2469)~kinase-like protein
  misc_feature (820)..(1162): Homolog of NCBI NO: 15219417 NR Description: hypothetical protein; protein id: At1g79570.1
  misc_feature (48)..(319): Homolog of NCBI NO: 15219417 NR Description: hypothetical protein; protein id: At1g79570.1
  misc_feature (827)..(1162): Homolog of NCBI NO: 15219183 NR Description: putative Ser/Thr protein kinase; protein id:
  misc_feature (74)..(355): Homolog of NCBI NO: 15219183 NR Description: putative Ser/Thr protein kinase; protein id:
  misc_feature (880)..(1161): Homolog of NCBI NO: 15242791 NR Description: putative protein; protein id: At5g57610.1 thaliana] >gi|9758322|dbj|BAB08796.1| contains similarity to
  misc_feature (57)..(210): Homolog of NCBI NO: 15242791 NR Description: putative protein; protein id: At5g57610.1 thaliana] >gi|9758322|dbj|BAB08796.1| contains similarity to
  misc_feature (871)..(1156): Homolog of NCBI NO: 15226883 NR Description: putative protein kinase; protein id: At2g35050.1
  misc_feature (53)..(226): Homolog of NCBI NO: 15226883 NR Description: putative protein kinase; protein id: At2g35050.1
MAHEPSSPSSNLVSNPANLSASGLDYSSDLSNKRVSDGIISGFGSEQVSIDATNRNNPNLGNKRSDMDDEELEKVKFLCSYNGKIIPRPSDGMLRYVGGQTRIVSVKKNVRFDEFEQKMIQVYGHPVVVKYQLPDEDLDALVSVSSSEDIDNMMEEFEKLVERSSDGSGKLRVFLFDASSSEVDDSFGILEYGDGVDIGQRYVEAVNGVVVSKESVASGSSNPNSDFSGVDVVDSLGVGQSDFVATTWTSSNFSPQTYHSNVSRLVPPDPRSSAYVVPMTVHADPPHSFQLETVSEKPIVGKMQQQQQGYTTPSEHHPPAYVESRQEALRQPDIVHSPIQLLPSSTSLFSQQPFQDSPLSVSSHQFLPAAHMSMAPLNSQISSTPVLINPVMQTQENLLGNYHAAQKLVPLPTEPRNTAYQGTISPGIPFDGYGGSQVPPSNHVVLPDGSFYQQVTMAESFQRVNDCHMCQTSFPHMHSDPIMREGNDGSTMYVPYVSSAFYASRPDDIMRIQQTDKFTGQQSFLNHSNHQERDTLHNANLATAQVETTEPFVNEIVRDVPIKVQVTRQQQHPVDPSVAYAQCRELSGLVDNVNIHAPEIYSNCQNFISPVDKIGKEDIMGTSSQQMARKNMFLHDTSGQSPVSPNIDHTDSAKRLTRVVLPGHESQPKESCVPTQSPLLGNPGLYLQSLVGGQQFDSAEAQSSNPAYDVVESTFDAANLPSSLSSNPDAANLPSSLSSSVGGADHKESSKSLFSNQDPWNLQTNSNEDVKPDLLNSSKVILENDLLIGLWFSLKGSEEEHIKQELQNVAEGVAASVLQSSTPSYHEPPIKVDEYAFNSKGEVSRNDEMKQQSTHFKDIRNQLLERLNFGYSGSDSLDQLQIIKDSDLEELRELGSGTFGTVYHGKWRGTDVAIKRINDRCFAGKPSEQERMIDDFWNEAQNLAGLHHPNVVAFYGVVLDSPGGSVATVTEYMVNGSLRNALQKNVRNFDRCKRQLIAMDIAFGMEYLHGKKIVHFDLKSDNLLVNLRDPHRPICKVGDLGLSKVKCQTLISGGVRGTLPWMAPELLNGTSSLVSEKVDVFSFGIVLWELFTGEEPYADLHYGAIIGGIVSNTLRPQIPDFCDMDWKLLMERCWSAEPSERPSFTEIVNELRTMATKLPSKEQGSTQGPQS

SEQ ID NO: 69492 - protein, 1105 aa, Arabidopsis thaliana
  peptide (1)..(1105): Ceres Seq. ID no. 1815801
  misc_feature (23)..(112): Pfam Name: PB1 domain Pfam Description: PB1 domain
  misc_feature (607)..(1090): Homolog of NCBI NO: 24414006 NR Description: contains EST D23238(C2469)~kinase-like protein
  misc_feature (1)..(363): Homolog of NCBI NO: 24414006 NR Description: contains EST D23238(C2469)~kinase-like protein
  misc_feature (754)..(1096): Homolog of NCBI NO: 15219417 NR Description: hypothetical protein; protein id: At1g79570.1
  misc_feature (1)..(253): Homolog of NCBI NO: 15219417 NR Description: hypothetical protein; protein id: At1g79570.1
  misc_feature (761)..(1096): Homolog of NCBI NO: 15219183 NR Description: putative Ser/Thr protein kinase; protein id:
  misc_feature (8)..(289): Homolog of NCBI NO: 15219183 NR Description: putative Ser/Thr protein kinase; protein id:
  misc_feature (814)..(1095): Homolog of NCBI NO: 15242791 NR Description: putative protein; protein id: At5g57610.1 thaliana] >gi|9758322|dbj|BAB08796.1| contains similarity to
  misc_feature (1)..(144): Homolog of NCBI NO: 15242791 NR Description: putative protein; protein id: At5g57610.1 thaliana] >gi|9758322|dbj|BAB08796.1| contains similarity to
  misc_feature (805)..(1090): Homolog of NCBI NO: 15226883 NR Description: putative protein kinase; protein id: At2g35050.1
  misc_feature (1)..(160): Homolog of NCBI NO: 15226883 NR Description: putative protein kinase; protein id: At2g35050.1
MDDEELEKVKFLCSYNGKIIPRPSDGMLRYVGGQTRIVSVKKNVRFDEFEQKMIQVYGHPVVVKYQLPDEDLDALVSVSSSEDIDNMMEEFEKLVERSSDGSGKLRVFLFDASSSEVDDSFGILEYGDGVDIGQRYVEAVNGVVVSKESVASGSSNPNSDFSGVDVVDSLGVGQSDFVATTWTSSNFSPQTYHSNVSRLVPPDPRSSAYVVPMTVHADPPHSFQLETVSEKPIVGKMQQQQQGYTTPSEHHPPAYVESRQEALRQPDIVHSPIQLLPSSTSLFSQQPFQDSPLSVSSHQFLPAAHMSMAPLNSQISSTPVLINPVMQTQENLLGNYHAAQKLVPLPTEPRNTAYQGTISPGIPFDGYGGSQVPPSNHVVLPDGSFYQQVTMAESFQRVNDCHMCQTSFPHMHSDPIMREGNDGSTMYVPYVSSAFYASRPDDIMRIQQTDKFTGQQSFLNHSNHQERDTLHNANLATAQVETTEPFVNEIVRDVPIKVQVTRQQQHPVDPSVAYAQCRELSGLVDNVNIHAPEIYSNCQNFISPVDKIGKEDIMGTSSQQMARKNMFLHDTSGQSPVSPNIDHTDSAKRLTRVVLPGHESQPKESCVPTQSPLLGNPGLYLQSLVGGQQFDSAEAQSSNPAYDVVESTFDAANLPSSLSSNPDAANLPSSLSSSVGGADHKESSKSLFSNQDPWNLQTNSNEDVKPDLLNSSKVILENDLLIGLWFSLKGSEEEHIKQELQNVAEGVAASVLQSSTPSYHEPPIKVDEYAFNSKGEVSRNDEMKQQSTHFKDIRNQLLERLNFGYSGSDSLDQLQIIKDSDLEELRELGSGTFGTVYHGKWRGTDVAIKRINDRCFAGKPSEQERMIDDFWNEAQNLAGLHHPNVVAFYGVVLDSPGGSVATVTEYMVNGSLRNALQKNVRNFDRCKRQLIAMDIAFGMEYLHGKKIVHFDLKSDNLLVNLRDPHRPICKVGDLGLSKVKCQTLISGGVRGTLPWMAPELLNGTSSLVSEKVDVFSFGIVLWELFTGEEPYADLHYGAIIGGIVSNTLRPQIPDFCDMDWKLLMERCWSAEPSERPSFTEIVNELRTMATKLPSKEQGSTQGPQS

SEQ ID NO: 69493 - protein, 1079 aa, Arabidopsis thaliana
  peptide (1)..(1079): Ceres Seq. ID no. 1815802
  misc_feature (1)..(86): Pfam Name: PB1 domain Pfam Description: PB1 domain
  misc_feature (581)..(1064): Homolog of NCBI NO: 24414006 NR Description: contains EST D23238(C2469)~kinase-like protein
  misc_feature (1)..(337): Homolog of NCBI NO: 24414006 NR Description: contains EST D23238(C2469)~kinase-like protein
  misc_feature (728)..(1070): Homolog of NCBI NO: 15219417 NR Description: hypothetical protein; protein id: At1g79570.1
  misc_feature (1)..(227): Homolog of NCBI NO: 15219417 NR Description: hypothetical protein; protein id: At1g79570.1
  misc_feature (735)..(1070): Homolog of NCBI NO: 15219183 NR Description: putative Ser/Thr protein kinase; protein id:
  misc_feature (1)..(263): Homolog of NCBI NO: 15219183 NR Description: putative Ser/Thr protein kinase; protein id:
  misc_feature (788)..(1069): Homolog of NCBI NO: 15242791 NR Description: putative protein; protein id: At5g57610.1 thaliana] >gi|9758322|dbj|BAB08796.1| contains similarity to
  misc_feature (1)..(118): Homolog of NCBI NO: 15242791 NR Description: putative protein; protein id: At5g57610.1 thaliana] >gi|9758322|dbj|BAB08796.1| contains similarity to
  misc_feature (779)..(1064): Homolog of NCBI NO: 15226883 NR Description: putative protein kinase; protein id: At2g35050.1
  misc_feature (1)..(134): Homolog of NCBI NO: 15226883 NR Description: putative protein kinase; protein id: At2g35050.1
MLRYVGGQTRIVSVKKNVRFDEFEQKMIQVYGHPVVVKYQLPDEDLDALVSVSSSEDIDNMMEEFEKLVERSSDGSGKLRVFLFDASSSEVDDSFGILEYGDGVDIGQRYVEAVNGVVVSKESVASGSSNPNSDFSGVDVVDSLGVGQSDFVATTWTSSNFSPQTYHSNVSRLVPPDPRSSAYVVPMTVHADPPHSFQLETVSEKPIVGKMQQQQQGYTTPSEHHPPAYVESRQEALRQPDIVHSPIQLLPSSTSLFSQQPFQDSPLSVSSHQFLPAAHMSMAPLNSQISSTPVLINPVMQTQENLLGNYHAAQKLVPLPTEPRNTAYQGTISPGIPFDGYGGSQVPPSNHVVLPDGSFYQQVTMAESFQRVNDCHMCQTSFPHMHSDPIMREGNDGSTMYVPYVSSAFYASRPDDIMRIQQTDKFTGQQSFLNHSNHQERDTLHNANLATAQVETTEPFVNEIVRDVPIKVQVTRQQQHPVDPSVAYAQCRELSGLVDNVNIHAPEIYSNCQNFISPVDKIGKEDIMGTSSQQMARKNMFLHDTSGQSPVSPNIDHTDSAKRLTRVVLPGHESQPKESCVPTQSPLLGNPGLYLQSLVGGQQFDSAEAQSSNPAYDVVESTFDAANLPSSLSSNPDAANLPSSLSSSVGGADHKESSKSLFSNQDPWNLQTNSNEDVKPDLLNSSKVILENDLLIGLWFSLKGSEEEHIKQELQNVAEGVAASVLQSSTPSYHEPPIKVDEYAFNSKGEVSRNDEMKQQSTHFKDIRNQLLERLNFGYSGSDSLDQLQIIKDSDLEELRELGSGTFGTVYHGKWRGTDVAIKRINDRCFAGKPSEQERMIDDFWNEAQNLAGLHHPNVVAFYGVVLDSPGGSVATVTEYMVNGSLRNALQKNVRNFDRCKRQLIAMDIAFGMEYLHGKKIVHFDLKSDNLLVNLRDPHRPICKVGDLGLSKVKCQTLISGGVRGTLPWMAPELLNGTSSLVSEKVDVFSFGIVLWELFTGEEPYADLHYGAIIGGIVSNTLRPQIPDFCDMDWKLLMERCWSAEPSERPSFTEIVNELRTMATKLPSKEQGSTQGPQS

SEQ ID NO: 69494 - DNA, 1428 bp, Arabidopsis thaliana
  misc_feature (1)..(1428): Ceres Seq. ID no. 1815803
  misc_feature: MA Experiment ID: 20000182 Result: Up-regulated in Transcription
  misc_feature: MA Experiment 20000182 PARAMETER Experiment Name: At_2mM_SA_P Parameter: Age (day) Value: 14
  misc_feature: MA Experiment 20000182 PARAMETER Experiment Name: At_2mM_SA_P Parameter: Organism Value: A. thaliana
  misc_feature: MA Experiment 20000182 PARAMETER Experiment Name: At_2mM_SA_P Parameter: Plant Line Value: WS
  misc_feature: MA Experiment 20000182 PARAMETER Experiment Name: At_2mM_SA_P Parameter: Timepoint (hr) Value: 6
  misc_feature: MA Experiment 20000182 PARAMETER Experiment Name: At_2mM_SA_P Parameter: Tissue Value: Aerial
  misc_feature: MA Experiment 20000182 PARAMETER Experiment Name: At_2mM_SA_P Parameter: Treatment Value: 2mM SA vs. No Treatment
  misc_feature: MA Experiment ID: 20000184 Result: Down-regulated in Transcription
  misc_feature: MA Experiment 20000184 PARAMETER Experiment Name: At_Shoots__P Parameter: Age (day) Value: 7
  misc_feature: MA Experiment 20000184 PARAMETER Experiment Name: At_Shoots__P Parameter: Tissue Value: Shoots vs. Whole Plant
  misc_feature: MA Experiment ID: 20000234 Result: Down-regulated in Transcription
  misc_feature: MA Experiment 20000234 PARAMETER Experiment Name: At_Siliques_P Parameter: Age (day) Value: 21
  misc_feature: MA Experiment 20000234 PARAMETER Experiment Name: At_Siliques_P Parameter: Organism Value: A. thaliana
  misc_feature: MA Experiment 20000234 PARAMETER Experiment Name: At_Siliques_P Parameter: Plant Line Value: WS
  misc_feature: MA Experiment 20000234 PARAMETER Experiment Name: At_Siliques_P Parameter: Tissue Value: Less Than 5mm Siliques vs. Whole Plant
  misc_feature: MA Experiment ID: 20000235 Result: Down-regulated in Transcription
  misc_feature: MA Experiment 20000235 PARAMETER Experiment Name: At_Siliques_P Parameter: Age (day) Value: 21
  misc_feature: MA Experiment 20000235 PARAMETER Experiment Name: At_Siliques_P Parameter: Organism Value: A. thaliana
  misc_feature: MA Experiment 20000235 PARAMETER Experiment Name: At_Siliques_P Parameter: Plant Line Value: WS
  misc_feature: MA Experiment 20000235 PARAMETER Experiment Name: At_Siliques_P Parameter: Tissue Value: 5-10mm Siliques vs. Whole Plant
  misc_feature: MA Experiment ID: 20000265 Result: Down-regulated in Transcription
  misc_feature: MA Experiment 20000265 PARAMETER Experiment Name: At_Open_Flower_P Parameter: Age (day) Value: 21
  misc_feature: MA Experiment 20000265 PARAMETER Experiment Name: At_Open_Flower_P Parameter: Plant Line Value: WS
  misc_feature: MA Experiment 20000265 PARAMETER Experiment Name: At_Open_Flower_P Parameter: Tissue Value: Closed Flower vs. Whole Plant
  misc_feature: MA Experiment ID: 20000437 Result: Up-regulated in Transcription
  misc_feature: MA Experiment 20000437 PARAMETER Experiment Name: At_Drought_P Parameter: Age (day) Value: 8
  misc_feature: MA Experiment 20000437 PARAMETER Experiment Name: At_Drought_P Parameter: Organism Value: A. thaliana
  misc_feature: MA Experiment 20000437 PARAMETER Experiment Name: At_Drought_P Parameter: Plant Line Value: WS
  misc_feature: MA Experiment 20000437 PARAMETER Experiment Name: At_Drought_P Parameter: Timepoint (hr) Value: 24
  misc_feature: MA Experiment 20000437 PARAMETER Experiment Name: At_Drought_P Parameter: Tissue Value: Whole Plant
  misc_feature: MA Experiment 20000437 PARAMETER Experiment Name: At_Drought_P Parameter: Treatment Value: Drought vs. No Drought
  misc_feature: MA Experiment ID: 20000438 Result: Down-regulated in Transcription
  misc_feature: MA Experiment 20000438 PARAMETER Experiment Name: At_Shoots__P Parameter: Age (day) Value: 14
  misc_feature: MA Experiment 20000438 PARAMETER Experiment Name: At_Shoots__P Parameter: Tissue Value: Shoots vs. Whole Plant
  misc_feature: MA Experiment ID: 20000460 Result: Up-regulated in Transcription
  misc_feature: MA Experiment 20000460 PARAMETER Experiment Name: At_10percent_PEG_P Parameter: Age (day) Value: 12
  misc_feature: MA Experiment 20000460 PARAMETER Experiment Name: At_10percent_PEG_P Parameter: Organism Value: A. thaliana
  misc_feature: MA Experiment 20000460 PARAMETER Experiment Name: At_10percent_PEG_P Parameter: Plant Line Value: WS
  misc_feature: MA Experiment 20000460 PARAMETER Experiment Name: At_10percent_PEG_P Parameter: Timepoint (day) Value: 12
  misc_feature: MA Experiment 20000460 PARAMETER Experiment Name: At_10percent_PEG_P Parameter: Tissue Value: Whole Plant
  misc_feature: MA Experiment 20000460 PARAMETER Experiment Name: At_10percent_PEG_P Parameter: Treatment Value: 10percent PEG vs. No Treatment
  misc_feature: Pfam Name: Pkinase Pfam Description: Protein kinase domain
atggatggagaggttacttcttggattaggagagcaaatttctctcatactgtttgttatcgtatgattacgccgagtttagaatctatgccttttactgtaaaccaagagaagatgcagaggaatccagttactaataagaagagatctgtttctccgttgcctcatatggctctttctgatgcttttatcgaagcaaagtctgatattaagaggttttctactccacatcctagaagagtggaaccagagaagggaatgaaggccaagtcgtcgtcccgcaaagattcttctgagaaaaaatcagttaatctacggtccctgtctcactcgggtcctattagggatcttagtacgcagaaagttaaagagaggggaaagagcaagatagataagaagtcttcaaagtctgttgactatagaggttctaaagtaagttctgcaggagtgcttgaagaatgcctcattgatgtgtctaagttgtcttatggggataggtttgctcacgggaaatatagccagatttatcatggtgaatatgaaggcaaagctgttgctctgaagattatcacagcgcctgaggatagtgacgacatattcttgggagctcgtttagaaaaagagtttatcgtggaagccactcttttatctcgactaagccatccaaatgtcgttaagtttgttggagtgaatactggaaactgtatcatcacagagtatgtacctcgagggtctttaagatcatatctgcacaagctcgagcagaaatcccttcctttggaacagctaatcgattttggtctggatattgctaaaggaatggaatatattcactcaagagagatagttcatcaggatctgaagccagaaaacgtgttgatcgacaatgactttcacttgaagattgctgactttggcatagcgtgcgaggaggagtactgtgatgttttgggggataacataggaacttataggtggatggcacctgaagttttaaaacggataccacatggacggaagtgcgatgtttatagttttggacttcttttatgggaaatggtagctggagcacttccatatgaggagatgaaatttgctgaacaaattgcctacgcagttatatacaagaaaattaggccagttataccgacggattgtccagcggccatgaaagagctgatcgagcgatgttggtcatcgcaaacagacaagagaccggaattctggcagattgtcaaagtgttggaacatttcaagaagtctctaacaagcgaaggaaaacttaatcttttacctagccagatctgtccagaactaaagaaatgtcctaaattctggattcatatattcggatcattccaccaccacagcagcggtggcggcagcagcagcaacaactcagccttacctaagcctaaattcgcttga

SEQ ID NO: 69495 - protein, 475 aa, Arabidopsis thaliana
  peptide (1)..(475): Ceres Seq. ID no. 1815804
  misc_feature: Pfam Name: Pkinase Pfam Description: Protein kinase domain
  misc_feature (1)..(475): Homolog of NCBI NO: 15232680 NR Description: protein kinase 6-like protein; protein id: [Arabidopsis thaliana] >gi|7446378|pir||T12955 probable protein
  misc_feature (24)..(475): Homolog of NCBI NO: 18424175 NR Description: protein kinase 6 - like; protein id: At5g58950.1, by cDNA: gi_18087632, supported by cDNA: gi_20260119 [Arabidopsis
  misc_feature (1)..(38): Homolog of NCBI NO: 18424175 NR Description: protein kinase 6 - like; protein id: At5g58950.1, by cDNA: gi_18087632, supported by cDNA: gi_20260119 [Arabidopsis
  misc_feature (24)..(475): Homolog of NCBI NO: 18087633 NR Description: AT5g58950/k19m22_150 [Arabidopsis thaliana]
  misc_feature (1)..(38): Homolog of NCBI NO: 18087633 NR Description: AT5g58950/k19m22_150 [Arabidopsis thaliana]
  misc_feature (1)..(473): Homolog of NCBI NO: 10241603 NR Description: protein kinase (PK) [Fagus sylvatica]
  misc_feature (2)..(474): Homolog of NCBI NO: 478809 NR Description: protein kinase 6 (EC 2.7.1.-) - soybean
  misc_feature (71)..(459): Homolog of NCBI NO: 34909474 NR Description: putative protein kinase [Oryza sativa (japonica group)] >gi|14209526|dbj|BAB56022.1| putative protein kinase
  misc_feature (47)..(80): Homolog of NCBI NO: 34909474 NR Description: putative protein kinase [Oryza sativa (japonica group)] >gi|14209526|dbj|BAB56022.1| putative protein kinase
  misc_feature (35)..(447): Homolog of NCBI NO: 34903666 NR Description: putative protein kinase [Oryza sativa (japonica group)] >gi|20804523|dbj|BAB92217.1| putative protein kinase
MDGEVTSWIRRANFSHTVCYRMITPSLESMPFTVNQEKMQRNPVTNKKRSVSPLPHMALSDAFIEAKSDIKRFSTPHPRRVEPEKGMKAKSSSRKDSSEKKSVNLRSLSHSGPIRDLSTQKVKERGKSKIDKKSSKSVDYRGSKVSSAGVLEECLIDVSKLSYGDRFAHGKYSQIYHGEYEGKAVALKIITAPEDSDDIFLGARLEKEFIVEATLLSRLSHPNVVKFVGVNTGNCIITEYVPRGSLRSYLHKLEQKSLPLEQLIDFGLDIAKGMEYIHSREIVHQDLKPENVLIDNDFHLKIADFGIACEEEYCDVLGDNIGTYRWMAPEVLKRIPHGRKCDVYSFGLLLWEMVAGALPYEEMKFAEQIAYAVIYKKIRPVIPTDCPAAMKELIERCWSSQTDKRPEFWQIVKVLEHFKKSLTSEGKLNLLPSQICPELKKCPKFWIHIFGSFHHHSSGGGSSSNNSALPKPKFA

SEQ ID NO: 69496 - protein, 454 aa, Arabidopsis thaliana
  peptide (1)..(454): Ceres Seq. ID no. 1815805
  misc_feature: Pfam Name: Pkinase Pfam Description: Protein kinase domain
  misc_feature (3)..(454): Homolog of NCBI NO: 18424175 NR Description: protein kinase 6 - like; protein id: At5g58950.1, by cDNA: gi_18087632, supported by cDNA: gi_20260119 [Arabidopsis
  misc_feature (1)..(17): Homolog of NCBI NO: 18424175 NR Description: protein kinase 6 - like; protein id: At5g58950.1, by cDNA: gi_18087632, supported by cDNA: gi_20260119 [Arabidopsis
  misc_feature (3)..(454): Homolog of NCBI NO: 18087633 NR Description: AT5g58950/k19m22_150 [Arabidopsis thaliana]
  misc_feature (1)..(17): Homolog of NCBI NO: 18087633 NR Description: AT5g58950/k19m22_150 [Arabidopsis thaliana]
  misc_feature (1)..(452): Homolog of NCBI NO: 10241603 NR Description: protein kinase (PK) [Fagus sylvatica]
  misc_feature (1)..(453): Homolog of NCBI NO: 478809 NR Description: protein kinase 6 (EC 2.7.1.-) - soybean
  misc_feature (50)..(438): Homolog of NCBI NO: 34909474 NR Description: putative protein kinase [Oryza sativa (japonica group)] >gi|14209526|dbj|BAB56022.1| putative protein kinase
  misc_feature (26)..(59): Homolog of NCBI NO: 34909474 NR Description: putative protein kinase [Oryza sativa (japonica group)] >gi|14209526|dbj|BAB56022.1| putative protein kinase
  misc_feature (14)..(426): Homolog of NCBI NO: 34903666 NR Description: putative protein kinase [Oryza sativa (japonica group)] >gi|20804523|dbj|BAB92217.1| putative protein kinase
  misc_feature (1)..(454): Homolog of NCBI NO: 15232680 NR Description: protein kinase 6-like protein; protein id: [Arabidopsis thaliana] >gi|7446378|pir||T12955 probable protein
MITPSLESMPFTVNQEKMQRNPVTNKKRSVSPLPHMALSDAFIEAKSDIKRFSTPHPRRVEPEKGMKAKSSSRKDSSEKKSVNLRSLSHSGPIRDLSTQKVKERGKSKIDKKSSKSVDYRGSKVSSAGVLEECLIDVSKLSYGDRFAHGKYSQIYHGEYEGKAVALKIITAPEDSDDIFLGARLEKEFIVEATLLSRLSHPNVVKFVGVNTGNCIITEYVPRGSLRSYLHKLEQKSLPLEQLIDFGLDIAKGMEYIHSREIVHQDLKPENVLIDNDFHLKIADFGIACEEEYCDVLGDNIGTYRWMAPEVLKRIPHGRKCDVYSFGLLLWEMVAGALPYEEMKFAEQIAYAVIYKKIRPVIPTDCPAAMKELIERCWSSQTDKRPEFWQIVKVLEHFKKSLTSEGKLNLLPSQICPELKKCPKFWIHIFGSFHHHSSGGGSSSNNSALPKPKFA

SEQ ID NO: 69497 - protein, 446 aa, Arabidopsis thaliana
  peptide (1)..(446): Ceres Seq. ID no. 1815806
  misc_feature: Pfam Name: Pkinase Pfam Description: Protein kinase domain
  misc_feature (1)..(446): Homolog of NCBI NO: 15232680 NR Description: protein kinase 6-like protein; protein id: [Arabidopsis thaliana] >gi|7446378|pir||T12955 probable protein
  misc_feature (1)..(446): Homolog of NCBI NO: 18424175 NR Description: protein kinase 6 - like; protein id: At5g58950.1, by cDNA: gi_18087632, supported by cDNA: gi_20260119 [Arabidopsis
  misc_feature (1)..(446): Homolog of NCBI NO: 18087633 NR Description: AT5g58950/k19m22_150 [Arabidopsis thaliana]
  misc_feature (1)..(444): Homolog of NCBI NO: 10241603 NR Description: protein kinase (PK) [Fagus sylvatica]
  misc_feature (1)..(445): Homolog of NCBI NO: 478809 NR Description: protein kinase 6 (EC 2.7.1.-) - soybean
  misc_feature (42)..(430): Homolog of NCBI NO: 34909474 NR Description: putative protein kinase [Oryza sativa (japonica group)] >gi|14209526|dbj|BAB56022.1| putative protein kinase
  misc_feature (18)..(51): Homolog of NCBI NO: 34909474 NR Description: putative protein kinase [Oryza sativa (japonica group)] >gi|14209526|dbj|BAB56022.1| putative protein kinase
  misc_feature (6)..(418): Homolog of NCBI NO: 34903666 NR Description: putative protein kinase [Oryza sativa (japonica group)] >gi|20804523|dbj|BAB92217.1| putative protein kinase
  misc_feature (235)..(444): Homolog of NCBI NO: 2168137 NR Description: PKF1 [Fagus sylvatica]
  misc_feature (98)..(413): Homolog of NCBI NO: 7488256 NR Description: protein kinase homolog F24O1.13 - Arabidopsis
MPFTVNQEKMQRNPVTNKKRSVSPLPHMALSDAFIEAKSDIKRFSTPHPRRVEPEKGMKAKSSSRKDSSEKKSVNLRSLSHSGPIRDLSTQKVKERGKSKIDKKSSKSVDYRGSKVSSAGVLEECLIDVSKLSYGDRFAHGKYSQIYHGEYEGKAVALKIITAPEDSDDIFLGARLEKEFIVEATLLSRLSHPNVVKFVGVNTGNCIITEYVPRGSLRSYLHKLEQKSLPLEQLIDFGLDIAKGMEYIHSREIVHQDLKPENVLIDNDFHLKIADFGIACEEEYCDVLGDNIGTYRWMAPEVLKRIPHGRKCDVYSFGLLLWEMVAGALPYEEMKFAEQIAYAVIYKKIRPVIPTDCPAAMKELIERCWSSQTDKRPEFWQIVKVLEHFKKSLTSEGKLNLLPSQICPELKKCPKFWIHIFGSFHHHSSGGGSSSNNSALPKPKFA

SEQ ID NO: 69498 - DNA, 1626 bp, Arabidopsis thaliana
  misc_feature (1)..(1626): Ceres Seq. ID no. 1816083
  misc_feature: MA Experiment ID: 20000169 Result: Down-regulated in Transcription
  misc_feature: MA Experiment 20000169 PARAMETER Experiment Name: At_100uM_ABA_P Parameter: Age (day) Value: 14
  misc_feature: MA Experiment 20000169 PARAMETER Experiment Name: At_100uM_ABA_P Parameter: Organism Value: A. thaliana
  misc_feature: MA Experiment 20000169 PARAMETER Experiment Name: At_100uM_ABA_P Parameter: Plant Line Value: WS
  misc_feature: MA Experiment 20000169 PARAMETER Experiment Name: At_100uM_ABA_P Parameter: Timepoint (hr) Value: 6
  misc_feature: MA Experiment 20000169 PARAMETER Experiment Name: At_100uM_ABA_P Parameter: Tissue Value: Aerial
  misc_feature: MA Experiment 20000169 PARAMETER Experiment Name: At_100uM_ABA_P Parameter: Treatment Value: 100uM ABA vs. No Treatment
  misc_feature: MA Experiment ID: 20000179 Result: Up-regulated in Transcription
  misc_feature: MA Experiment 20000179 PARAMETER Experiment Name: At_Germinating_Seeds_P Parameter: Age (hr) Value: 6 vs. 0
  misc_feature: MA Experiment 20000179 PARAMETER Experiment Name: At_Germinating_Seeds_P Parameter: Tissue Value: Germinating Seeds
  misc_feature: MA Experiment ID: 20000180 Result: Up-regulated in Transcription
  misc_feature: MA Experiment 20000180 PARAMETER Experiment Name: At_Germinating_Seeds_P Parameter: Age (hr) Value: 24 vs. 0
  misc_feature: MA Experiment 20000180 PARAMETER Experiment Name: At_Germinating_Seeds_P Parameter: Tissue Value: Germinating Seeds
  misc_feature: MA Experiment ID: 20000182 Result: Down-regulated in Transcription
  misc_feature: MA Experiment 20000182 PARAMETER Experiment Name: At_2mM_SA_P Parameter: Age (day) Value: 14
  misc_feature: MA Experiment 20000182 PARAMETER Experiment Name: At_2mM_SA_P Parameter: Organism Value: A. thaliana
  misc_feature: MA Experiment 20000182 PARAMETER Experiment Name: At_2mM_SA_P Parameter: Plant Line Value: WS
  misc_feature: MA Experiment 20000182 PARAMETER Experiment Name: At_2mM_SA_P Parameter: Timepoint (hr) Value: 6
  misc_feature: MA Experiment 20000182 PARAMETER Experiment Name: At_2mM_SA_P Parameter: Tissue Value: Aerial
  misc_feature: MA Experiment 20000182 PARAMETER Experiment Name: At_2mM_SA_P Parameter: Treatment Value: 2mM SA vs. No Treatment
  misc_feature: MA Experiment ID: 20000184 Result: Up-regulated in Transcription
  misc_feature: MA Experiment 20000184 PARAMETER Experiment Name: At_Shoots__P Parameter: Age (day) Value: 7
  misc_feature: MA Experiment 20000184 PARAMETER Experiment Name: At_Shoots__P Parameter: Tissue Value: Shoots vs. Whole Plant
  misc_feature: MA Experiment ID: 20000185 Result: Up-regulated in Transcription
  misc_feature: MA Experiment 20000185 PARAMETER Experiment Name: At_Roots__P Parameter: Age (day) Value: 7 vs. 21
  misc_feature: MA Experiment 20000185 PARAMETER Experiment Name: At_Roots__P Parameter: Organism Value: A. thaliana
  misc_feature: MA Experiment 20000185 PARAMETER Experiment Name: At_Roots__P Parameter: Tissue Value: Roots vs. Whole Plant
  misc_feature: MA Experiment ID: 20000234 Result: Up-regulated in Transcription
  misc_feature: MA Experiment 20000234 PARAMETER Experiment Name: At_Siliques_P Parameter: Age (day) Value: 21
  misc_feature: MA Experiment 20000234 PARAMETER Experiment Name: At_Siliques_P Parameter: Organism Value: A. thaliana
  misc_feature: MA Experiment 20000234 PARAMETER Experiment Name: At_Siliques_P Parameter: Plant Line Value: WS
  misc_feature: MA Experiment 20000234 PARAMETER Experiment Name: At_Siliques_P Parameter: Tissue Value: Less Than 5mm Siliques vs. Whole Plant
  misc_feature: MA Experiment ID: 20000264 Result: Up-regulated in Transcription
  misc_feature: MA Experiment 20000264 PARAMETER Experiment Name: At_Open_Flower_P Parameter: Age (day) Value: 21
  misc_feature: MA Experiment 20000264 PARAMETER Experiment Name: At_Open_Flower_P Parameter: Plant Line Value: WS
  misc_feature: MA Experiment 20000264 PARAMETER Experiment Name: At_Open_Flower_P Parameter: Tissue Value: Open Flower vs. Whole Plant
  misc_feature: MA Experiment ID: 20000265 Result: Up-regulated in Transcription
  misc_feature: MA Experiment 20000265 PARAMETER Experiment Name: At_Open_Flower_P Parameter: Age (day) Value: 21
  misc_feature: MA Experiment 20000265 PARAMETER Experiment Name: At_Open_Flower_P Parameter: Plant Line Value: WS
  misc_feature: MA Experiment 20000265 PARAMETER Experiment Name: At_Open_Flower_P Parameter: Tissue Value: Closed Flower vs. Whole Plant
  misc_feature: MA Experiment ID: 20000286 Result: Up-regulated in Transcription
  misc_feature: MA Experiment 20000286 PARAMETER Experiment Name: At_Open_Flower_P Parameter: Age (day) Value: 21
  misc_feature: MA Experiment 20000286 PARAMETER Experiment Name: At_Open_Flower_P Parameter: Plant Line Value: WS
  misc_feature: MA Experiment 20000286 PARAMETER Experiment Name: At_Open_Flower_P Parameter: Tissue Value: Half Open vs. Whole Plant
  misc_feature: MA Experiment ID: 20000438 Result: Up-regulated in Transcription
  misc_feature: MA Experiment 20000438 PARAMETER Experiment Name: At_Shoots__P Parameter: Age (day) Value: 14
  misc_feature: MA Experiment 20000438 PARAMETER Experiment Name: At_Shoots__P Parameter: Tissue Value: Shoots vs. Whole Plant
  misc_feature: MA Experiment ID: 20000439 Result: Up-regulated in Transcription
  misc_feature: MA Experiment 20000439 PARAMETER Experiment Name: At_Roots__P Parameter: Age (day) Value: 14 vs. 21
  misc_feature: MA Experiment 20000439 PARAMETER Experiment Name: At_Roots__P Parameter: Organism Value: A. thaliana
  misc_feature: MA Experiment 20000439 PARAMETER Experiment Name: At_Roots__P Parameter: Tissue Value: Roots vs. Whole Plant
  misc_feature: MA Experiment ID: 20000496 Result: Up-regulated in Transcription
  misc_feature: MA Experiment 20000496 PARAMETER Experiment Name: At_Guard_Cells_P Parameter: Harvest Date Value: 7/19/2002
  misc_feature: MA Experiment 20000496 PARAMETER Experiment Name: At_Guard_Cells_P Parameter: Organism Value: Canola
  misc_feature: MA Experiment 20000496 PARAMETER Experiment Name: At_Guard_Cells_P Parameter: Tissue Value: Guard Cells vs. Leaves
  misc_feature: MA Experiment ID: 20001247 Result: Down-regulated in Transcription
  misc_feature: MA Experiment 20001247 PARAMETER Experiment Name: At_Far-red-induction_P Parameter: Age (day) Value: 7
  misc_feature: MA Experiment 20001247 PARAMETER Experiment Name: At_Far-red-induction_P Parameter: Light Value: Far-red vs. White
  misc_feature: MA Experiment 20001247 PARAMETER Experiment Name: At_Far-red-induction_P Parameter: Organism Value: A. thaliana
  misc_feature: MA Experiment 20001247 PARAMETER Experiment Name: At_Far-red-induction_P Parameter: Plant Line Value: Columbia
  misc_feature: MA Experiment 20001247 PARAMETER Experiment Name: At_Far-red-induction_P Parameter: Timepoint (hr) Value: 1
  misc_feature: MA Experiment 20001247 PARAMETER Experiment Name: At_Far-red-induction_P Parameter: Tissue Value: Whole Plant
  misc_feature: MA Experiment ID: 20001248 Result: Down-regulated in Transcription
  misc_feature: MA Experiment 20001248 PARAMETER Experiment Name: At_Far-red-induction_P Parameter: Age (day) Value: 7
  misc_feature: MA Experiment 20001248 PARAMETER Experiment Name: At_Far-red-induction_P Parameter: Light Value: Far-red vs. White
  misc_feature: MA Experiment 20001248 PARAMETER Experiment Name: At_Far-red-induction_P Parameter: Organism Value: A. thaliana
  misc_feature: MA Experiment 20001248 PARAMETER Experiment Name: At_Far-red-induction_P Parameter: Plant Line Value: Columbia
  misc_feature: MA Experiment 20001248 PARAMETER Experiment Name: At_Far-red-induction_P Parameter: Timepoint (hr) Value: 4
  misc_feature: MA Experiment 20001248 PARAMETER Experiment Name: At_Far-red-induction_P Parameter: Tissue Value: Whole Plant
  misc_feature: MA Experiment ID: 20001450 Result: Down-regulated in Transcription
  misc_feature: MA Experiment 20001450 PARAMETER Experiment Name: At_Far-red-induction_P Parameter: Age (day) Value: 7
  misc_feature: MA Experiment 20001450 PARAMETER Experiment Name: At_Far-red-induction_P Parameter: Light Value: Far-red vs. White
  misc_feature: MA Experiment 20001450 PARAMETER Experiment Name: At_Far-red-induction_P Parameter: Organism Value: A. thaliana
  misc_feature: MA Experiment 20001450 PARAMETER Experiment Name: At_Far-red-induction_P Parameter: Plant Line Value: Columbia
  misc_feature: MA Experiment 20001450 PARAMETER Experiment Name: At_Far-red-induction_P Parameter: Timepoint (hr) Value: 8
  misc_feature: MA Experiment 20001450 PARAMETER Experiment Name: At_Far-red-induction_P Parameter: Tissue Value: Whole Plant
  misc_feature: MA Experiment ID: 20001451 Result: Down-regulated in Transcription
  misc_feature: MA Experiment 20001451 PARAMETER Experiment Name: At_Far-red-induction_P Parameter: Age (day) Value: 7
  misc_feature: MA Experiment 20001451 PARAMETER Experiment Name: At_Far-red-induction_P Parameter: Light Value: Far-red vs. White
  misc_feature: MA Experiment 20001451 PARAMETER Experiment Name: At_Far-red-induction_P Parameter: Organism Value: A. thaliana
  misc_feature: MA Experiment 20001451 PARAMETER Experiment Name: At_Far-red-induction_P Parameter: Plant Line Value: Columbia
  misc_feature: MA Experiment 20001451 PARAMETER Experiment Name: At_Far-red-induction_P Parameter: Timepoint (hr) Value: 24
  misc_feature: MA Experiment 20001451 PARAMETER Experiment Name: At_Far-red-induction_P Parameter: Tissue Value: Whole Plant
  misc_feature: MA Experiment ID: 20001911 Result: Down-regulated in Transcription
  misc_feature: MA Experiment 20001911 PARAMETER Experiment Name: At_Drought_Reproduction_P Parameter: Age (day) Value: 40
  misc_feature: MA Experiment 20001911 PARAMETER Experiment Name: At_Drought_Reproduction_P Parameter: Organism Value: A. thaliana
  misc_feature: MA Experiment 20001911 PARAMETER Experiment Name: At_Drought_Reproduction_P Parameter: Plant Line Value: WS
  misc_feature: MA Experiment 20001911 PARAMETER Experiment Name: At_Drought_Reproduction_P Parameter: Timepoint (day) Value: 10
  misc_feature: MA Experiment 20001911 PARAMETER Experiment Name: At_Drought_Reproduction_P Parameter: Tissue Value: Flowers
  misc_feature: MA Experiment 20001911 PARAMETER Experiment Name: At_Drought_Reproduction_P Parameter: Treatment Value: Drought vs. No Drought
atgttacattgtcattataaccgcagaaaagatggaactccgttcaatacatcgattataacaccaccgcctccgcctgtggttgatcctcctcccgctactcaccgtgctcctcctgttccccgtatccctcctgtttctggtgttcccccagcaccttttgctccttttgctccactgcaaccacaacaacatccaccaccatcaccacctctggtctggtcaccaccttcttctgataatggaggaggagatccctggaactctgtgtcagggcaacctaccttgcaaatatcacctccttcaggttcaggatcaggaaaattctggtccactcaaagaatcattctagtagtttcttcagtggccataattgttcttgtatccggtttgtgtgttacactttggagatgttgcagaagtaaaatatataaccgatattacagtggagctcgtaaagatttacaacgaccatacttcaataagcctccatctcaaccaacccccactatgggaaaagtttctcgggagcctatggttaagcctttcgatggatatggagctggagacaggaaatatgggtatccaatgccacagcgggctgaagagagccggagagcaatgcctcctacttcatattataataaggatgttaatacacctcaaaagccgctgcaacaaccaccgaggcagttccagtccaatgatactgcttcaaagagagcggctcatttccccccgggcttgaattcctcatcttctgctactgttttcaccattgcttcacttcagcaatacacaaataatttctcagaagagaatataatcggggaagggtcgattggtaatgtctacagagctgagcttcgtcatggaaagtttcttgcggtgaagaagctgagcaataccatcaacagaacacagagtgacggcgaattcctcaatctagtctccaatgtgttgaagcttaaacgcggtcatatattggagcttcttggttactgtaacgagtttggtcaaaggttacttgtgtatgagtactgtcctaatggatcacttcaagatgcactacatttggatcgcaagttgcacaagaagctcacttggaatgtacgtataaatattgcattaggagcttcaaaggcattgcagtttcttcatgaggtatgtcaaccgccggttgttcaccagaatttcaagtcttccaaggttcttcttgatggaaagctctcagtacgtgttgcagacagcggtttggcttatatgttaccaccacgcccaacgagtcagatggcgggttatgccgctcctgaggttgagtatggaagctacacttgtcagagcgacgtatttagccttggggttgtaatgttagaactgctcactggacgcagaccatttgacaggacaaggccgaggggacatcaaacactagctcagtgggcgattcctcggcttcatgacatcgatgcgttgacaagaatggttgatccgtcattacacggagcgtatccaatgaaatcattgtcacgttttgcagatatcatatcacgttcactgcagatggaaccaggatttagaccgccgatatcagaaatagtccaagatcttcaacatatgatctaa

SEQ ID NO: 69499 - protein, 541 aa, Arabidopsis thaliana
  peptide (1)..(541): Ceres Seq. ID no. 1816084
  misc_feature (1)..(541): Homolog of NCBI NO: 1931637 NR Description: receptor-associated kinase isolog; 3024-808
  misc_feature (7)..(541): Homolog of NCBI NO: 25402649 NR Description: hypothetical protein [imported] - Arabidopsis >gi|5734735|gb|AAD50000.1|AC007259_13 Similar to protein kinases
  misc_feature (7)..(541): Homolog of NCBI NO: 30682076 NR Description: leucine rich repeat protein kinase family thaliana] >gi|20259441|gb|AAM14041.1| unknown protein thaliana] >gi|21436211|gb|AAM51393.1| unknown protein
  misc_feature (22)..(541): Homolog of NCBI NO: 15236294 NR Description: leucine-rich repeat transmembrane protein kinase, protein id: At4g03390.1 [Arabidopsis thaliana]
  misc_feature (37)..(541): Homolog of NCBI NO: 18399502 NR Description: putative LRR receptor protein kinase; protein id: supported by cDNA: gi_15810274 [Arabidopsis thaliana] putative LRR receptor protein kinase receptor protein kinase
  misc_feature (258)..(541): Homolog of NCBI NO: 25411997 NR Description: probable LRR receptor protein kinase [imported] -
  misc_feature (218)..(541): Homolog of NCBI NO: 7489783 NR Description: leucine-rich repeat transmembrane protein kinase
  misc_feature (181)..(541): Homolog of NCBI NO: 29367551 NR Description: putative leucine-rich repeat transmembrane
  misc_feature (218)..(541): Homolog of NCBI NO: 7489784 NR Description: leucine-rich repeat transmembrane protein kinase
  misc_feature (249)..(541): Homolog of NCBI NO: 15234728 NR Description: serine/threonine protein kinase like protein; id: At4g22130.1 [Arabidopsis thaliana] >gi|11259536|pir||T49120
MLHCHYNRRKDGTPFNTSIITPPPPPVVDPPPATHRAPPVPRIPPVSGVPPAPFAPFAPLQPQQHPPPSPPLVWSPPSSDNGGGDPWNSVSGQPTLQISPPSGSGSGKFWSTQRIILVVSSVAIIVLVSGLCVTLWRCCRSKIYNRYYSGARKDLQRPYFNKPPSQPTPTMGKVSREPMVKPFDGYGAGDRKYGYPMPQRAEESRRAMPPTSYYNKDVNTPQKPLQQPPRQFQSNDTASKRAAHFPPGLNSSSSATVFTIASLQQYTNNFSEENIIGEGSIGNVYRAELRHGKFLAVKKLSNTINRTQSDGEFLNLVSNVLKLKRGHILELLGYCNEFGQRLLVYEYCPNGSLQDALHLDRKLHKKLTWNVRINIALGASKALQFLHEVCQPPVVHQNFKSSKVLLDGKLSVRVADSGLAYMLPPRPTSQMAGYAAPEVEYGSYTCQSDVFSLGVVMLELLTGRRPFDRTRPRGHQTLAQWAIPRLHDIDALTRMVDPSLHGAYPMKSLSRFADIISRSLQMEPGFRPPISEIVQDLQHMI

SEQ ID NO: 69500 - protein, 371 aa, Arabidopsis thaliana
  peptide (1)..(371): Ceres Seq. ID no. 1816085
  misc_feature (1)..(371): Homolog of NCBI NO: 1931637 NR Description: receptor-associated kinase isolog; 3024-808
  misc_feature (1)..(371): Homolog of NCBI NO: 25402649 NR Description: hypothetical protein [imported] - Arabidopsis >gi|5734735|gb|AAD50000.1|AC007259_13 Similar to protein kinases
  misc_feature (1)..(371): Homolog of NCBI NO: 30682076 NR Description: leucine rich repeat protein kinase family thaliana] >gi|20259441|gb|AAM14041.1| unknown protein thaliana] >gi|21436211|gb|AAM51393.1| unknown protein
  misc_feature (1)..(371): Homolog of NCBI NO: 15236294 NR Description: leucine-rich repeat transmembrane protein kinase, protein id: At4g03390.1 [Arabidopsis thaliana]
  misc_feature (1)..(371): Homolog of NCBI NO: 18399502 NR Description: putative LRR receptor protein kinase; protein id: supported by cDNA: gi_15810274 [Arabidopsis thaliana] putative LRR receptor protein kinase receptor protein kinase
  misc_feature (88)..(371): Homolog of NCBI NO: 25411997 NR Description: probable LRR receptor protein kinase [imported] -
  misc_feature (48)..(371): Homolog of NCBI NO: 7489783 NR Description: leucine-rich repeat transmembrane protein kinase
  misc_feature (11)..(371): Homolog of NCBI NO: 29367551 NR Description: putative leucine-rich repeat transmembrane
  misc_feature (48)..(371): Homolog of NCBI NO: 7489784 NR Description: leucine-rich repeat transmembrane protein kinase
  misc_feature (79)..(371): Homolog of NCBI NO: 15234728 NR Description: serine/threonine protein kinase like protein; id: At4g22130.1 [Arabidopsis thaliana] >gi|11259536|pir||T49120
MGKVSREPMVKPFDGYGAGDRKYGYPMPQRAEESRRAMPPTSYYNKDVNTPQKPLQQPPRQFQSNDTASKRAAHFPPGLNSSSSATVFTIASLQQYTNNFSEENIIGEGSIGNVYRAELRHGKFLAVKKLSNTINRTQSDGEFLNLVSNVLKLKRGHILELLGYCNEFGQRLLVYEYCPNGSLQDALHLDRKLHKKLTWNVRINIALGASKALQFLHEVCQPPVVHQNFKSSKVLLDGKLSVRVADSGLAYMLPPRPTSQMAGYAAPEVEYGSYTCQSDVFSLGVVMLELLTGRRPFDRTRPRGHQTLAQWAIPRLHDIDALTRMVDPSLHGAYPMKSLSRFADIISRSLQMEPGFRPPISEIVQDLQHMI

SEQ ID NO: 69501 - protein, 363 aa, Arabidopsis thaliana
  peptide (1)..(363): Ceres Seq. ID no. 1816086
  misc_feature (1)..(363): Homolog of NCBI NO: 1931637 NR Description: receptor-associated kinase isolog; 3024-808
  misc_feature (1)..(363): Homolog of NCBI NO: 25402649 NR Description: hypothetical protein [imported] - Arabidopsis >gi|5734735|gb|AAD50000.1|AC007259_13 Similar to protein kinases
  misc_feature (1)..(363): Homolog of NCBI NO: 30682076 NR Description: leucine rich repeat protein kinase family thaliana] >gi|20259441|gb|AAM14041.1| unknown protein thaliana] >gi|21436211|gb|AAM51393.1| unknown protein
  misc_feature (1)..(363): Homolog of NCBI NO: 15236294 NR Description: leucine-rich repeat transmembrane protein kinase, protein id: At4g03390.1 [Arabidopsis thaliana]
  misc_feature (1)..(363): Homolog of NCBI NO: 18399502 NR Description: putative LRR receptor protein kinase; protein id: supported by cDNA: gi_15810274 [Arabidopsis thaliana] putative LRR receptor protein kinase receptor protein kinase
  misc_feature (80)..(363): Homolog of NCBI NO: 25411997 NR Description: probable LRR receptor protein kinase [imported] -
  misc_feature (40)..(363): Homolog of NCBI NO: 7489783 NR Description: leucine-rich repeat transmembrane protein kinase
  misc_feature (3)..(363): Homolog of NCBI NO: 29367551 NR Description: putative leucine-rich repeat transmembrane
  misc_feature (40)..(363): Homolog of NCBI NO: 7489784 NR Description: leucine-rich repeat transmembrane protein kinase
  misc_feature (71)..(363): Homolog of NCBI NO: 15234728 NR Description: serine/threonine protein kinase like protein; id: At4g22130.1 [Arabidopsis thaliana] >gi|11259536|pir||T49120
MVKPFDGYGAGDRKYGYPMPQRAEESRRAMPPTSYYNKDVNTPQKPLQQPPRQFQSNDTASKRAAHFPPGLNSSSSATVFTIASLQQYTNNFSEENIIGEGSIGNVYRAELRHGKFLAVKKLSNTINRTQSDGEFLNLVSNVLKLKRGHILELLGYCNEFGQRLLVYEYCPNGSLQDALHLDRKLHKKLTWNVRINIALGASKALQFLHEVCQPPVVHQNFKSSKVLLDGKLSVRVADSGLAYMLPPRPTSQMAGYAAPEVEYGSYTCQSDVFSLGVVMLELLTGRRPFDRTRPRGHQTLAQWAIPRLHDIDALTRMVDPSLHGAYPMKSLSRFADIISRSLQMEPGFRPPISEIVQDLQHMI

SEQ ID NO: 69502 - DNA, 1596 bp, Arabidopsis thaliana
  misc_feature (1)..(1596): Ceres Seq. ID no. 1816091
  misc_feature: MA Experiment ID: 20000315 Result: Down-regulated in Transcription
  misc_feature: MA Experiment 20000315 PARAMETER Experiment Name: At_14day_Shoots-Roots_Sub_P Parameter: Age (day) Value: 14
  misc_feature: MA Experiment 20000315 PARAMETER Experiment Name: At_14day_Shoots-Roots_Sub_P Parameter: Organism Value: A. thaliana
  misc_feature: MA Experiment 20000315 PARAMETER Experiment Name: At_14day_Shoots-Roots_Sub_P Parameter: Plant Line Value: WS
  misc_feature: MA Experiment 20000315 PARAMETER Experiment Name: At_14day_Shoots-Roots_Sub_P Parameter: Tissue Value: Shoots vs. Whole Plant
  misc_feature: MA Experiment ID: 20000328 Result: Down-regulated in Transcription
  misc_feature: MA Experiment 20000328 PARAMETER Experiment Name: At_42deg_Heat_Sub_P Parameter: Age (day) Value: 14
  misc_feature: MA Experiment 20000328 PARAMETER Experiment Name: At_42deg_Heat_Sub_P Parameter: Organism Value: A. thaliana
  misc_feature: MA Experiment 20000328 PARAMETER Experiment Name: At_42deg_Heat_Sub_P Parameter: Plant Line Value: WS
  misc_feature: MA Experiment 20000328 PARAMETER Experiment Name: At_42deg_Heat_Sub_P Parameter: Temperature (deg C) Value: 42 vs. 22
  misc_feature: MA Experiment 20000328 PARAMETER Experiment Name: At_42deg_Heat_Sub_P Parameter: Timepoint (hr) Value: 6
  misc_feature: MA Experiment 20000328 PARAMETER Experiment Name: At_42deg_Heat_Sub_P Parameter: Tissue Value: Aerial
  misc_feature: MA Experiment ID: 20000355 Result: Up-regulated in Transcription
  misc_feature: MA Experiment 20000355 PARAMETER Experiment Name: At_Siliques_Sub_P Parameter: Age (day) Value: 21
  misc_feature: MA Experiment 20000355 PARAMETER Experiment Name: At_Siliques_Sub_P Parameter: Organism Value: A. thaliana
  misc_feature: MA Experiment 20000355 PARAMETER Experiment Name: At_Siliques_Sub_P Parameter: Plant Line Value: WS
  misc_feature: MA Experiment 20000355 PARAMETER Experiment Name: At_Siliques_Sub_P Parameter: Tissue Value: Less Than 5mm Siliques vs. Whole Plant
  misc_feature: MA Experiment ID: 20000440 Result: Up-regulated in Transcription
  misc_feature: MA Experiment 20000440 PARAMETER Experiment Name: At_Closed-Flower__Sub_P Parameter: Tissue Value: Closed Flower vs. Whole Plant
atgtttcagggatatgacttgttgaatcaactggaaccatttatccatcagatattaacatatgctcagcaatcaaaagaacagtctaagattgaacaagatcgactagcaagacgcattcaagaattcaggacccagtctgaattagacagccaacagctggtcgctaatgcagagtcgtctggtgctaacgggaaccgtgttggtgggaatatcccttacaaaaataccgaaacaagtttaacagcagacaaggaaggatctcatcatcactatagtggatcatctgaccataatactggagtttttggtcgatttcgggcaagacataatcgatcaggttcgctcactgagggcagcttaggctataatactattgatcttcgcacttctttgataaaactagacgcagaagacatggatcttcgtctctgtttcagaattatttctcctcaaaaaacttacacacttcaggctgaaaatggagcagataggatggactgggtaaataagatcacaaaagctatagggacgcttctcaattctcattttctgcaacagtcacctgtgcgatacttggataaagacaactccagttctgctcctgctaatgctgtcgtctccggggatcaaattcgacataatgattcaagacaaaatatcggggatgatgtctcaacaatactcagaggacttccgggaaataatgcatgtgcagagtgcaatgctcctgagcccgattgggcatcgttaaatcttggagttttgttgtgcattcaatgctctggtgttcacaggaatctcggggttcatatatccaaggtgaggtccctctcattagatgtgaaagtgtgggagccaacgatcttggacttatttagaaatttgggtaatgtatactgtaattcactgtgggagggactacttcaccttgacgatgactgcgaagacggatcagcattgtcgcatgcttcagtttcaaaaccatgtccagaagattcctttagtgtgaaggagaaatacattctaggaaagtacctggagaaagcattagtcatcaaggatgaaagtgaagcaaacctttctgctgcgagtagaatatgggaagctgttcaaagcagaaacatacgagaaatctatcgacttatagttactactggggatgtaaatatcatcaataccaagtttgatgatataactgatatcgatgcatatcaccatattgatgcagcagagaaagcagtaaagaaaagacatgatccaactgtatgtcagagaattaaagaatccaacgaaccaagaagctgtcttcaaggatgctccttgctccatgtggcttgtcacattggtgactctgtcttgcttgaattgttgttgcagtttggtgctgacctaaacataagagattatcacggaaggactccgttgcaccattgcatatcatcagggaaccacaaatttgcaaagattctactgcgaagaggagcacgtccgtcgatagaggacgatggagggctaagcgttctagaaagagcgatggaaatgggagcgataactgatgaagagctctttcttctcttagccgagtgcgcataa

SEQ ID NO: 69503 - protein, 531 aa, Arabidopsis thaliana
  peptide (1)..(531): Ceres Seq. ID no. 1816092
  misc_feature (223)..(359): Pfam Name: Putative GTPase activating protein for Arf Pfam Description: Putative GTPase activating protein for Arf
  misc_feature (1)..(531): Homolog of NCBI NO: 25402625 NR Description: hypothetical protein [imported] - Arabidopsis
  misc_feature (87)..(531): Homolog of NCBI NO: 30681946 NR Description: ARF GTPase-activating domain-containing protein
  misc_feature (4)..(86): Homolog of NCBI NO: 30681946 NR Description: ARF GTPase-activating domain-containing protein
  misc_feature (82)..(530): Homolog of NCBI NO: 15219822 NR Description: GCN4-complementing protein, putative; protein id:
  misc_feature (4)..(92): Homolog of NCBI NO: 15219822 NR Description: GCN4-complementing protein, putative; protein id:
  misc_feature (222)..(529): Homolog of NCBI NO: 11358303 NR Description: hypothetical protein T31B5.120 - Arabidopsis >gi|7529285|emb|CAB86637.1| putative protein [Arabidopsis
  misc_feature (222)..(529): Homolog of NCBI NO: 30684352 NR Description: ARF GTPase-activating domain-containing protein
  misc_feature (3)..(214): Homolog of NCBI NO: 11358303 NR Description: hypothetical protein T31B5.120 - Arabidopsis >gi|7529285|emb|CAB86637.1| putative protein [Arabidopsis
  misc_feature (3)..(214): Homolog of NCBI NO: 30684352 NR Description: ARF GTPase-activating domain-containing protein
  misc_feature (228)..(529): Homolog of NCBI NO: 38175545 NR Description: putative ARF GTPase-activating domain-containing
MFQGYDLLNQLEPFIHQILTYAQQSKEQSKIEQDRLARRIQEFRTQSELDSQQLVANAESSGANGNRVGGNIPYKNTETSLTADKEGSHHHYSGSSDHNTGVFGRFRARHNRSGSLTEGSLGYNTIDLRTSLIKLDAEDMDLRLCFRIISPQKTYTLQAENGADRMDWVNKITKAIGTLLNSHFLQQSPVRYLDKDNSSSAPANAVVSGDQIRHNDSRQNIGDDVSTILRGLPGNNACAECNAPEPDWASLNLGVLLCIQCSGVHRNLGVHISKVRSLSLDVKVWEPTILDLFRNLGNVYCNSLWEGLLHLDDDCEDGSALSHASVSKPCPEDSFSVKEKYILGKYLEKALVIKDESEANLSAASRIWEAVQSRNIREIYRLIVTTGDVNIINTKFDDITDIDAYHHIDAAEKAVKKRHDPTVCQRIKESNEPRSCLQGCSLLHVACHIGDSVLLELLLQFGADLNIRDYHGRTPLHHCISSGNHKFAKILLRRGARPSIEDDGGLSVLERAMEMGAITDEELFLLLAECA

SEQ ID NO: 69504 - protein, 392 aa, Arabidopsis thaliana
  peptide (1)..(392): Ceres Seq. ID no. 1816093
  misc_feature (84)..(220): Pfam Name: Putative GTPase activating protein for Arf Pfam Description: Putative GTPase activating protein for Arf
  misc_feature (1)..(392): Homolog of NCBI NO: 25402625 NR Description: hypothetical protein [imported] - Arabidopsis
  misc_feature (1)..(392): Homolog of NCBI NO: 30681946 NR Description: ARF GTPase-activating domain-containing protein
  misc_feature (1)..(391): Homolog of NCBI NO: 15219822 NR Description: GCN4-complementing protein, putative; protein id:
  misc_feature (83)..(390): Homolog of NCBI NO: 11358303 NR Description: hypothetical protein T31B5.120 - Arabidopsis >gi|7529285|emb|CAB86637.1| putative protein [Arabidopsis
  misc_feature (83)..(390): Homolog of NCBI NO: 30684352 NR Description: ARF GTPase-activating domain-containing protein
  misc_feature (1)..(75): Homolog of NCBI NO: 11358303 NR Description: hypothetical protein T31B5.120 - Arabidopsis >gi|7529285|emb|CAB86637.1| putative protein [Arabidopsis
  misc_feature (1)..(75): Homolog of NCBI NO: 30684352 NR Description: ARF GTPase-activating domain-containing protein
  misc_feature (89)..(390): Homolog of NCBI NO: 38175545 NR Description: putative ARF GTPase-activating domain-containing
  misc_feature (1)..(87): Homolog of NCBI NO: 38175545 NR Description: putative ARF GTPase-activating domain-containing
  misc_feature (57)..(253): Homolog of NCBI NO: 15240398 NR Description: GCN4-complementing protein - like; protein id:
MDLRLCFRIISPQKTYTLQAENGADRMDWVNKITKAIGTLLNSHFLQQSPVRYLDKDNSSSAPANAVVSGDQIRHNDSRQNIGDDVSTILRGLPGNNACAECNAPEPDWASLNLGVLLCIQCSGVHRNLGVHISKVRSLSLDVKVWEPTILDLFRNLGNVYCNSLWEGLLHLDDDCEDGSALSHASVSKPCPEDSFSVKEKYILGKYLEKALVIKDESEANLSAASRIWEAVQSRNIREIYRLIVTTGDVNIINTKFDDITDIDAYHHIDAAEKAVKKRHDPTVCQRIKESNEPRSCLQGCSLLHVACHIGDSVLLELLLQFGADLNIRDYHGRTPLHHCISSGNHKFAKILLRRGARPSIEDDGGLSVLERAMEMGAITDEELFLLLAECA

SEQ ID NO: 69505 - protein, 366 aa, Arabidopsis thaliana
  peptide (1)..(366): Ceres Seq. ID no. 1816094
  misc_feature (58)..(194): Pfam Name: Putative GTPase activating protein for Arf Pfam Description: Putative GTPase activating protein for Arf
  misc_feature (1)..(366): Homolog of NCBI NO: 25402625 NR Description: hypothetical protein [imported] - Arabidopsis
  misc_feature (1)..(366): Homolog of NCBI NO: 30681946 NR Description: ARF GTPase-activating domain-containing protein
  misc_feature (1)..(365): Homolog of NCBI NO: 15219822 NR Description: GCN4-complementing protein, putative; protein id:
  misc_feature (57)..(364): Homolog of NCBI NO: 11358303 NR Description: hypothetical protein T31B5.120 - Arabidopsis >gi|7529285|emb|CAB86637.1| putative protein [Arabidopsis
  misc_feature (57)..(364): Homolog of NCBI NO: 30684352 NR Description: ARF GTPase-activating domain-containing protein
  misc_feature (1)..(49): Homolog of NCBI NO: 11358303 NR Description: hypothetical protein T31B5.120 - Arabidopsis >gi|7529285|emb|CAB86637.1| putative protein [Arabidopsis
  misc_feature (1)..(49): Homolog of NCBI NO: 30684352 NR Description: ARF GTPase-activating domain-containing protein
  misc_feature (63)..(364): Homolog of NCBI NO: 38175545 NR Description: putative ARF GTPase-activating domain-containing
  misc_feature (1)..(61): Homolog of NCBI NO: 38175545 NR Description: putative ARF GTPase-activating domain-containing
  misc_feature (31)..(227): Homolog of NCBI NO: 15240398 NR Description: GCN4-complementing protein - like; protein id:
MDWVNKITKAIGTLLNSHFLQQSPVRYLDKDNSSSAPANAVVSGDQIRHNDSRQNIGDDVSTILRGLPGNNACAECNAPEPDWASLNLGVLLCIQCSGVHRNLGVHISKVRSLSLDVKVWEPTILDLFRNLGNVYCNSLWEGLLHLDDDCEDGSALSHASVSKPCPEDSFSVKEKYILGKYLEKALVIKDESEANLSAASRIWEAVQSRNIREIYRLIVTTGDVNIINTKFDDITDIDAYHHIDAAEKAVKKRHDPTVCQRIKESNEPRSCLQGCSLLHVACHIGDSVLLELLLQFGADLNIRDYHGRTPLHHCISSGNHKFAKILLRRGARPSIEDDGGLSVLERAMEMGAITDEELFLLLAECA

SEQ ID NO: 69506 - DNA, 1716 bp, Arabidopsis thaliana
  misc_feature (1)..(1716): Ceres Seq. ID no. 1816550
  misc_feature: MA Experiment ID: 20000307 Result: Up-regulated in Transcription
  misc_feature: MA Experiment 20000307 PARAMETER Experiment Name: At_Germinating_Seeds_Sub_P Parameter: Age (hr) Value: 24 vs. 0
  misc_feature: MA Experiment 20000307 PARAMETER Experiment Name: At_Germinating_Seeds_Sub_P Parameter: Organism Value: A. thaliana
  misc_feature: MA Experiment 20000307 PARAMETER Experiment Name: At_Germinating_Seeds_Sub_P Parameter: Plant Line Value: WS
  misc_feature: MA Experiment 20000307 PARAMETER Experiment Name: At_Germinating_Seeds_Sub_P Parameter: Tissue Value: Germinating Seeds
  misc_feature: MA Experiment ID: 20000347 Result: Down-regulated in Transcription
  misc_feature: MA Experiment 20000347 PARAMETER Experiment Name: At_2mM_SA_Sub_P Parameter: Age (day) Value: 14
  misc_feature: MA Experiment 20000347 PARAMETER Experiment Name: At_2mM_SA_Sub_P Parameter: Organism Value: A. thaliana
  misc_feature: MA Experiment 20000347 PARAMETER Experiment Name: At_2mM_SA_Sub_P Parameter: Plant Line Value: WS
  misc_feature: MA Experiment 20000347 PARAMETER Experiment Name: At_2mM_SA_Sub_P Parameter: Timepoint (hr) Value: 6
  misc_feature: MA Experiment 20000347 PARAMETER Experiment Name: At_2mM_SA_Sub_P Parameter: Tissue Value: Aerial
  misc_feature: MA Experiment 20000347 PARAMETER Experiment Name: At_2mM_SA_Sub_P Parameter: Treatment Value: 2mM SA vs. No Treatment
atggttttttccgttgcaacaagctctgttacgaacccaaagctccatcatcaccaccatcttagtgacttcaacagaaacagagtatctacatctctcaagataatgaactcgaagaatcacacaaacccaagaaagtgtgagtgttttgatctctacgatcaattaattccatacaagaaagcttggtcatggcaaaaaagcattctcaatgagaaaaaagctttgattgataaaaaccaagagtgttcagattcattaattatactacaacatccttctgtttacacaatgggaactggaagctcagagaattatctcaatttcgacataaagaatgctcctttcgatgtttatagaacagaacgtggtggtgaagttacttatcatggtcctggtcagctagttatgtatcctataatcaatctacggaatcacaaaatggatcttcattggtacttaaggaagcttgaggaagtagttattcgtgttctttcttcggctttcgccatcaatgcttctcgtctcgacggttttactggagtttgggttggcaacaaaaaaatggcggcgataggtattcgtgtgtcgaaatggatgacatatcatggtctagctcttaatgttacaacagatttaacaccctttaactccatagttccatgtgggataaggaaccgtggggttggaagcgtaaagggtttgattgaggatggagaacattataataagcttgaagatttgcagttgttagatatagctcatgagtcgttactaaaggaattctctgaagtttttcagcttcagatggaaaagcaaacacttacaagtgatttatgggatggtggttatgcaggaaaccttttgtggaccagtgattttattggcagtttgttaagttgtttgttttcttgtagatatgtgtgtgagagatttgatttctctatttctctctccaaagaaagcttatctgcttcttggattgaccacaaagggatggctctggaagctgctttctccatgagtttttgctccttctctgtccctaaagcaatcttctgtgagagagaaacttcatcttttcaacgaatcacctcgagagcaaagggaattgcgggtgagagtcaagttcaaagctctgatggagttgagactcaagtcaaggaaacttctcccaaagtatttgataaactgcctgaaagaaatttagatacttggagcggtggcagagaaacagcaagaggactttcaggttcagtagtaagaaacactgtacgaaaagatactactttacgacatatctcaccttctagtcattcaacaaaggttagaggagataagccagagatttcagggggtgagaagaaagctattgtagatagaagcaaggcctacgtaaagctgaaatctttagggaaagaagtgagagacgcaggctatgtaccagagactaagtatgttcttcacgacattgatgaagaagctaaagagaaagccttgatgcatcatagtgaacggttagctattgctttcgggattataaacactcctccagggacgacaataagggtgatgaagaatctgaggatatgtggagattgccataacttcataaagatattatcgagtatcgaagatagagagatcattgtaagagataacaagaggttccatcattttagagatggtaactgctcttgtggagattattggtag

SEQ ID NO: 69507 - protein, 571 aa, Arabidopsis thaliana
  peptide (1)..(571): Ceres Seq. ID no. 1816551
  misc_feature (1)..(571): Homolog of NCBI NO: 25405224 NR Description: F16N3.14 [imported] - Arabidopsis thaliana
  misc_feature (311)..(571): Homolog of NCBI NO: 15220259 NR Description: hypothetical protein; protein id: At1g47580.1
  misc_feature (98)..(135): Homolog of NCBI NO: 15220259 NR Description: hypothetical protein; protein id: At1g47580.1
  misc_feature (17)..(276): Homolog of NCBI NO: 18417727 NR Description: putative protein; protein id: At4g31050.1, by cDNA: gi_15887051 [Arabidopsis thaliana]
  misc_feature (156)..(413): Homolog of NCBI NO: 15220259 NR Description: hypothetical protein; protein id: At1g47580.1
  misc_feature (17)..(185): Homolog of NCBI NO: 25407705 NR Description: hypothetical protein AT4g31050 [imported] - thaliana >gi|2980761|emb|CAA18188.1| putative protein thaliana] >gi|7270007|emb|CAB79823.1| putative protein
  misc_feature (44)..(232): Homolog of NCBI NO: 23125051 NR Description: hypothetical protein [Nostoc punctiforme]
  misc_feature (44)..(232): Homolog of NCBI NO: 17230677 NR Description: lipoate-protein ligase B [Nostoc sp. PCC 7120]
  misc_feature (56)..(279): Homolog of NCBI NO: 22298375 NR Description: lipoate-protein ligase [Thermosynechococcus
  misc_feature (56)..(236): Homolog of NCBI NO: 23041482 NR Description: hypothetical protein [Trichodesmium erythraeum
MVFSVATSSVTNPKLHHHHHLSDFNRNRVSTSLKIMNSKNHTNPRKCECFDLYDQLIPYKKAWSWQKSILNEKKALIDKNQECSDSLIILQHPSVYTMGTGSSENYLNFDIKNAPFDVYRTERGGEVTYHGPGQLVMYPIINLRNHKMDLHWYLRKLEEVVIRVLSSAFAINASRLDGFTGVWVGNKKMAAIGIRVSKWMTYHGLALNVTTDLTPFNSIVPCGIRNRGVGSVKGLIEDGEHYNKLEDLQLLDIAHESLLKEFSEVFQLQMEKQTLTSDLWDGGYAGNLLWTSDFIGSLLSCLFSCRYVCERFDFSISLSKESLSASWIDHKGMALEAAFSMSFCSFSVPKAIFCERETSSFQRITSRAKGIAGESQVQSSDGVETQVKETSPKVFDKLPERNLDTWSGGRETARGLSGSVVRNTVRKDTTLRHISPSSHSTKVRGDKPEISGGEKKAIVDRSKAYVKLKSLGKEVRDAGYVPETKYVLHDIDEEAKEKALMHHSERLAIAFGIINTPPGTTIRVMKNLRICGDCHNFIKILSSIEDREIIVRDNKRFHHFRDGNCSCGDYW

SEQ ID NO: 69508 - protein, 536 aa, Arabidopsis thaliana
  peptide (1)..(536): Ceres Seq. ID no. 1816552
  misc_feature (1)..(536): Homolog of NCBI NO: 25405224 NR Description: F16N3.14 [imported] - Arabidopsis thaliana
  misc_feature (276)..(536): Homolog of NCBI NO: 15220259 NR Description: hypothetical protein; protein id: At1g47580.1
  misc_feature (63)..(100): Homolog of NCBI NO: 15220259 NR Description: hypothetical protein; protein id: At1g47580.1
  misc_feature (1)..(241): Homolog of NCBI NO: 18417727 NR Description: putative protein; protein id: At4g31050.1, by cDNA: gi_15887051 [Arabidopsis thaliana]
  misc_feature (121)..(378): Homolog of NCBI NO: 15220259 NR Description: hypothetical protein; protein id: At1g47580.1
  misc_feature (1)..(150): Homolog of NCBI NO: 25407705 NR Description: hypothetical protein AT4g31050 [imported] - thaliana >gi|2980761|emb|CAA18188.1| putative protein thaliana] >gi|7270007|emb|CAB79823.1| putative protein
  misc_feature (9)..(197): Homolog of NCBI NO: 23125051 NR Description: hypothetical protein [Nostoc punctiforme]
  misc_feature (9)..(197): Homolog of NCBI NO: 17230677 NR Description: lipoate-protein ligase B [Nostoc sp. PCC 7120]
  misc_feature (21)..(244): Homolog of NCBI NO: 22298375 NR Description: lipoate-protein ligase [Thermosynechococcus
  misc_feature (21)..(201): Homolog of NCBI NO: 23041482 NR Description: hypothetical protein [Trichodesmium erythraeum
MNSKNHTNPRKCECFDLYDQLIPYKKAWSWQKSILNEKKALIDKNQECSDSLIILQHPSVYTMGTGSSENYLNFDIKNAPFDVYRTERGGEVTYHGPGQLVMYPIINLRNHKMDLHWYLRKLEEVVIRVLSSAFAINASRLDGFTGVWVGNKKMAAIGIRVSKWMTYHGLALNVTTDLTPFNSIVPCGIRNRGVGSVKGLIEDGEHYNKLEDLQLLDIAHESLLKEFSEVFQLQMEKQTLTSDLWDGGYAGNLLWTSDFIGSLLSCLFSCRYVCERFDFSISLSKESLSASWIDHKGMALEAAFSMSFCSFSVPKAIFCERETSSFQRITSRAKGIAGESQVQSSDGVETQVKETSPKVFDKLPERNLDTWSGGRETARGLSGSVVRNTVRKDTTLRHISPSSHSTKVRGDKPEISGGEKKAIVDRSKAYVKLKSLGKEVRDAGYVPETKYVLHDIDEEAKEKALMHHSERLAIAFGIINTPPGTTIRVMKNLRICGDCHNFIKILSSIEDREIIVRDNKRFHHFRDGNCSCGDYW

SEQ ID NO: 69509 - protein, 474 aa, Arabidopsis thaliana
  peptide (1)..(474): Ceres Seq. ID no. 1816553
  misc_feature (1)..(474): Homolog of NCBI NO: 25405224 NR Description: F16N3.14 [imported] - Arabidopsis thaliana
  misc_feature (214)..(474): Homolog of NCBI NO: 15220259 NR Description: hypothetical protein; protein id: At1g47580.1
  misc_feature (1)..(38): Homolog of NCBI NO: 15220259 NR Description: hypothetical protein; protein id: At1g47580.1
  misc_feature (1)..(179): Homolog of NCBI NO: 18417727 NR Description: putative protein; protein id: At4g31050.1, by cDNA: gi_15887051 [Arabidopsis thaliana]
  misc_feature (59)..(316): Homolog of NCBI NO: 15220259 NR Description: hypothetical protein; protein id: At1g47580.1
  misc_feature (1)..(88): Homolog of NCBI NO: 25407705 NR Description: hypothetical protein AT4g31050 [imported] - thaliana >gi|2980761|emb|CAA18188.1| putative protein thaliana] >gi|7270007|emb|CAB79823.1| putative protein
  misc_feature (1)..(135): Homolog of NCBI NO: 23125051 NR Description: hypothetical protein [Nostoc punctiforme]
  misc_feature (1)..(135): Homolog of NCBI NO: 17230677 NR Description: lipoate-protein ligase B [Nostoc sp. PCC 7120]
  misc_feature (1)..(182): Homolog of NCBI NO: 22298375 NR Description: lipoate-protein ligase [Thermosynechococcus
  misc_feature (1)..(139): Homolog of NCBI NO: 23041482 NR Description: hypothetical protein [Trichodesmium erythraeum
MGTGSSENYLNFDIKNAPFDVYRTERGGEVTYHGPGQLVMYPIINLRNHKMDLHWYLRKLEEVVIRVLSSAFAINASRLDGFTGVWVGNKKMAAIGIRVSKWMTYHGLALNVTTDLTPFNSIVPCGIRNRGVGSVKGLIEDGEHYNKLEDLQLLDIAHESLLKEFSEVFQLQMEKQTLTSDLWDGGYAGNLLWTSDFIGSLLSCLFSCRYVCERFDFSISLSKESLSASWIDHKGMALEAAFSMSFCSFSVPKAIFCERETSSFQRITSRAKGIAGESQVQSSDGVETQVKETSPKVFDKLPERNLDTWSGGRETARGLSGSVVRNTVRKDTTLRHISPSSHSTKVRGDKPEISGGEKKAIVDRSKAYVKLKSLGKEVRDAGYVPETKYVLHDIDEEAKEKALMHHSERLAIAFGIINTPPGTTIRVMKNLRICGDCHNFIKILSSIEDREIIVRDNKRFHHFRDGNCSCGDYW

SEQ ID NO: 69510 - DNA, 2031 bp, Arabidopsis thaliana
  misc_feature (1)..(2031): Ceres Seq. ID no. 1816918
  misc_feature: MA Experiment ID: 20000328 Result: Down-regulated in Transcription
  misc_feature: MA Experiment 20000328 PARAMETER Experiment Name: At_42deg_Heat_Sub_P Parameter: Age (day) Value: 14
  misc_feature: MA Experiment 20000328 PARAMETER Experiment Name: At_42deg_Heat_Sub_P Parameter: Organism Value: A. thaliana
  misc_feature: MA Experiment 20000328 PARAMETER Experiment Name: At_42deg_Heat_Sub_P Parameter: Plant Line Value: WS
  misc_feature: MA Experiment 20000328 PARAMETER Experiment Name: At_42deg_Heat_Sub_P Parameter: Temperature (deg C) Value: 42 vs. 22
  misc_feature: MA Experiment 20000328 PARAMETER Experiment Name: At_42deg_Heat_Sub_P Parameter: Timepoint (hr) Value: 6
  misc_feature: MA Experiment 20000328 PARAMETER Experiment Name: At_42deg_Heat_Sub_P Parameter: Tissue Value: Aerial
atgtataaaccaaactcttcacctactctttatattatacgtttaaaatctctgcaatatatcttgaatttttttttgttatatgtagcaatgtcaaggagctttacgatagaaaacaaatgccaatacaccatatggcctgcaacctacggctataggagatcactagaaacaaccggttttgttcttgagaaaggagagacgcgtaccatcaaagcgccgtcatcatggataggtcgtttctggggtaggacactctgctccaccaactcaacagggggtttctcatgtgccacgggagactgcacctccggaaaaatcaagtgcctcggtatccccatagatccaacaacagtggtcgagtttaacctcgcttcttacggtgtcgactattatgtcgtcaacgtcttcaatggttacaacctccctttgcttgtgacccccgagaacaaaaactgcagaagcattgaatgcgttattgacatgaacgagacatgtccctcggagctaatggtgaacagtagtggccttggatcgcaccatccaatagcctgcatgaccacttgtcagagataccagttgccagagctttgctgtatcggactctcttctggggtggtcgtaccaccgggaatatgcaagcggacgatctactcgcggacattcaataacgtgtgcccaagcgcttatagttacgcctacgacgttgataacagcagtttcacttgtccaaacttctccaactttgtcatcacgttttgtccgtctagctcaacggtcccagaggcaggaaacatcaatagctcaacggtcccagaggcaggaaacatcaaaactggaacagaagcaaaaggagtttcatcagtattggctacaatgatcattattgtgattgtgggaaaggttagagcaaataatatgagaaagagtgatttgaatgagaagaacatggaagcagtggtaatgttgaaacgatttagttatgtacaagtcaagaagatgacaaaatcatttgagaatgttcttgggaaagggggatttggaactgtctataaagggaagttacctgatggcagccgagatgttgcagtgaagatcttgaaggagtcaaacgaggatggagaagacttcatcaatgaaatagctagcatgagtaggacatctcatgctaatatcgtttctctacttggattctgttatgaagggaggaagaaagctataatttacgagttgatgccgaatggatccctcgacaagttcatctccaagaatatgtcggcgaagatggaatggaaaacgttatacaacattgcggtaggtgtgtctcatggcctagaatacttgcatagccattgtgtatcaaggattgtacatttcgatataaagccacagaacatactcatagatggagacttatgccctaagatttcggatttcggtcttgctaagctttgcaaaaataatgaaagcatcatttcaatgctacatgcaagaggcaccatagggtacattgctccagaagtgttctcccagaattttggaggagtttctcataagtctgatgtgtatagttatggaatggtggttcttgagatgattggagcaaggaacataggaagagctcaaaatgctggatccagtaatacttcaatgtactttccagattggatttataaagatcttgagaaaggagaaatcatgagttttttggcagatcaaataaccgaagaagaagatgagaagatagtaaagaaaatggtattggtgggtctgtggtgtattcagaccaatccatatgatcgtccaccaatgagcaaagttgttgaaatgttagagggaagtctagaggctctccagattccacctaagcctcttttatgtttacccgcaataacagctccaataacagttgatgaagacattcaagagacttcaagcttcttgaaaccaagtcaagatacttcatattattccgaacaaatagttcaagatattgtagaagagaatcaagatagctcaagatcttcctaa

SEQ ID NO: 69511 - protein, 676 aa, Arabidopsis thaliana
  peptide (1)..(676): Ceres Seq. ID no. 1816919
  misc_feature (39)..(255): Pfam Name: Thaumatin family Pfam Description: Thaumatin family
  misc_feature (17)..(676): Homolog of NCBI NO: 15240873 NR Description: receptor serine/threonine kinase PR5K; protein At5g38280.1, supported by cDNA: gi_1235679 [Arabidopsis thaliana]
  misc_feature (17)..(663): Homolog of NCBI NO: 1235680 NR Description: receptor serine/threonine kinase PR5K
  misc_feature (36)..(645): Homolog of NCBI NO: 30684346 NR Description: receptor serine/threonine kinase-related protein
  misc_feature (199)..(645): Homolog of NCBI NO: 7488208 NR Description: probable serine/threonine-specific protein kinase
  misc_feature (26)..(257): Homolog of NCBI NO: 7488208 NR Description: probable serine/threonine-specific protein kinase
  misc_feature (288)..(659): Homolog of NCBI NO: 15219803 NR Description: kinase, putative; protein id: At1g66980.1
  misc_feature (288)..(659): Homolog of NCBI NO: 25404657 NR Description: hypothetical protein F1O19.6 [imported] - thaliana >gi|9755449|gb|AAF98210.1|AC007152_6 Unknown protein
  misc_feature (307)..(659): Homolog of NCBI NO: 15219781 NR Description: receptor serine/threonine kinase PR5K, putative; id: At1g66910.1 [Arabidopsis thaliana] >gi|25404649|pir||H96692
  misc_feature (293)..(659): Homolog of NCBI NO: 10177799 NR Description: receptor serine/threonine kinase-like protein
  misc_feature (286)..(662): Homolog of NCBI NO: 15240865 NR Description: receptor serine/threonine protein kinase - like; id: At5g38260.1 [Arabidopsis thaliana]
MYKPNSSPTLYIIRLKSLQYILNFFLLYVAMSRSFTIENKCQYTIWPATYGYRRSLETTGFVLEKGETRTIKAPSSWIGRFWGRTLCSTNSTGGFSCATGDCTSGKIKCLGIPIDPTTVVEFNLASYGVDYYVVNVFNGYNLPLLVTPENKNCRSIECVIDMNETCPSELMVNSSGLGSHHPIACMTTCQRYQLPELCCIGLSSGVVVPPGICKRTIYSRTFNNVCPSAYSYAYDVDNSSFTCPNFSNFVITFCPSSSTVPEAGNINSSTVPEAGNIKTGTEAKGVSSVLATMIIIVIVGKVRANNMRKSDLNEKNMEAVVMLKRFSYVQVKKMTKSFENVLGKGGFGTVYKGKLPDGSRDVAVKILKESNEDGEDFINEIASMSRTSHANIVSLLGFCYEGRKKAIIYELMPNGSLDKFISKNMSAKMEWKTLYNIAVGVSHGLEYLHSHCVSRIVHFDIKPQNILIDGDLCPKISDFGLAKLCKNNESIISMLHARGTIGYIAPEVFSQNFGGVSHKSDVYSYGMVVLEMIGARNIGRAQNAGSSNTSMYFPDWIYKDLEKGEIMSFLADQITEEEDEKIVKKMVLVGLWCIQTNPYDRPPMSKVVEMLEGSLEALQIPPKPLLCLPAITAPITVDEDIQETSSFLKPSQDTSYYSEQIVQDIVEENQDSSRSS

SEQ ID NO: 69512 - protein, 646 aa, Arabidopsis thaliana
  peptide (1)..(646): Ceres Seq. ID no. 1816920
  misc_feature (9)..(225): Pfam Name: Thaumatin family Pfam Description: Thaumatin family
  misc_feature (1)..(646): Homolog of NCBI NO: 15240873 NR Description: receptor serine/threonine kinase PR5K; protein At5g38280.1, supported by cDNA: gi_1235679 [Arabidopsis thaliana]
  misc_feature (1)..(633): Homolog of NCBI NO: 1235680 NR Description: receptor serine/threonine kinase PR5K
  misc_feature (6)..(615): Homolog of NCBI NO: 30684346 NR Description: receptor serine/threonine kinase-related protein
  misc_feature (169)..(615): Homolog of NCBI NO: 7488208 NR Description: probable serine/threonine-specific protein kinase
  misc_feature (1)..(227): Homolog of NCBI NO: 7488208 NR Description: probable serine/threonine-specific protein kinase
  misc_feature (258)..(629): Homolog of NCBI NO: 15219803 NR Description: kinase, putative; protein id: At1g66980.1
  misc_feature (258)..(629): Homolog of NCBI NO: 25404657 NR Description: hypothetical protein F1O19.6 [imported] - thaliana >gi|9755449|gb|AAF98210.1|AC007152_6 Unknown protein
  misc_feature (277)..(629): Homolog of NCBI NO: 15219781 NR Description: receptor serine/threonine kinase PR5K, putative; id: At1g66910.1 [Arabidopsis thaliana] >gi|25404649|pir||H96692
  misc_feature (263)..(629): Homolog of NCBI NO: 10177799 NR Description: receptor serine/threonine kinase-like protein
  misc_feature (256)..(632): Homolog of NCBI NO: 15240865 NR Description: receptor serine/threonine protein kinase - like; id: At5g38260.1 [Arabidopsis thaliana]
MSRSFTIENKCQYTIWPATYGYRRSLETTGFVLEKGETRTIKAPSSWIGRFWGRTLCSTNSTGGFSCATGDCTSGKIKCLGIPIDPTTVVEFNLASYGVDYYVVNVFNGYNLPLLVTPENKNCRSIECVIDMNETCPSELMVNSSGLGSHHPIACMTTCQRYQLPELCCIGLSSGVVVPPGICKRTIYSRTFNNVCPSAYSYAYDVDNSSFTCPNFSNFVITFCPSSSTVPEAGNINSSTVPEAGNIKTGTEAKGVSSVLATMIIIVIVGKVRANNMRKSDLNEKNMEAVVMLKRFSYVQVKKMTKSFENVLGKGGFGTVYKGKLPDGSRDVAVKILKESNEDGEDFINEIASMSRTSHANIVSLLGFCYEGRKKAIIYELMPNGSLDKFISKNMSAKMEWKTLYNIAVGVSHGLEYLHSHCVSRIVHFDIKPQNILIDGDLCPKISDFGLAKLCKNNESIISMLHARGTIGYIAPEVFSQNFGGVSHKSDVYSYGMVVLEMIGARNIGRAQNAGSSNTSMYFPDWIYKDLEKGEIMSFLADQITEEEDEKIVKKMVLVGLWCIQTNPYDRPPMSKVVEMLEGSLEALQIPPKPLLCLPAITAPITVDEDIQETSSFLKPSQDTSYYSEQIVQDIVEENQDSSRSS

SEQ ID NO: 69513 - protein, 515 aa, Arabidopsis thaliana
  peptide (1)..(515): Ceres Seq. ID no. 1816921
  misc_feature (1)..(94): Pfam Name: Thaumatin family Pfam Description: Thaumatin family
  misc_feature (1)..(515): Homolog of NCBI NO: 15240873 NR Description: receptor serine/threonine kinase PR5K; protein At5g38280.1, supported by cDNA: gi_1235679 [Arabidopsis thaliana]
  misc_feature (1)..(502): Homolog of NCBI NO: 1235680 NR Description: receptor serine/threonine kinase PR5K
  misc_feature (1)..(484): Homolog of NCBI NO: 30684346 NR Description: receptor serine/threonine kinase-related protein
  misc_feature (38)..(484): Homolog of NCBI NO: 7488208 NR Description: probable serine/threonine-specific protein kinase
  misc_feature (1)..(96): Homolog of NCBI NO: 7488208 NR Description: probable serine/threonine-specific protein kinase
  misc_feature (127)..(498): Homolog of NCBI NO: 15219803 NR Description: kinase, putative; protein id: At1g66980.1
  misc_feature (127)..(498): Homolog of NCBI NO: 25404657 NR Description: hypothetical protein F1O19.6 [imported] - thaliana >gi|9755449|gb|AAF98210.1|AC007152_6 Unknown protein
  misc_feature (146)..(498): Homolog of NCBI NO: 15219781 NR Description: receptor serine/threonine kinase PR5K, putative; id: At1g66910.1 [Arabidopsis thaliana] >gi|25404649|pir||H96692
  misc_feature (132)..(498): Homolog of NCBI NO: 10177799 NR Description: receptor serine/threonine kinase-like protein
  misc_feature (125)..(501): Homolog of NCBI NO: 15240865 NR Description: receptor serine/threonine protein kinase - like; id: At5g38260.1 [Arabidopsis thaliana]
MNETCPSELMVNSSGLGSHHPIACMTTCQRYQLPELCCIGLSSGVVVPPGICKRTIYSRTFNNVCPSAYSYAYDVDNSSFTCPNFSNFVITFCPSSSTVPEAGNINSSTVPEAGNIKTGTEAKGVSSVLATMIIIVIVGKVRANNMRKSDLNEKNMEAVVMLKRFSYVQVKKMTKSFENVLGKGGFGTVYKGKLPDGSRDVAVKILKESNEDGEDFINEIASMSRTSHANIVSLLGFCYEGRKKAIIYELMPNGSLDKFISKNMSAKMEWKTLYNIAVGVSHGLEYLHSHCVSRIVHFDIKPQNILIDGDLCPKISDFGLAKLCKNNESIISMLHARGTIGYIAPEVFSQNFGGVSHKSDVYSYGMVVLEMIGARNIGRAQNAGSSNTSMYFPDWIYKDLEKGEIMSFLADQITEEEDEKIVKKMVLVGLWCIQTNPYDRPPMSKVVEMLEGSLEALQIPPKPLLCLPAITAPITVDEDIQETSSFLKPSQDTSYYSEQIVQDIVEENQDSSRSS

SEQ ID NO: 69514 - DNA, 525 bp, Arabidopsis thaliana
  misc_feature (1)..(525): Ceres Seq. ID no. 1817049
  misc_feature: MA Experiment ID: 20000307 Result: Up-regulated in Transcription
  misc_feature: MA Experiment 20000307 PARAMETER Experiment Name: At_Germinating_Seeds_Sub_P Parameter: Age (hr) Value: 24 vs. 0
  misc_feature: MA Experiment 20000307 PARAMETER Experiment Name: At_Germinating_Seeds_Sub_P Parameter: Organism Value: A. thaliana
  misc_feature: MA Experiment 20000307 PARAMETER Experiment Name: At_Germinating_Seeds_Sub_P Parameter: Plant Line Value: WS
  misc_feature: MA Experiment 20000307 PARAMETER Experiment Name: At_Germinating_Seeds_Sub_P Parameter: Tissue Value: Germinating Seeds
  misc_feature: MA Experiment ID: 20000314 Result: Up-regulated in Transcription
  misc_feature: MA Experiment 20000314 PARAMETER Experiment Name: At_14day_Shoots-Roots_Sub_P Parameter: Age (day) Value: 14
  misc_feature: MA Experiment 20000314 PARAMETER Experiment Name: At_14day_Shoots-Roots_Sub_P Parameter: Organism Value: A. thaliana
  misc_feature: MA Experiment 20000314 PARAMETER Experiment Name: At_14day_Shoots-Roots_Sub_P Parameter: Plant Line Value: WS
  misc_feature: MA Experiment 20000314 PARAMETER Experiment Name: At_14day_Shoots-Roots_Sub_P Parameter: Tissue Value: Roots vs. Whole Plant
  misc_feature: MA Experiment ID: 20000347 Result: Up-regulated in Transcription
  misc_feature: MA Experiment 20000347 PARAMETER Experiment Name: At_2mM_SA_Sub_P Parameter: Age (day) Value: 14
  misc_feature: MA Experiment 20000347 PARAMETER Experiment Name: At_2mM_SA_Sub_P Parameter: Organism Value: A. thaliana
  misc_feature: MA Experiment 20000347 PARAMETER Experiment Name: At_2mM_SA_Sub_P Parameter: Plant Line Value: WS
  misc_feature: MA Experiment 20000347 PARAMETER Experiment Name: At_2mM_SA_Sub_P Parameter: Timepoint (hr) Value: 6
  misc_feature: MA Experiment 20000347 PARAMETER Experiment Name: At_2mM_SA_Sub_P Parameter: Tissue Value: Aerial
  misc_feature: MA Experiment 20000347 PARAMETER Experiment Name: At_2mM_SA_Sub_P Parameter: Treatment Value: 2mM SA vs. No Treatment
  misc_feature: MA Experiment ID: 20000355 Result: Down-regulated in Transcription
  misc_feature: MA Experiment 20000355 PARAMETER Experiment Name: At_Siliques_Sub_P Parameter: Age (day) Value: 21
  misc_feature: MA Experiment 20000355 PARAMETER Experiment Name: At_Siliques_Sub_P Parameter: Organism Value: A. thaliana
  misc_feature: MA Experiment 20000355 PARAMETER Experiment Name: At_Siliques_Sub_P Parameter: Plant Line Value: WS
  misc_feature: MA Experiment 20000355 PARAMETER Experiment Name: At_Siliques_Sub_P Parameter: Tissue Value: Less Than 5mm Siliques vs. Whole Plant
  misc_feature: MA Experiment ID: 20000440 Result: Down-regulated in Transcription
  misc_feature: MA Experiment 20000440 PARAMETER Experiment Name: At_Closed-Flower__Sub_P Parameter: Tissue Value: Closed Flower vs. Whole Plant
atggatgtttcaggaagcttgaattgcgttgttgtggcggtagatggaagcgaggtgagtatggaagctctgaggtgggctctagacaacctcaagctctcttcgtcttcttccgattcatcattcgtcgtgctccacgtccagccgtcgccttctgtagccgccggcgtgagtcccggcaccatacctttcggtggtcccagtggtcttgaggttcctgctttcactgctgcaatcgagcaacaccagaagcggatcaccgacaccatcctcgaacacgctagtcaaatttgtgctgaaaaatctgtgagtagagtgaatgtgaaaacacaagtggttattggggatcccaagtataaaatctgcgaagctgtagagaatttgcatgctgatcttcttgtcatgggctcccgggcttatggccgcattaagagaatgtttctgggaagtgtaagcaactactgcaccaaccacgcccattgtcctgttgtgataatcaaaccaaaagaggattcttctgcataa

SEQ ID NO: 69515 - protein, 174 aa, Arabidopsis thaliana
  peptide (1)..(174): Ceres Seq. ID no. 1817050
  misc_feature (6)..(167): Pfam Name: Universal stress protein family Pfam Description: Universal stress protein family
  misc_feature (1)..(174): Homolog of NCBI NO: 25402571 NR Description: hypothetical protein [imported] - Arabidopsis >gi|2160182|gb|AAB60745.1| ESTs
  misc_feature (1)..(174): Homolog of NCBI NO: 30681321 NR Description: ER6 protein -related [Arabidopsis thaliana]
  misc_feature (7)..(167): Homolog of NCBI NO: 5669654 NR Description: ER6 protein [Lycopersicon esculentum]
  misc_feature (7)..(170): Homolog of NCBI NO: 34914610 NR Description: P0520B06.18 [Oryza sativa (japonica
  misc_feature (10)..(171): Homolog of NCBI NO: 18399413 NR Description: ethylene-responsive protein, putative; protein
  misc_feature (4)..(168): Homolog of NCBI NO: 40539010 NR Description: putative stress-related protein [Oryza sativa
  misc_feature (10)..(171): Homolog of NCBI NO: 30681955 NR Description: ethylene-responsive protein -related [Arabidopsis >gi|6671949|gb|AAF23209.1|AC016795_22 unknown protein thaliana] >gi|10998131|dbj|BAB03102.1| gene_id:MEC18.3~unknown
  misc_feature (10)..(171): Homolog of NCBI NO: 21594903 NR Description: ethylene-responsive protein, putative
  misc_feature (10)..(173): Homolog of NCBI NO: 22831145 NR Description: contains ESTs
  misc_feature (10)..(173): Homolog of NCBI NO: 20067187 NR Description: putative universal stress protein USP1 [Oryza
MDVSGSLNCVVVAVDGSEVSMEALRWALDNLKLSSSSSDSSFVVLHVQPSPSVAAGVSPGTIPFGGPSGLEVPAFTAAIEQHQKRITDTILEHASQICAEKSVSRVNVKTQVVIGDPKYKICEAVENLHADLLVMGSRAYGRIKRMFLGSVSNYCTNHAHCPVVIIKPKEDSSA

SEQ ID NO: 69516 - protein, 154 aa, Arabidopsis thaliana
  peptide (1)..(154): Ceres Seq. ID no. 1817051
  misc_feature (1)..(147): Pfam Name: Universal stress protein family Pfam Description: Universal stress protein family
  misc_feature (1)..(154): Homolog of NCBI NO: 25402571 NR Description: hypothetical protein [imported] - Arabidopsis >gi|2160182|gb|AAB60745.1| ESTs
  misc_feature (1)..(154): Homolog of NCBI NO: 30681321 NR Description: ER6 protein -related [Arabidopsis thaliana]
  misc_feature (1)..(147): Homolog of NCBI NO: 5669654 NR Description: ER6 protein [Lycopersicon esculentum]
  misc_feature (1)..(150): Homolog of NCBI NO: 34914610 NR Description: P0520B06.18 [Oryza sativa (japonica
  misc_feature (1)..(151): Homolog of NCBI NO: 18399413 NR Description: ethylene-responsive protein, putative; protein
  misc_feature (1)..(148): Homolog of NCBI NO: 40539010 NR Description: putative stress-related protein [Oryza sativa
  misc_feature (1)..(151): Homolog of NCBI NO: 30681955 NR Description: ethylene-responsive protein -related [Arabidopsis >gi|6671949|gb|AAF23209.1|AC016795_22 unknown protein thaliana] >gi|10998131|dbj|BAB03102.1| gene_id:MEC18.3~unknown
  misc_feature (1)..(151): Homolog of NCBI NO: 21594903 NR Description: ethylene-responsive protein, putative
  misc_feature (1)..(153): Homolog of NCBI NO: 22831145 NR Description: contains ESTs
  misc_feature (1)..(153): Homolog of NCBI NO: 20067187 NR Description: putative universal stress protein USP1 [Oryza
MEALRWALDNLKLSSSSSDSSFVVLHVQPSPSVAAGVSPGTIPFGGPSGLEVPAFTAAIEQHQKRITDTILEHASQICAEKSVSRVNVKTQVVIGDPKYKICEAVENLHADLLVMGSRAYGRIKRMFLGSVSNYCTNHAHCPVVIIKPKEDSSA

SEQ ID NO: 69517 - DNA, 1569 bp, Arabidopsis thaliana
  misc_feature (1)..(1569): Ceres Seq. ID no. 1817349
atgtcttatcctctctccacaagctcccgttggatcgtcgacgagaacggtctacgggtaaagctcgtgtgtgcgaactggccatcacacctccagcccgttgtagcggaagggctgagcaaacaaccagtggacgcagtggccaagaagatagtggaaatgggtttcaattgtgttaggttaacttggccgttggatttgatgactaatgagacattggctaataatgtcacagtaagacaatcttttcaaagccttggtcttaatgatgacattgttggcttccaaactaacaacccctccattattgatctccccctcattgaagcttacaagacggtagttactacattaggaaacaacgatgtgatggtgatattagacaaccacctaactaaaccagggtggtgctgcgccaacgacgatggtaacggtttcttcggtgaccagttcttcgatcctaccgtatgggttgccgctttaaagaaaatggctgcgaccttcaacggtgtctctaatgttgttggcatgagtctaaggaatgaacttagagggcctaaacaaaacgttaacgattggttcaagtatatgcaacaaggagcggaagcagttcattcagcaaacaacaaggtacttgtaatcctctccggtctcagcttcgacgctgatctctcctttgttaggtctcgacccgtaaagctatccttcaccggaaaactcgtcttcgagctccattggtattctttcagtgacggaaactcgtgggctgccaataaccctaacgatatatgtggtcgagttctaaaccggattggaaacggtggcggttatctccttaaccaaggctttccgttgttcctaagcgaattcggtatagatgaaagaggagtaaacaccaatgataaccggtattttgggtgtttaaccggttgggccgcggaaaatgacgttgattggtcgctatgggctcttactggaagctattacttaagacaaggcaaagtcggtatgaatgagtattacggtgtgttggattcggattggataagtgttcggaattcgagtttcttgcaaaagatctcttttcttcaatctccgcttcaaggaccgggccctcgaactgatgcttacaatctggtttttcatcccttaaccggactctgcatagtacgatctcttgatgacccaaaaatgcttactcttggtccatgcaatagctccgaaccatggagctatactaagaaagccttaagaatcaaagaccagcaattgtgtttacagagcaacggaccaaaaaacccggttacgatgactcggactagttgttcgacatccggatcaaaatggcagaccatctcggcctcaaggatgcacttggcttcgacaacaagtaacaagacttctctttgccttgacgtggacacagcgaacaatgtcgtggctaatgcttgcaagtgtctgagcaaagacaaatcgtgtgagccaatgagccaatggtttaagattatcaaagccacaaggccattgaagagctcgagattgtataaagagatctcgtctatgctgtaa

SEQ ID NO: 69518 - protein, 522 aa, Arabidopsis thaliana
  peptide (1)..(522): Ceres Seq. ID no. 1817350
  misc_feature (10)..(329): Pfam Name: Cellulase (glycosyl hydrolase family 5) Pfam Description: Cellulase (glycosyl hydrolase family 5)
  misc_feature (1)..(522): Homolog of NCBI NO: 15222185 NR Description: glycosyl hydrolase family 5/cellulase; protein At1g13130.1 [Arabidopsis thaliana] >gi|25402755|pir||E86265
  misc_feature (1)..(507): Homolog of NCBI NO: 15231514 NR Description: glycosyl hydrolase family 5/cellulase; protein At3g26140.1 [Arabidopsis thaliana] >gi|11994432|dbj|BAB02434.1|
  misc_feature (3)..(502): Homolog of NCBI NO: 15237972 NR Description: glycosyl hydrolase family 5/cellulase; protein At5g17500.1 [Arabidopsis thaliana] >gi|11357940|pir||T51476
  misc_feature (2)..(519): Homolog of NCBI NO: 11994430 NR Description: gene_id:MTC11.2~unknown protein [Arabidopsis
  misc_feature (2)..(519): Homolog of NCBI NO: 15231513 NR Description: glycosyl hydrolase family 5/cellulase; protein
  misc_feature (4)..(514): Homolog of NCBI NO: 38345245 NR Description: OSJNBb0011N17.6 [Oryza sativa (japonica
  misc_feature (68)..(512): Homolog of NCBI NO: 38345246 NR Description: OSJNBb0011N17.7 [Oryza sativa (japonica
  misc_feature (5)..(96): Homolog of NCBI NO: 38345246 NR Description: OSJNBb0011N17.7 [Oryza sativa (japonica
  misc_feature (4)..(507): Homolog of NCBI NO: 38345244 NR Description: OSJNBb0011N17.5 [Oryza sativa (japonica
  misc_feature (2)..(439): Homolog of NCBI NO: 15237397 NR Description: glycosyl hydrolase family 5/cellulase; protein At5g16700.1 [Arabidopsis thaliana] >gi|11357811|pir||T51502
MSYPLSTSSRWIVDENGLRVKLVCANWPSHLQPVVAEGLSKQPVDAVAKKIVEMGFNCVRLTWPLDLMTNETLANNVTVRQSFQSLGLNDDIVGFQTNNPSIIDLPLIEAYKTVVTTLGNNDVMVILDNHLTKPGWCCANDDGNGFFGDQFFDPTVWVAALKKMAATFNGVSNVVGMSLRNELRGPKQNVNDWFKYMQQGAEAVHSANNKVLVILSGLSFDADLSFVRSRPVKLSFTGKLVFELHWYSFSDGNSWAANNPNDICGRVLNRIGNGGGYLLNQGFPLFLSEFGIDERGVNTNDNRYFGCLTGWAAENDVDWSLWALTGSYYLRQGKVGMNEYYGVLDSDWISVRNSSFLQKISFLQSPLQGPGPRTDAYNLVFHPLTGLCIVRSLDDPKMLTLGPCNSSEPWSYTKKALRIKDQQLCLQSNGPKNPVTMTRTSCSTSGSKWQTISASRMHLASTTSNKTSLCLDVDTANNVVANACKCLSKDKSCEPMSQWFKIIKATRPLKSSRLYKEISSML

SEQ ID NO: 69519 - protein, 469 aa, Arabidopsis thaliana
  peptide (1)..(469): Ceres Seq. ID no. 1817351
  misc_feature (1)..(276): Pfam Name: Cellulase (glycosyl hydrolase family 5) Pfam Description: Cellulase (glycosyl hydrolase family 5)
  misc_feature (1)..(469): Homolog of NCBI NO: 15222185 NR Description: glycosyl hydrolase family 5/cellulase; protein At1g13130.1 [Arabidopsis thaliana] >gi|25402755|pir||E86265
  misc_feature (1)..(454): Homolog of NCBI NO: 15231514 NR Description: glycosyl hydrolase family 5/cellulase; protein At3g26140.1 [Arabidopsis thaliana] >gi|11994432|dbj|BAB02434.1|
  misc_feature (1)..(449): Homolog of NCBI NO: 15237972 NR Description: glycosyl hydrolase family 5/cellulase; protein At5g17500.1 [Arabidopsis thaliana] >gi|11357940|pir||T51476
  misc_feature (1)..(466): Homolog of NCBI NO: 11994430 NR Description: gene_id:MTC11.2~unknown protein [Arabidopsis
  misc_feature (1)..(466): Homolog of NCBI NO: 15231513 NR Description: glycosyl hydrolase family 5/cellulase; protein
  misc_feature (1)..(461): Homolog of NCBI NO: 38345245 NR Description: OSJNBb0011N17.6 [Oryza sativa (japonica
  misc_feature (15)..(459): Homolog of NCBI NO: 38345246 NR Description: OSJNBb0011N17.7 [Oryza sativa (japonica
  misc_feature (1)..(43): Homolog of NCBI NO: 38345246 NR Description: OSJNBb0011N17.7 [Oryza sativa (japonica
  misc_feature (1)..(454): Homolog of NCBI NO: 38345244 NR Description: OSJNBb0011N17.5 [Oryza sativa (japonica
  misc_feature (1)..(386): Homolog of NCBI NO: 15237397 NR Description: glycosyl hydrolase family 5/cellulase; protein At5g16700.1 [Arabidopsis thaliana] >gi|11357811|pir||T51502
MGFNCVRLTWPLDLMTNETLANNVTVRQSFQSLGLNDDIVGFQTNNPSIIDLPLIEAYKTVVTTLGNNDVMVILDNHLTKPGWCCANDDGNGFFGDQFFDPTVWVAALKKMAATFNGVSNVVGMSLRNELRGPKQNVNDWFKYMQQGAEAVHSANNKVLVILSGLSFDADLSFVRSRPVKLSFTGKLVFELHWYSFSDGNSWAANNPNDICGRVLNRIGNGGGYLLNQGFPLFLSEFGIDERGVNTNDNRYFGCLTGWAAENDVDWSLWALTGSYYLRQGKVGMNEYYGVLDSDWISVRNSSFLQKISFLQSPLQGPGPRTDAYNLVFHPLTGLCIVRSLDDPKMLTLGPCNSSEPWSYTKKALRIKDQQLCLQSNGPKNPVTMTRTSCSTSGSKWQTISASRMHLASTTSNKTSLCLDVDTANNVVANACKCLSKDKSCEPMSQWFKIIKATRPLKSSRLYKEISSML

SEQ ID NO: 69520 - protein, 455 aa, Arabidopsis thaliana
  peptide (1)..(455): Ceres Seq. ID no. 1817352
  misc_feature (1)..(262): Pfam Name: Cellulase (glycosyl hydrolase family 5) Pfam Description: Cellulase (glycosyl hydrolase family 5)
  misc_feature (1)..(455): Homolog of NCBI NO: 15222185 NR Description: glycosyl hydrolase family 5/cellulase; protein At1g13130.1 [Arabidopsis thaliana] >gi|25402755|pir||E86265
  misc_feature (1)..(440): Homolog of NCBI NO: 15231514 NR Description: glycosyl hydrolase family 5/cellulase; protein At3g26140.1 [Arabidopsis thaliana] >gi|11994432|dbj|BAB02434.1|
  misc_feature (1)..(435): Homolog of NCBI NO: 15237972 NR Description: glycosyl hydrolase family 5/cellulase; protein At5g17500.1 [Arabidopsis thaliana] >gi|11357940|pir||T51476
  misc_feature (1)..(452): Homolog of NCBI NO: 11994430 NR Description: gene_id:MTC11.2~unknown protein [Arabidopsis
  misc_feature (1)..(452): Homolog of NCBI NO: 15231513 NR Description: glycosyl hydrolase family 5/cellulase; protein
  misc_feature (1)..(447): Homolog of NCBI NO: 38345245 NR Description: OSJNBb0011N17.6 [Oryza sativa (japonica
  misc_feature (1)..(445): Homolog of NCBI NO: 38345246 NR Description: OSJNBb0011N17.7 [Oryza sativa (japonica
  misc_feature (1)..(29): Homolog of NCBI NO: 38345246 NR Description: OSJNBb0011N17.7 [Oryza sativa (japonica
  misc_feature (1)..(440): Homolog of NCBI NO: 38345244 NR Description: OSJNBb0011N17.5 [Oryza sativa (japonica
  misc_feature (1)..(372): Homolog of NCBI NO: 15237397 NR Description: glycosyl hydrolase family 5/cellulase; protein At5g16700.1 [Arabidopsis thaliana] >gi|11357811|pir||T51502
MTNETLANNVTVRQSFQSLGLNDDIVGFQTNNPSIIDLPLIEAYKTVVTTLGNNDVMVILDNHLTKPGWCCANDDGNGFFGDQFFDPTVWVAALKKMAATFNGVSNVVGMSLRNELRGPKQNVNDWFKYMQQGAEAVHSANNKVLVILSGLSFDADLSFVRSRPVKLSFTGKLVFELHWYSFSDGNSWAANNPNDICGRVLNRIGNGGGYLLNQGFPLFLSEFGIDERGVNTNDNRYFGCLTGWAAENDVDWSLWALTGSYYLRQGKVGMNEYYGVLDSDWISVRNSSFLQKISFLQSPLQGPGPRTDAYNLVFHPLTGLCIVRSLDDPKMLTLGPCNSSEPWSYTKKALRIKDQQLCLQSNGPKNPVTMTRTSCSTSGSKWQTISASRMHLASTTSNKTSLCLDVDTANNVVANACKCLSKDKSCEPMSQWFKIIKATRPLKSSRLYKEISSML

SEQ ID NO: 69521 - DNA, 1005 bp, Arabidopsis thaliana
  misc_feature (1)..(1005): Ceres Seq. ID no. 1817433
atgggttgcgtctcatctaacctcctaaaccacgacgaagacttctctcaaatcggcggtggaagctccgccttcggtcaccacatcgtcaaactaacctccaccacttatggtcttctcacactcgatcctcctcctcctccttctcctcctatgacgccgccggagaaattcacagtcgatacaaaatctaagtcaatatggtctgagccaagggtgataaagtcggaaccggagattattaactcttgggagttaatgtctggtctcgacggagagagtttccgattcacgccacttcctaagactccggtgaagtataaagtgtttggtggagagaacaaagagaattcagatcctagtcggagaaaccctagaaaaaacttgaacgacgaggttttgaaaccgctagatctgaacagagaggattcggattctaattcgagaagccctagaaaatcgtttaaaccgttagatttgaaattggatgagaaatttgagaggatttgtccaccaggaggagagaatcgtgtggtgatgtacacgacgtcgttgcgaggtgttcgtcaaacgtttgaggcgtgtaacgctgtgagagcggcggtggagagttttggtgttgtggtttgcgagagagatgtgtcgatggatagaaggtttagagaagagcttgtgagtctaatggcgaagagagttggggatgagggagtggctgcattgccgcctcgggtttttgtgaagggaaggtacattggtggaggagaggaagtgttgagactagttgaggaaggttctttcggagagctgatcagcgggattccgagaaagaaagcgggaggatgcgagagcggcgcgtgtgatggttgcggcggtttgtttttcttgccgtgttttcggtgtaatggaagctgtaagatggtgaaaggatggggtagtgcttcggtggttgtgagatgtaatgagtgtaatgagaatggtcttgttccatgtcctatttgcagttga

SEQ ID NO: 69522 - protein, 334 aa, Arabidopsis thaliana
  peptide (1)..(334): Ceres Seq. ID no. 1817434
  misc_feature (177)..(270): Pfam Name: Glutaredoxin Pfam Description: Glutaredoxin
  misc_feature (1)..(334): Homolog of NCBI NO: 15235179 NR Description: putative protein; protein id: At4g10630.1
  misc_feature (139)..(334): Homolog of NCBI NO: 15223291 NR Description: unknown protein; protein id: At1g32760.1 thaliana] >gi|6714276|gb|AAF25972.1|AC017118_9 F6N18.14
  misc_feature (2)..(229): Homolog of NCBI NO: 15223291 NR Description: unknown protein; protein id: At1g32760.1 thaliana] >gi|6714276|gb|AAF25972.1|AC017118_9 F6N18.14
  misc_feature (164)..(334): Homolog of NCBI NO: 15237554 NR Description: putative protein; protein id: At5g03870.1
  misc_feature (113)..(333): Homolog of NCBI NO: 15217659 NR Description: peptide transporter, putative; protein id: supported by cDNA: gi_15810442, supported by cDNA: gi_17381051
  misc_feature (88)..(334): Homolog of NCBI NO: 38346321 NR Description: OJ000126_13.3 [Oryza sativa (japonica
  misc_feature (113)..(333): Homolog of NCBI NO: 17381052 NR Description: putative peptide transporter protein [Arabidopsis
  misc_feature (165)..(333): Homolog of NCBI NO: 34899868 NR Description: OJ1714_H10.16 [Oryza sativa (japonica
  misc_feature (77)..(306): Homolog of NCBI NO: 15228503 NR Description: hypothetical protein; protein id: At3g28850.1 thaliana] >gi|11994793|dbj|BAB03183.1|
  misc_feature (319)..(333): Homolog of NCBI NO: 15228503 NR Description: hypothetical protein; protein id: At3g28850.1 thaliana] >gi|11994793|dbj|BAB03183.1|
MGCVSSNLLNHDEDFSQIGGGSSAFGHHIVKLTSTTYGLLTLDPPPPPSPPMTPPEKFTVDTKSKSIWSEPRVIKSEPEIINSWELMSGLDGESFRFTPLPKTPVKYKVFGGENKENSDPSRRNPRKNLNDEVLKPLDLNREDSDSNSRSPRKSFKPLDLKLDEKFERICPPGGENRVVMYTTSLRGVRQTFEACNAVRAAVESFGVVVCERDVSMDRRFREELVSLMAKRVGDEGVAALPPRVFVKGRYIGGGEEVLRLVEEGSFGELISGIPRKKAGGCESGACDGCGGLFFLPCFRCNGSCKMVKGWGSASVVVRCNECNENGLVPCPICS

SEQ ID NO: 69523 - protein, 283 aa, Arabidopsis thaliana
  peptide (1)..(283): Ceres Seq. ID no. 1817435
  misc_feature (126)..(219): Pfam Name: Glutaredoxin Pfam Description: Glutaredoxin
  misc_feature (1)..(283): Homolog of NCBI NO: 15235179 NR Description: putative protein; protein id: At4g10630.1
  misc_feature (88)..(283): Homolog of NCBI NO: 15223291 NR Description: unknown protein; protein id: At1g32760.1 thaliana] >gi|6714276|gb|AAF25972.1|AC017118_9 F6N18.14
  misc_feature (1)..(178): Homolog of NCBI NO: 15223291 NR Description: unknown protein; protein id: At1g32760.1 thaliana] >gi|6714276|gb|AAF25972.1|AC017118_9 F6N18.14
  misc_feature (113)..(283): Homolog of NCBI NO: 15237554 NR Description: putative protein; protein id: At5g03870.1
  misc_feature (62)..(282): Homolog of NCBI NO: 15217659 NR Description: peptide transporter, putative; protein id: supported by cDNA: gi_15810442, supported by cDNA: gi_17381051
  misc_feature (37)..(283): Homolog of NCBI NO: 38346321 NR Description: OJ000126_13.3 [Oryza sativa (japonica
  misc_feature (62)..(282): Homolog of NCBI NO: 17381052 NR Description: putative peptide transporter protein [Arabidopsis
  misc_feature (114)..(282): Homolog of NCBI NO: 34899868 NR Description: OJ1714_H10.16 [Oryza sativa (japonica
  misc_feature (26)..(255): Homolog of NCBI NO: 15228503 NR Description: hypothetical protein; protein id: At3g28850.1 thaliana] >gi|11994793|dbj|BAB03183.1|
  misc_feature (268)..(282): Homolog of NCBI NO: 15228503 NR Description: hypothetical protein; protein id: At3g28850.1 thaliana] >gi|11994793|dbj|BAB03183.1|
MTPPEKFTVDTKSKSIWSEPRVIKSEPEIINSWELMSGLDGESFRFTPLPKTPVKYKVFGGENKENSDPSRRNPRKNLNDEVLKPLDLNREDSDSNSRSPRKSFKPLDLKLDEKFERICPPGGENRVVMYTTSLRGVRQTFEACNAVRAAVESFGVVVCERDVSMDRRFREELVSLMAKRVGDEGVAALPPRVFVKGRYIGGGEEVLRLVEEGSFGELISGIPRKKAGGCESGACDGCGGLFFLPCFRCNGSCKMVKGWGSASVVVRCNECNENGLVPCPICS

SEQ ID NO: 69524 - protein, 248 aa, Arabidopsis thaliana
  peptide (1)..(248): Ceres Seq. ID no. 1817436
  misc_feature (91)..(184): Pfam Name: Glutaredoxin Pfam Description: Glutaredoxin
  misc_feature (53)..(248): Homolog of NCBI NO: 15223291 NR Description: unknown protein; protein id: At1g32760.1 thaliana] >gi|6714276|gb|AAF25972.1|AC017118_9 F6N18.14
  misc_feature (1)..(143): Homolog of NCBI NO: 15223291 NR Description: unknown protein; protein id: At1g32760.1 thaliana] >gi|6714276|gb|AAF25972.1|AC017118_9 F6N18.14
  misc_feature (78)..(248): Homolog of NCBI NO: 15237554 NR Description: putative protein; protein id: At5g03870.1
  misc_feature (27)..(247): Homolog of NCBI NO: 15217659 NR Description: peptide transporter, putative; protein id: supported by cDNA: gi_15810442, supported by cDNA: gi_17381051
  misc_feature (2)..(248): Homolog of NCBI NO: 38346321 NR Description: OJ000126_13.3 [Oryza sativa (japonica
  misc_feature (1)..(248): Homolog of NCBI NO: 15235179 NR Description: putative protein; protein id: At4g10630.1
  misc_feature (27)..(247): Homolog of NCBI NO: 17381052 NR Description: putative peptide transporter protein [Arabidopsis
  misc_feature (79)..(247): Homolog of NCBI NO: 34899868 NR Description: OJ1714_H10.16 [Oryza sativa (japonica
  misc_feature (1)..(220): Homolog of NCBI NO: 15228503 NR Description: hypothetical protein; protein id: At3g28850.1 thaliana] >gi|11994793|dbj|BAB03183.1|
  misc_feature (233)..(247): Homolog of NCBI NO: 15228503 NR Description: hypothetical protein; protein id: At3g28850.1 thaliana] >gi|11994793|dbj|BAB03183.1|
MSGLDGESFRFTPLPKTPVKYKVFGGENKENSDPSRRNPRKNLNDEVLKPLDLNREDSDSNSRSPRKSFKPLDLKLDEKFERICPPGGENRVVMYTTSLRGVRQTFEACNAVRAAVESFGVVVCERDVSMDRRFREELVSLMAKRVGDEGVAALPPRVFVKGRYIGGGEEVLRLVEEGSFGELISGIPRKKAGGCESGACDGCGGLFFLPCFRCNGSCKMVKGWGSASVVVRCNECNENGLVPCPICS

SEQ ID NO: 69525 - DNA, 858 bp, Arabidopsis thaliana
  misc_feature (1)..(858): Ceres Seq. ID no. 1817754
  misc_feature: MA Experiment ID: 20000265 Result: Up-regulated in Transcription
  misc_feature: MA Experiment 20000265 PARAMETER Experiment Name: At_Open_Flower_P Parameter: Age (day) Value: 21
  misc_feature: MA Experiment 20000265 PARAMETER Experiment Name: At_Open_Flower_P Parameter: Plant Line Value: WS
  misc_feature: MA Experiment 20000265 PARAMETER Experiment Name: At_Open_Flower_P Parameter: Tissue Value: Closed Flower vs. Whole Plant
  misc_feature: MA Experiment ID: 20000286 Result: Up-regulated in Transcription
  misc_feature: MA Experiment 20000286 PARAMETER Experiment Name: At_Open_Flower_P Parameter: Age (day) Value: 21
  misc_feature: MA Experiment 20000286 PARAMETER Experiment Name: At_Open_Flower_P Parameter: Plant Line Value: WS
  misc_feature: MA Experiment 20000286 PARAMETER Experiment Name: At_Open_Flower_P Parameter: Tissue Value: Half Open vs. Whole Plant
  misc_feature: MA Experiment ID: 20001910 Result: Down-regulated in Transcription
  misc_feature: MA Experiment 20001910 PARAMETER Experiment Name: At_Drought_Reproduction_P Parameter: Age (day) Value: 37
  misc_feature: MA Experiment 20001910 PARAMETER Experiment Name: At_Drought_Reproduction_P Parameter: Organism Value: A. thaliana
  misc_feature: MA Experiment 20001910 PARAMETER Experiment Name: At_Drought_Reproduction_P Parameter: Plant Line Value: WS
  misc_feature: MA Experiment 20001910 PARAMETER Experiment Name: At_Drought_Reproduction_P Parameter: Timepoint (day) Value: 7
  misc_feature: MA Experiment 20001910 PARAMETER Experiment Name: At_Drought_Reproduction_P Parameter: Tissue Value: Flowers
  misc_feature: MA Experiment 20001910 PARAMETER Experiment Name: At_Drought_Reproduction_P Parameter: Treatment Value: Drought vs. No Drought
atgggtgtatttcctgcgtttggagcatggatcaatcagaattctcaacagcctcttgaggaagatcccaagagctctgagcatgttgaatctaagtcggcatcagagatggataatggtcctgctaagatgaaaaaatactatgacgaagatgagtgggagaggcaagataaactttggacagctgcagagaagaagcatccatggaaagatgcccctcctaaggttaaggtgacaacaaaaaagggtatatgccatatgcacatagaattgacattggggttgcctcctgatggagtcttcgaacttttcactaatccacataacggaccaaacaccgaaccacttctgaaaagcaaatcaagaaaggttttgaaggacgatggaccgaggcagatcgcgaaggtgaagaaagctgtggcctggaacttcagtgggaggtctattgctatccccataagtctaattgtcgatgaaaacagaagagatcttacagcgaaatataaaaaagagaaaatgatgttcatgaaagtattcgagggtagctataaagtggagcctgtatacgtagattcagtacgcttatgcaagaacaagaagccgaagagtgtagatgaatacaagaaatgtagtggcggacaaggaaagattgcatcgaaagtgacaatggaccaatattttcagccatatcctccttttaatctaccgccattttcttggttcattcgtgatatcaccatcaagaataccaagagtgtgctagagagacttcaaagttggagtttcagtattcgaaatccgggtgtaatcatgtcaaccaacaaacatggaaaaacagaagtttctcctaaacagtaa

SEQ ID NO: 69526 - protein, 285 aa, Arabidopsis thaliana
  peptide (1)..(285): Ceres Seq. ID no. 1817755
  misc_feature (147)..(248): Pfam Name: Domain of unknown function DUF220 Pfam Description: Domain of unknown function DUF220
  misc_feature (1)..(285): Homolog of NCBI NO: 15220799 NR Description: putative OBP32pep protein; protein id: At1g23580.1
  misc_feature (1)..(285): Homolog of NCBI NO: 8778583 NR Description: F28C11.19 [Arabidopsis thaliana]
  misc_feature (3)..(285): Homolog of NCBI NO: 25373403 NR Description: hypothetical protein F5O8.13 - Arabidopsis >gi|4056440|gb|AAC98013.1| Similar to OBP32pep protein gb|U37698
  misc_feature (108)..(285): Homolog of NCBI NO: 18395259 NR Description: hypothetical protein; protein id: At1g23570.1
  misc_feature (3)..(84): Homolog of NCBI NO: 18395259 NR Description: hypothetical protein; protein id: At1g23570.1
  misc_feature (1)..(265): Homolog of NCBI NO: 15220802 NR Description: putative OBP32pep protein; protein id: At1g23600.1
  misc_feature (108)..(269): Homolog of NCBI NO: 8778583 NR Description: F28C11.19 [Arabidopsis thaliana]
  misc_feature (1)..(111): Homolog of NCBI NO: 8778583 NR Description: F28C11.19 [Arabidopsis thaliana]
  misc_feature (1)..(266): Homolog of NCBI NO: 15220845 NR Description: putative OBP32pep protein; protein id: [Arabidopsis thaliana] >gi|25373394|pir||H86370 32.2K
  misc_feature (108)..(265): Homolog of NCBI NO: 15220818 NR Description: putative OBP32pep protein; protein id: [Arabidopsis thaliana] >gi|25373393|pir||D86370 26.4K
MGVFPAFGAWINQNSQQPLEEDPKSSEHVESKSASEMDNGPAKMKKYYDEDEWERQDKLWTAAEKKHPWKDAPPKVKVTTKKGICHMHIELTLGLPPDGVFELFTNPHNGPNTEPLLKSKSRKVLKDDGPRQIAKVKKAVAWNFSGRSIAIPISLIVDENRRDLTAKYKKEKMMFMKVFEGSYKVEPVYVDSVRLCKNKKPKSVDEYKKCSGGQGKIASKVTMDQYFQPYPPFNLPPFSWFIRDITIKNTKSVLERLQSWSFSIRNPGVIMSTNKHGKTEVSPKQ

SEQ ID NO: 69527 - protein, 249 aa, Arabidopsis thaliana
  peptide (1)..(249): Ceres Seq. ID no. 1817756
  misc_feature (111)..(212): Pfam Name: Domain of unknown function DUF220 Pfam Description: Domain of unknown function DUF220
  misc_feature (1)..(249): Homolog of NCBI NO: 15220799 NR Description: putative OBP32pep protein; protein id: At1g23580.1
  misc_feature (1)..(249): Homolog of NCBI NO: 8778583 NR Description: F28C11.19 [Arabidopsis thaliana]
  misc_feature (1)..(249): Homolog of NCBI NO: 25373403 NR Description: hypothetical protein F5O8.13 - Arabidopsis >gi|4056440|gb|AAC98013.1| Similar to OBP32pep protein gb|U37698
  misc_feature (72)..(249): Homolog of NCBI NO: 18395259 NR Description: hypothetical protein; protein id: At1g23570.1
  misc_feature (1)..(48): Homolog of NCBI NO: 18395259 NR Description: hypothetical protein; protein id: At1g23570.1
  misc_feature (1)..(229): Homolog of NCBI NO: 15220802 NR Description: putative OBP32pep protein; protein id: At1g23600.1
  misc_feature (72)..(233): Homolog of NCBI NO: 8778583 NR Description: F28C11.19 [Arabidopsis thaliana]
  misc_feature (1)..(75): Homolog of NCBI NO: 8778583 NR Description: F28C11.19 [Arabidopsis thaliana]
  misc_feature (1)..(230): Homolog of NCBI NO: 15220845 NR Description: putative OBP32pep protein; protein id: [Arabidopsis thaliana] >gi|25373394|pir||H86370 32.2K
  misc_feature (72)..(229): Homolog of NCBI NO: 15220818 NR Description: putative OBP32pep protein; protein id: [Arabidopsis thaliana] >gi|25373393|pir||D86370 26.4K
MDNGPAKMKKYYDEDEWERQDKLWTAAEKKHPWKDAPPKVKVTTKKGICHMHIELTLGLPPDGVFELFTNPHNGPNTEPLLKSKSRKVLKDDGPRQIAKVKKAVAWNFSGRSIAIPISLIVDENRRDLTAKYKKEKMMFMKVFEGSYKVEPVYVDSVRLCKNKKPKSVDEYKKCSGGQGKIASKVTMDQYFQPYPPFNLPPFSWFIRDITIKNTKSVLERLQSWSFSIRNPGVIMSTNKHGKTEVSPKQ

SEQ ID NO: 69528 - protein, 242 aa, Arabidopsis thaliana
  peptide (1)..(242): Ceres Seq. ID no. 1817757
  misc_feature (104)..(205): Pfam Name: Domain of unknown function DUF220 Pfam Description: Domain of unknown function DUF220
  misc_feature (1)..(242): Homolog of NCBI NO: 15220799 NR Description: putative OBP32pep protein; protein id: At1g23580.1
  misc_feature (1)..(242): Homolog of NCBI NO: 8778583 NR Description: F28C11.19 [Arabidopsis thaliana]
  misc_feature (1)..(242): Homolog of NCBI NO: 25373403 NR Description: hypothetical protein F5O8.13 - Arabidopsis >gi|4056440|gb|AAC98013.1| Similar to OBP32pep protein gb|U37698
  misc_feature (65)..(242): Homolog of NCBI NO: 18395259 NR Description: hypothetical protein; protein id: At1g23570.1
  misc_feature (1)..(41): Homolog of NCBI NO: 18395259 NR Description: hypothetical protein; protein id: At1g23570.1
  misc_feature (1)..(222): Homolog of NCBI NO: 15220802 NR Description: putative OBP32pep protein; protein id: At1g23600.1
  misc_feature (65)..(226): Homolog of NCBI NO: 8778583 NR Description: F28C11.19 [Arabidopsis thaliana]
  misc_feature (1)..(68): Homolog of NCBI NO: 8778583 NR Description: F28C11.19 [Arabidopsis thaliana]
  misc_feature (1)..(223): Homolog of NCBI NO: 15220845 NR Description: putative OBP32pep protein; protein id: [Arabidopsis thaliana] >gi|25373394|pir||H86370 32.2K
  misc_feature (65)..(222): Homolog of NCBI NO: 15220818 NR Description: putative OBP32pep protein; protein id: [Arabidopsis thaliana] >gi|25373393|pir||D86370 26.4K
MKKYYDEDEWERQDKLWTAAEKKHPWKDAPPKVKVTTKKGICHMHIELTLGLPPDGVFELFTNPHNGPNTEPLLKSKSRKVLKDDGPRQIAKVKKAVAWNFSGRSIAIPISLIVDENRRDLTAKYKKEKMMFMKVFEGSYKVEPVYVDSVRLCKNKKPKSVDEYKKCSGGQGKIASKVTMDQYFQPYPPFNLPPFSWFIRDITIKNTKSVLERLQSWSFSIRNPGVIMSTNKHGKTEVSPKQ

SEQ ID NO: 69529 - DNA, 1038 bp, Arabidopsis thaliana
  misc_feature (1)..(1038): Ceres Seq. ID no. 1817809
  misc_feature: MA Experiment ID: 20000180 Result: Down-regulated in Transcription
  misc_feature: MA Experiment 20000180 PARAMETER Experiment Name: At_Germinating_Seeds_P Parameter: Age (hr) Value: 24 vs. 0
  misc_feature: MA Experiment 20000180 PARAMETER Experiment Name: At_Germinating_Seeds_P Parameter: Tissue Value: Germinating Seeds
  misc_feature: MA Experiment ID: 20000437 Result: Up-regulated in Transcription
  misc_feature: MA Experiment 20000437 PARAMETER Experiment Name: At_Drought_P Parameter: Age (day) Value: 8
  misc_feature: MA Experiment 20000437 PARAMETER Experiment Name: At_Drought_P Parameter: Organism Value: A. thaliana
  misc_feature: MA Experiment 20000437 PARAMETER Experiment Name: At_Drought_P Parameter: Plant Line Value: WS
  misc_feature: MA Experiment 20000437 PARAMETER Experiment Name: At_Drought_P Parameter: Timepoint (hr) Value: 24
  misc_feature: MA Experiment 20000437 PARAMETER Experiment Name: At_Drought_P Parameter: Tissue Value: Whole Plant
  misc_feature: MA Experiment 20000437 PARAMETER Experiment Name: At_Drought_P Parameter: Treatment Value: Drought vs. No Drought
  misc_feature: MA Experiment ID: 20000439 Result: Up-regulated in Transcription
  misc_feature: MA Experiment 20000439 PARAMETER Experiment Name: At_Roots__P Parameter: Age (day) Value: 14 vs. 21
  misc_feature: MA Experiment 20000439 PARAMETER Experiment Name: At_Roots__P Parameter: Organism Value: A. thaliana
  misc_feature: MA Experiment 20000439 PARAMETER Experiment Name: At_Roots__P Parameter: Tissue Value: Roots vs. Whole Plant
  misc_feature: MA Experiment ID: 20001555 Result: Up-regulated in Transcription
  misc_feature: MA Experiment 20001555 PARAMETER Experiment Name: At_Drought_Soil_Dry_P Parameter: Age (day) Value: 24
  misc_feature: MA Experiment 20001555 PARAMETER Experiment Name: At_Drought_Soil_Dry_P Parameter: Organism Value: A. thaliana
  misc_feature: MA Experiment 20001555 PARAMETER Experiment Name: At_Drought_Soil_Dry_P Parameter: Plant Line Value: WS
  misc_feature: MA Experiment 20001555 PARAMETER Experiment Name: At_Drought_Soil_Dry_P Parameter: Post Timepoint (hr) Value: None
  misc_feature: MA Experiment 20001555 PARAMETER Experiment Name: At_Drought_Soil_Dry_P Parameter: Post-Treatment Value: None
  misc_feature: MA Experiment 20001555 PARAMETER Experiment Name: At_Drought_Soil_Dry_P Parameter: Timepoint (day) Value: 10
  misc_feature: MA Experiment 20001555 PARAMETER Experiment Name: At_Drought_Soil_Dry_P Parameter: Treatment Value: Drought vs. No Drought
  misc_feature: MA Experiment ID: 20001905 Result: Up-regulated in Transcription
  misc_feature: MA Experiment 20001905 PARAMETER Experiment Name: At_Drought_Reproduction_P Parameter: Age (day) Value: 40
  misc_feature: MA Experiment 20001905 PARAMETER Experiment Name: At_Drought_Reproduction_P Parameter: Organism Value: A. thaliana
  misc_feature: MA Experiment 20001905 PARAMETER Experiment Name: At_Drought_Reproduction_P Parameter: Plant Line Value: WS
  misc_feature: MA Experiment 20001905 PARAMETER Experiment Name: At_Drought_Reproduction_P Parameter: Timepoint (day) Value: 10
  misc_feature: MA Experiment 20001905 PARAMETER Experiment Name: At_Drought_Reproduction_P Parameter: Tissue Value: Rosettes
  misc_feature: MA Experiment 20001905 PARAMETER Experiment Name: At_Drought_Reproduction_P Parameter: Treatment Value: Drought vs. No Drought
  misc_feature: Pfam Name: DUF296 Pfam Description: Domain of unknown function (DUF296)
atggaaacaagcgacagaattagccctggtggtggtataggagcagaagttccatcagcgtatcatatggctccgagaccttcagatagccctgctaaccagtttatggggttgtctctccctcccatggaagccccaatgccttcttcaggggaagcctcagggaagaagaggagaggcagacctcgtaaatatgaagctaatggtgctcctttgccttcttcatcagttcctcttgtgaagaaacgagtaagaggcaagctcaatggttttgatatgaagaagatgcataagaccattgggttccattcttctggtgaaaggtttggtgttggtggtggtgttggtggtggtgttggatcaaatttcacgccgcatgtaatcacagtgaacactggtgaggtatgtatattagaagaaaaaggccctaaactttcacttgggaggagatttgatattactatgagaatcatctccttttcacaacaaggaccacgagctatttgtatcttatcagcaaatggagtgatatcaaacgttactcttcgccaacccgattcttgcggtggtactctcacctacgagggtcggtttgagatactgtctctgtctggttcattcatggaaacagagaatcaaggttcaaaaggtcggtctggtggcatgagtgtatctttggccggtcctgatggtcgtgttgtcggtggcggtgtcgctggcctgctcattgccgccactcctattcaggtgactcatgaatctaacaacaacgtttacgttgttgttggcagttttataacgagtgatcaacaagatcatcagaaaccgaggaagcaaagagtcgagcatgcccctgcagcagtcatgtcagtgcctcctcctccttctcctcctcctccggcggcttctgttttctcaccgacaaacccggacagagagcagccgccatcttcattcggtatctccagctggaccaacggacaggacatgccgagaaactcagccactgacatcaacatatctttaccagtcgactga

SEQ ID NO: 69530 - protein, 345 aa, Arabidopsis thaliana
  peptide (1)..(345): Ceres Seq. ID no. 1817810
  misc_feature: Pfam Name: DUF296 Pfam Description: Domain of unknown function (DUF296)
  misc_feature (1)..(345): Homolog of NCBI NO: 15236743 NR Description: putative transcription factor; protein id:
  misc_feature (18)..(280): Homolog of NCBI NO: 7485570 NR Description: hypothetical protein F16J13.150 - Arabidopsis
  misc_feature (8)..(277): Homolog of NCBI NO: 15235790 NR Description: putative DNA binding protein; protein id: supported by cDNA: 12041. [Arabidopsis thaliana]
  misc_feature (17)..(280): Homolog of NCBI NO: 15235023 NR Description: putative protein; protein id: At4g25320.1, by cDNA: gi_20466212 [Arabidopsis thaliana]
  misc_feature (152)..(280): Homolog of NCBI NO: 22328578 NR Description: putative DNA-binding protein; protein id: supported by cDNA: gi_17979484 [Arabidopsis thaliana] AT4g12080/F16J13_150 [Arabidopsis thaliana]
  misc_feature (152)..(320): Homolog of NCBI NO: 8809639 NR Description: contains similarity to DNA-binding [Arabidopsis thaliana] >gi|26451694|dbj|BAC42942.1| unknown [Arabidopsis thaliana] >gi|28973553|gb|AAO64101.1| unknown
  misc_feature (152)..(320): Homolog of NCBI NO: 15241763 NR Description: putative protein; protein id: At5g62260.1
  misc_feature (21)..(341): Homolog of NCBI NO: 6633838 NR Description: F2K11.15 [Arabidopsis thaliana]
  misc_feature (21)..(341): Homolog of NCBI NO: 30696854 NR Description: DNA-binding protein -related [Arabidopsis
  misc_feature (152)..(328): Homolog of NCBI NO: 37537056 NR Description: putative AT-Hook DNA-binding protein [Oryza
METSDRISPGGGIGAEVPSAYHMAPRPSDSPANQFMGLSLPPMEAPMPSSGEASGKKRRGRPRKYEANGAPLPSSSVPLVKKRVRGKLNGFDMKKMHKTIGFHSSGERFGVGGGVGGGVGSNFTPHVITVNTGEVCILEEKGPKLSLGRRFDITMRIISFSQQGPRAICILSANGVISNVTLRQPDSCGGTLTYEGRFEILSLSGSFMETENQGSKGRSGGMSVSLAGPDGRVVGGGVAGLLIAATPIQVTHESNNNVYVVVGSFITSDQQDHQKPRKQRVEHAPAAVMSVPPPPSPPPPAASVFSPTNPDREQPPSSFGISSWTNGQDMPRNSATDINISLPVD

SEQ ID NO: 69531 - protein, 323 aa, Arabidopsis thaliana
  peptide (1)..(323): Ceres Seq. ID no. 1817811
  misc_feature: Pfam Name: DUF296 Pfam Description: Domain of unknown function (DUF296)
  misc_feature (1)..(323): Homolog of NCBI NO: 15236743 NR Description: putative transcription factor; protein id:
  misc_feature (1)..(258): Homolog of NCBI NO: 7485570 NR Description: hypothetical protein F16J13.150 - Arabidopsis
  misc_feature (1)..(255): Homolog of NCBI NO: 15235790 NR Description: putative DNA binding protein; protein id: supported by cDNA: 12041. [Arabidopsis thaliana]
  misc_feature (1)..(258): Homolog of NCBI NO: 15235023 NR Description: putative protein; protein id: At4g25320.1, by cDNA: gi_20466212 [Arabidopsis thaliana]
  misc_feature (130)..(258): Homolog of NCBI NO: 22328578 NR Description: putative DNA-binding protein; protein id: supported by cDNA: gi_17979484 [Arabidopsis thaliana] AT4g12080/F16J13_150 [Arabidopsis thaliana]
  misc_feature (130)..(298): Homolog of NCBI NO: 8809639 NR Description: contains similarity to DNA-binding [Arabidopsis thaliana] >gi|26451694|dbj|BAC42942.1| unknown [Arabidopsis thaliana] >gi|28973553|gb|AAO64101.1| unknown
  misc_feature (130)..(298): Homolog of NCBI NO: 15241763 NR Description: putative protein; protein id: At5g62260.1
  misc_feature (1)..(319): Homolog of NCBI NO: 6633838 NR Description: F2K11.15 [Arabidopsis thaliana]
  misc_feature (1)..(319): Homolog of NCBI NO: 30696854 NR Description: DNA-binding protein -related [Arabidopsis
  misc_feature (130)..(306): Homolog of NCBI NO: 37537056 NR Description: putative AT-Hook DNA-binding protein [Oryza
MAPRPSDSPANQFMGLSLPPMEAPMPSSGEASGKKRRGRPRKYEANGAPLPSSSVPLVKKRVRGKLNGFDMKKMHKTIGFHSSGERFGVGGGVGGGVGSNFTPHVITVNTGEVCILEEKGPKLSLGRRFDITMRIISFSQQGPRAICILSANGVISNVTLRQPDSCGGTLTYEGRFEILSLSGSFMETENQGSKGRSGGMSVSLAGPDGRVVGGGVAGLLIAATPIQVTHESNNNVYVVVGSFITSDQQDHQKPRKQRVEHAPAAVMSVPPPPSPPPPAASVFSPTNPDREQPPSSFGISSWTNGQDMPRNSATDINISLPVD

SEQ ID NO: 69532 - protein, 310 aa, Arabidopsis thaliana
  peptide (1)..(310): Ceres Seq. ID no. 1817812
  misc_feature: Pfam Name: DUF296 Pfam Description: Domain of unknown function (DUF296)
  misc_feature (1)..(310): Homolog of NCBI NO: 15236743 NR Description: putative transcription factor; protein id:
  misc_feature (1)..(245): Homolog of NCBI NO: 7485570 NR Description: hypothetical protein F16J13.150 - Arabidopsis
  misc_feature (1)..(242): Homolog of NCBI NO: 15235790 NR Description: putative DNA binding protein; protein id: supported by cDNA: 12041. [Arabidopsis thaliana]
  misc_feature (1)..(245): Homolog of NCBI NO: 15235023 NR Description: putative protein; protein id: At4g25320.1, by cDNA: gi_20466212 [Arabidopsis thaliana]
  misc_feature (117)..(245): Homolog of NCBI NO: 22328578 NR Description: putative DNA-binding protein; protein id: supported by cDNA: gi_17979484 [Arabidopsis thaliana] AT4g12080/F16J13_150 [Arabidopsis thaliana]
  misc_feature (117)..(285): Homolog of NCBI NO: 8809639 NR Description: contains similarity to DNA-binding [Arabidopsis thaliana] >gi|26451694|dbj|BAC42942.1| unknown [Arabidopsis thaliana] >gi|28973553|gb|AAO64101.1| unknown
  misc_feature (117)..(285): Homolog of NCBI NO: 15241763 NR Description: putative protein; protein id: At5g62260.1
  misc_feature (1)..(306): Homolog of NCBI NO: 6633838 NR Description: F2K11.15 [Arabidopsis thaliana]
  misc_feature (1)..(306): Homolog of NCBI NO: 30696854 NR Description: DNA-binding protein -related [Arabidopsis
  misc_feature (117)..(293): Homolog of NCBI NO: 37537056 NR Description: putative AT-Hook DNA-binding protein [Oryza
MGLSLPPMEAPMPSSGEASGKKRRGRPRKYEANGAPLPSSSVPLVKKRVRGKLNGFDMKKMHKTIGFHSSGERFGVGGGVGGGVGSNFTPHVITVNTGEVCILEEKGPKLSLGRRFDITMRIISFSQQGPRAICILSANGVISNVTLRQPDSCGGTLTYEGRFEILSLSGSFMETENQGSKGRSGGMSVSLAGPDGRVVGGGVAGLLIAATPIQVTHESNNNVYVVVGSFITSDQQDHQKPRKQRVEHAPAAVMSVPPPPSPPPPAASVFSPTNPDREQPPSSFGISSWTNGQDMPRNSATDINISLPVD

SEQ ID NO: 69533 - DNA, 846 bp, Arabidopsis thaliana
  misc_feature (1)..(846): Ceres Seq. ID no. 1817900
  misc_feature: MA Experiment ID: 20000182 Result: Up-regulated in Transcription
  misc_feature: MA Experiment 20000182 PARAMETER Experiment Name: At_2mM_SA_P Parameter: Age (day) Value: 14
  misc_feature: MA Experiment 20000182 PARAMETER Experiment Name: At_2mM_SA_P Parameter: Organism Value: A. thaliana
  misc_feature: MA Experiment 20000182 PARAMETER Experiment Name: At_2mM_SA_P Parameter: Plant Line Value: WS
  misc_feature: MA Experiment 20000182 PARAMETER Experiment Name: At_2mM_SA_P Parameter: Timepoint (hr) Value: 6
  misc_feature: MA Experiment 20000182 PARAMETER Experiment Name: At_2mM_SA_P Parameter: Tissue Value: Aerial
  misc_feature: MA Experiment 20000182 PARAMETER Experiment Name: At_2mM_SA_P Parameter: Treatment Value: 2mM SA vs. No Treatment
  misc_feature: MA Experiment ID: 20000184 Result: Down-regulated in Transcription
  misc_feature: MA Experiment 20000184 PARAMETER Experiment Name: At_Shoots__P Parameter: Age (day) Value: 7
  misc_feature: MA Experiment 20000184 PARAMETER Experiment Name: At_Shoots__P Parameter: Tissue Value: Shoots vs. Whole Plant
  misc_feature: MA Experiment ID: 20000234 Result: Down-regulated in Transcription
  misc_feature: MA Experiment 20000234 PARAMETER Experiment Name: At_Siliques_P Parameter: Age (day) Value: 21
  misc_feature: MA Experiment 20000234 PARAMETER Experiment Name: At_Siliques_P Parameter: Organism Value: A. thaliana
  misc_feature: MA Experiment 20000234 PARAMETER Experiment Name: At_Siliques_P Parameter: Plant Line Value: WS
  misc_feature: MA Experiment 20000234 PARAMETER Experiment Name: At_Siliques_P Parameter: Tissue Value: Less Than 5mm Siliques vs. Whole Plant
  misc_feature: MA Experiment ID: 20000235 Result: Down-regulated in Transcription
  misc_feature: MA Experiment 20000235 PARAMETER Experiment Name: At_Siliques_P Parameter: Age (day) Value: 21
  misc_feature: MA Experiment 20000235 PARAMETER Experiment Name: At_Siliques_P Parameter: Organism Value: A. thaliana
  misc_feature: MA Experiment 20000235 PARAMETER Experiment Name: At_Siliques_P Parameter: Plant Line Value: WS
  misc_feature: MA Experiment 20000235 PARAMETER Experiment Name: At_Siliques_P Parameter: Tissue Value: 5-10mm Siliques vs. Whole Plant
  misc_feature: MA Experiment ID: 20000265 Result: Down-regulated in Transcription
  misc_feature: MA Experiment 20000265 PARAMETER Experiment Name: At_Open_Flower_P Parameter: Age (day) Value: 21
  misc_feature: MA Experiment 20000265 PARAMETER Experiment Name: At_Open_Flower_P Parameter: Plant Line Value: WS
  misc_feature: MA Experiment 20000265 PARAMETER Experiment Name: At_Open_Flower_P Parameter: Tissue Value: Closed Flower vs. Whole Plant
  misc_feature: MA Experiment ID: 20000286 Result: Down-regulated in Transcription
  misc_feature: MA Experiment 20000286 PARAMETER Experiment Name: At_Open_Flower_P Parameter: Age (day) Value: 21
  misc_feature: MA Experiment 20000286 PARAMETER Experiment Name: At_Open_Flower_P Parameter: Plant Line Value: WS
  misc_feature: MA Experiment 20000286 PARAMETER Experiment Name: At_Open_Flower_P Parameter: Tissue Value: Half Open vs. Whole Plant
  misc_feature: MA Experiment ID: 20000437 Result: Up-regulated in Transcription
  misc_feature: MA Experiment 20000437 PARAMETER Experiment Name: At_Drought_P Parameter: Age (day) Value: 8
  misc_feature: MA Experiment 20000437 PARAMETER Experiment Name: At_Drought_P Parameter: Organism Value: A. thaliana
  misc_feature: MA Experiment 20000437 PARAMETER Experiment Name: At_Drought_P Parameter: Plant Line Value: WS
  misc_feature: MA Experiment 20000437 PARAMETER Experiment Name: At_Drought_P Parameter: Timepoint (hr) Value: 24
  misc_feature: MA Experiment 20000437 PARAMETER Experiment Name: At_Drought_P Parameter: Tissue Value: Whole Plant
  misc_feature: MA Experiment 20000437 PARAMETER Experiment Name: At_Drought_P Parameter: Treatment Value: Drought vs. No Drought
  misc_feature: MA Experiment ID: 20000438 Result: Down-regulated in Transcription
  misc_feature: MA Experiment 20000438 PARAMETER Experiment Name: At_Shoots__P Parameter: Age (day) Value: 14
  misc_feature: MA Experiment 20000438 PARAMETER Experiment Name: At_Shoots__P Parameter: Tissue Value: Shoots vs. Whole Plant
  misc_feature: MA Experiment ID: 20001905 Result: Up-regulated in Transcription
  misc_feature: MA Experiment 20001905 PARAMETER Experiment Name: At_Drought_Reproduction_P Parameter: Age (day) Value: 40
  misc_feature: MA Experiment 20001905 PARAMETER Experiment Name: At_Drought_Reproduction_P Parameter: Organism Value: A. thaliana
  misc_feature: MA Experiment 20001905 PARAMETER Experiment Name: At_Drought_Reproduction_P Parameter: Plant Line Value: WS
  misc_feature: MA Experiment 20001905 PARAMETER Experiment Name: At_Drought_Reproduction_P Parameter: Timepoint (day) Value: 10
  misc_feature: MA Experiment 20001905 PARAMETER Experiment Name: At_Drought_Reproduction_P Parameter: Tissue Value: Rosettes
  misc_feature: MA Experiment 20001905 PARAMETER Experiment Name: At_Drought_Reproduction_P Parameter: Treatment Value: Drought vs. No Drought
atggtgaatgagaagaagatgctcccaaaacgcatcatactaatgcgtcacggtgagtcagccggtaacatcgacgcaggggcttacgcgaccacacccgatcacaagatccctctaacggaagaaggaagagcgcaagcgcgtgaggccgggaagaaaatgagagccctcatatcaacccaaagcggcggtgcgtgtggagagaattggcgcgtgtacttctacgtgtcgccttacgagagaacgaggacgactttgagggaagtaggaaaaggattctcgaggaagcgcgtgataggagtgagggaagagtgtaggatcagagaacaagattttgggaattttcaagtggaagagaggatgagagttgtgaaggagacgagggaacgtttcggtagatttttctatcgttttcccgaaggtgaatccgccgccgacgtctacgatcgtgtttctagttttctggagtctatgtggagagacgtggacatgaacaggcatcaagtggatccatcaagtgaactaaacctagtgattgtgtcccacggactgacatctcgagtgtttctaacaaaatggttcaagtggacggtggcagagttcgagcggttgaataactttgggaactgcgagttcagagtgatggagttgggtgcgagcggagagtacactttcgcgatacaccacagtgaagaagagatgttggattggggcatgtctaaagatatgattgatgatcaaaaggatcgtgttgatgggtgtcgtgtaacaacatcaaacgattcttgttcattgcatctcaatgagtattttgatttgttagatgtcactgatgatgaagaatga

SEQ ID NO: 69534 - protein, 281 aa, Arabidopsis thaliana
  peptide (1)..(281): Ceres Seq. ID no. 1817901
  misc_feature (10)..(227): Pfam Name: Phosphoglycerate mutase family Pfam Description: Phosphoglycerate mutase family
  misc_feature (1)..(281): Homolog of NCBI NO: 15223983 NR Description: unknown protein; protein id: At1g08940.1
  misc_feature (1)..(280): Homolog of NCBI NO: 15229917 NR Description: unknown protein; protein id: At3g05170.1 thaliana] >gi|6729027|gb|AAF27023.1|AC009177_13 unknown protein
  misc_feature (9)..(248): Homolog of NCBI NO: 34897810 NR Description: P0514G12.25 [Oryza sativa (japonica
  misc_feature (1)..(122): Homolog of NCBI NO: 38454096 NR Description: At1g08940 [Arabidopsis thaliana]
  misc_feature (9)..(224): Homolog of NCBI NO: 21224153 NR Description: conserved hypothetical protein SC4H2.29 coelicolor A3(2)] >gi|7479557|pir||T35128 hypothetical protein
  misc_feature (9)..(224): Homolog of NCBI NO: 29469213 NR Description: unknown [Streptomyces murayamaensis]
  misc_feature (9)..(224): Homolog of NCBI NO: 29829000 NR Description: hypothetical protein [Streptomyces avermitilis
  misc_feature (9)..(223): Homolog of NCBI NO: 32415611 NR Description: hypothetical protein [Neurospora crassa] conserved hypothetical protein [Neurospora crassa]
  misc_feature (12)..(223): Homolog of NCBI NO: 40741871 NR Description: hypothetical protein AN4983.2 [Aspergillus
  misc_feature (79)..(220): Homolog of NCBI NO: 6320256 NR Description: Hypothetical ORF; Ydr051cp [Saccharomyces
MVNEKKMLPKRIILMRHGESAGNIDAGAYATTPDHKIPLTEEGRAQAREAGKKMRALISTQSGGACGENWRVYFYVSPYERTRTTLREVGKGFSRKRVIGVREECRIREQDFGNFQVEERMRVVKETRERFGRFFYRFPEGESAADVYDRVSSFLESMWRDVDMNRHQVDPSSELNLVIVSHGLTSRVFLTKWFKWTVAEFERLNNFGNCEFRVMELGASGEYTFAIHHSEEEMLDWGMSKDMIDDQKDRVDGCRVTTSNDSCSLHLNEYFDLLDVTDDEE

SEQ ID NO: 69535 - protein, 275 aa, Arabidopsis thaliana
  peptide (1)..(275): Ceres Seq. ID no. 1817902
  misc_feature (4)..(221): Pfam Name: Phosphoglycerate mutase family Pfam Description: Phosphoglycerate mutase family
  misc_feature (1)..(275): Homolog of NCBI NO: 15223983 NR Description: unknown protein; protein id: At1g08940.1
  misc_feature (1)..(274): Homolog of NCBI NO: 15229917 NR Description: unknown protein; protein id: At3g05170.1 thaliana] >gi|6729027|gb|AAF27023.1|AC009177_13 unknown protein
  misc_feature (3)..(242): Homolog of NCBI NO: 34897810 NR Description: P0514G12.25 [Oryza sativa (japonica
  misc_feature (1)..(116): Homolog of NCBI NO: 38454096 NR Description: At1g08940 [Arabidopsis thaliana]
  misc_feature (3)..(218): Homolog of NCBI NO: 21224153 NR Description: conserved hypothetical protein SC4H2.29 coelicolor A3(2)] >gi|7479557|pir||T35128 hypothetical protein
  misc_feature (3)..(218): Homolog of NCBI NO: 29469213 NR Description: unknown [Streptomyces murayamaensis]
  misc_feature (3)..(218): Homolog of NCBI NO: 29829000 NR Description: hypothetical protein [Streptomyces avermitilis
  misc_feature (3)..(217): Homolog of NCBI NO: 32415611 NR Description: hypothetical protein [Neurospora crassa] conserved hypothetical protein [Neurospora crassa]
  misc_feature (6)..(217): Homolog of NCBI NO: 40741871 NR Description: hypothetical protein AN4983.2 [Aspergillus
  misc_feature (73)..(214): Homolog of NCBI NO: 6320256 NR Description: Hypothetical ORF; Ydr051cp [Saccharomyces
MLPKRIILMRHGESAGNIDAGAYATTPDHKIPLTEEGRAQAREAGKKMRALISTQSGGACGENWRVYFYVSPYERTRTTLREVGKGFSRKRVIGVREECRIREQDFGNFQVEERMRVVKETRERFGRFFYRFPEGESAADVYDRVSSFLESMWRDVDMNRHQVDPSSELNLVIVSHGLTSRVFLTKWFKWTVAEFERLNNFGNCEFRVMELGASGEYTFAIHHSEEEMLDWGMSKDMIDDQKDRVDGCRVTTSNDSCSLHLNEYFDLLDVTDDEE

SEQ ID NO: 69536 - protein, 267 aa, Arabidopsis thaliana
  peptide (1)..(267): Ceres Seq. ID no. 1817903
  misc_feature (1)..(213): Pfam Name: Phosphoglycerate mutase family Pfam Description: Phosphoglycerate mutase family
  misc_feature (1)..(267): Homolog of NCBI NO: 15223983 NR Description: unknown protein; protein id: At1g08940.1
  misc_feature (1)..(266): Homolog of NCBI NO: 15229917 NR Description: unknown protein; protein id: At3g05170.1 thaliana] >gi|6729027|gb|AAF27023.1|AC009177_13 unknown protein
  misc_feature (1)..(234): Homolog of NCBI NO: 34897810 NR Description: P0514G12.25 [Oryza sativa (japonica
  misc_feature (1)..(108): Homolog of NCBI NO: 38454096 NR Description: At1g08940 [Arabidopsis thaliana]
  misc_feature (1)..(210): Homolog of NCBI NO: 21224153 NR Description: conserved hypothetical protein SC4H2.29 coelicolor A3(2)] >gi|7479557|pir||T35128 hypothetical protein
  misc_feature (1)..(210): Homolog of NCBI NO: 29469213 NR Description: unknown [Streptomyces murayamaensis]
  misc_feature (1)..(210): Homolog of NCBI NO: 29829000 NR Description: hypothetical protein [Streptomyces avermitilis
  misc_feature (1)..(209): Homolog of NCBI NO: 32415611 NR Description: hypothetical protein [Neurospora crassa] conserved hypothetical protein [Neurospora crassa]
  misc_feature (1)..(209): Homolog of NCBI NO: 40741871 NR Description: hypothetical protein AN4983.2 [Aspergillus
  misc_feature (65)..(206): Homolog of NCBI NO: 6320256 NR Description: Hypothetical ORF; Ydr051cp [Saccharomyces
MRHGESAGNIDAGAYATTPDHKIPLTEEGRAQAREAGKKMRALISTQSGGACGENWRVYFYVSPYERTRTTLREVGKGFSRKRVIGVREECRIREQDFGNFQVEERMRVVKETRERFGRFFYRFPEGESAADVYDRVSSFLESMWRDVDMNRHQVDPSSELNLVIVSHGLTSRVFLTKWFKWTVAEFERLNNFGNCEFRVMELGASGEYTFAIHHSEEEMLDWGMSKDMIDDQKDRVDGCRVTTSNDSCSLHLNEYFDLLDVTDDEE

SEQ ID NO: 69537 - DNA, 1263 bp, Arabidopsis thaliana
  misc_feature (1)..(1263): Ceres Seq. ID no. 1817993
  misc_feature: MA Experiment ID: 20000264 Result: Up-regulated in Transcription
  misc_feature: MA Experiment 20000264 PARAMETER Experiment Name: At_Open_Flower_P Parameter: Age (day) Value: 21
  misc_feature: MA Experiment 20000264 PARAMETER Experiment Name: At_Open_Flower_P Parameter: Plant Line Value: WS
  misc_feature: MA Experiment 20000264 PARAMETER Experiment Name: At_Open_Flower_P Parameter: Tissue Value: Open Flower vs. Whole Plant
  misc_feature: MA Experiment ID: 20000286 Result: Up-regulated in Transcription
  misc_feature: MA Experiment 20000286 PARAMETER Experiment Name: At_Open_Flower_P Parameter: Age (day) Value: 21
  misc_feature: MA Experiment 20000286 PARAMETER Experiment Name: At_Open_Flower_P Parameter: Plant Line Value: WS
  misc_feature: MA Experiment 20000286 PARAMETER Experiment Name: At_Open_Flower_P Parameter: Tissue Value: Half Open vs. Whole Plant
  misc_feature: MA Experiment ID: 20000794 Result: Up-regulated in Transcription
  misc_feature: MA Experiment 20000794 PARAMETER Experiment Name: At_Petals_P Parameter: Age (day) Value: 23-25 days
  misc_feature: MA Experiment 20000794 PARAMETER Experiment Name: At_Petals_P Parameter: Plant Line Value: WS
  misc_feature: MA Experiment 20000794 PARAMETER Experiment Name: At_Petals_P Parameter: Tissue Value: Petals vs. Whole plant
  misc_feature: MA Experiment ID: 20001910 Result: Up-regulated in Transcription
  misc_feature: MA Experiment 20001910 PARAMETER Experiment Name: At_Drought_Reproduction_P Parameter: Age (day) Value: 37
  misc_feature: MA Experiment 20001910 PARAMETER Experiment Name: At_Drought_Reproduction_P Parameter: Organism Value: A. thaliana
  misc_feature: MA Experiment 20001910 PARAMETER Experiment Name: At_Drought_Reproduction_P Parameter: Plant Line Value: WS
  misc_feature: MA Experiment 20001910 PARAMETER Experiment Name: At_Drought_Reproduction_P Parameter: Timepoint (day) Value: 7
  misc_feature: MA Experiment 20001910 PARAMETER Experiment Name: At_Drought_Reproduction_P Parameter: Tissue Value: Flowers
  misc_feature: MA Experiment 20001910 PARAMETER Experiment Name: At_Drought_Reproduction_P Parameter: Treatment Value: Drought vs. No Drought
atgatgaagctttgtccttgtttcatcaacccgcatcagcttggacctaattcgcctagagattcatttgacgaaggtcttacagcttatagaggccatagccgtaaactttttgcactgttcacatttcgctcacatcggaaaggaagctgcaggcagaagtatataacggaagagataaagaagtatgggaacgtgaagaactgcggtcgaatcttcaaattcaaggagctaatagctgcaaccgacaatttcagcatggattgtatgattggtgaaggcggttttggaagagtctacaaagggtttctcaccagcctcaatcaggtggtggctgtaaagaggcttgataggaatgggttgcaaggaacaagagagttctttgcagaagtaatggtattgagtctggctcaacatccaaaccttgtcaatctcattggctattgcgtcgaagacgagcaacgagtcctcgtttatgaattcatgcctaacggatctttggaagatcatttgttcgacttaccagaagggtcaccaagtctagactggttcaccagaatgcggatagtgcacggagcagcgaaagggctcgagtacttgcacgactacgcagatcctcctgtgatctaccgcgatttcaaagcttcaaacatattgttacaatctgacttcaactcaaagctatcggatttcgggttagctagacttggaccaactgaaggcaaagatcatgtgtccacaagagtcatgggaacatacggatactgtgcccctgaatatgcgatgaccggtcaactcactgctaaatccgatgtctacagtttcggtgttgtccttcttgagatcatttccggaagacgagctattgatggcgatagaccaactgaagaacaaaacttgatctcttgggtatttcatcaagcaagagtcttgttaacatatttgtgttgttgcttgagaagaaagaaaccgatgaaagtctttttttttttggtttggcaggcggaaccgttgttgaaagatagaaggatgtttgcgcagattgtggatccaaatctagatgggaactacccagtaaaagggttgcatcaagctctagcgattgcagcgatgtgtttgcaagaagaagcagagactaggccattgatgggagatgtggtcacagcacttgagttcttggctaagcctatagaggtggttgataacactaacactactcctgcctctcctactcagacatcatcatctgattcatcaaactaa

SEQ ID NO: 69538 - protein, 420 aa, Arabidopsis thaliana
  peptide (1)..(420): Ceres Seq. ID no. 1817994
  misc_feature (1)..(420): Homolog of NCBI NO: 7434288 NR Description: probable serine/threonine-specific protein kinase
  misc_feature (1)..(303): Homolog of NCBI NO: 30696629 NR Description: protein kinase, putative [Arabidopsis thaliana]
  misc_feature (323)..(420): Homolog of NCBI NO: 30696629 NR Description: protein kinase, putative [Arabidopsis thaliana]
  misc_feature (15)..(303): Homolog of NCBI NO: 34907210 NR Description: putative serine/threonine kinase PBS1 protein
  misc_feature (323)..(419): Homolog of NCBI NO: 34907210 NR Description: putative serine/threonine kinase PBS1 protein
  misc_feature (65)..(303): Homolog of NCBI NO: 34394036 NR Description: putative protein serine/threonine kinase BNK1
  misc_feature (331)..(394): Homolog of NCBI NO: 34394036 NR Description: putative protein serine/threonine kinase BNK1
  misc_feature (2)..(303): Homolog of NCBI NO: 15238886 NR Description: protein kinase -like protein; protein id:
  misc_feature (331)..(394): Homolog of NCBI NO: 15238886 NR Description: protein kinase -like protein; protein id:
  misc_feature (52)..(303): Homolog of NCBI NO: 11259782 NR Description: protein kinase-like - Arabidopsis thaliana
MMKLCPCFINPHQLGPNSPRDSFDEGLTAYRGHSRKLFALFTFRSHRKGSCRQKYITEEIKKYGNVKNCGRIFKFKELIAATDNFSMDCMIGEGGFGRVYKGFLTSLNQVVAVKRLDRNGLQGTREFFAEVMVLSLAQHPNLVNLIGYCVEDEQRVLVYEFMPNGSLEDHLFDLPEGSPSLDWFTRMRIVHGAAKGLEYLHDYADPPVIYRDFKASNILLQSDFNSKLSDFGLARLGPTEGKDHVSTRVMGTYGYCAPEYAMTGQLTAKSDVYSFGVVLLEIISGRRAIDGDRPTEEQNLISWVFHQARVLLTYLCCCLRRKKPMKVFFFLVWQAEPLLKDRRMFAQIVDPNLDGNYPVKGLHQALAIAAMCLQEEAETRPLMGDVVTALEFLAKPIEVVDNTNTTPASPTQTSSSDSSN

SEQ ID NO: 69539 - protein, 419 aa, Arabidopsis thaliana
  peptide (1)..(419): Ceres Seq. ID no. 1817995
  misc_feature (330)..(393): Homolog of NCBI NO: 15238886 NR Description: protein kinase -like protein; protein id:
  misc_feature (51)..(302): Homolog of NCBI NO: 11259782 NR Description: protein kinase-like - Arabidopsis thaliana
  misc_feature (1)..(419): Homolog of NCBI NO: 7434288 NR Description: probable serine/threonine-specific protein kinase
  misc_feature (1)..(302): Homolog of NCBI NO: 30696629 NR Description: protein kinase, putative [Arabidopsis thaliana]
  misc_feature (322)..(419): Homolog of NCBI NO: 30696629 NR Description: protein kinase, putative [Arabidopsis thaliana]
  misc_feature (14)..(302): Homolog of NCBI NO: 34907210 NR Description: putative serine/threonine kinase PBS1 protein
  misc_feature (322)..(418): Homolog of NCBI NO: 34907210 NR Description: putative serine/threonine kinase PBS1 protein
  misc_feature (64)..(302): Homolog of NCBI NO: 34394036 NR Description: putative protein serine/threonine kinase BNK1
  misc_feature (330)..(393): Homolog of NCBI NO: 34394036 NR Description: putative protein serine/threonine kinase BNK1
  misc_feature (1)..(302): Homolog of NCBI NO: 15238886 NR Description: protein kinase -like protein; protein id:
MKLCPCFINPHQLGPNSPRDSFDEGLTAYRGHSRKLFALFTFRSHRKGSCRQKYITEEIKKYGNVKNCGRIFKFKELIAATDNFSMDCMIGEGGFGRVYKGFLTSLNQVVAVKRLDRNGLQGTREFFAEVMVLSLAQHPNLVNLIGYCVEDEQRVLVYEFMPNGSLEDHLFDLPEGSPSLDWFTRMRIVHGAAKGLEYLHDYADPPVIYRDFKASNILLQSDFNSKLSDFGLARLGPTEGKDHVSTRVMGTYGYCAPEYAMTGQLTAKSDVYSFGVVLLEIISGRRAIDGDRPTEEQNLISWVFHQARVLLTYLCCCLRRKKPMKVFFFLVWQAEPLLKDRRMFAQIVDPNLDGNYPVKGLHQALAIAAMCLQEEAETRPLMGDVVTALEFLAKPIEVVDNTNTTPASPTQTSSSDSSN

SEQ ID NO: 69540 - protein, 334 aa, Arabidopsis thaliana
  peptide (1)..(334): Ceres Seq. ID no. 1817996
  misc_feature (1)..(334): Homolog of NCBI NO: 7434288 NR Description: probable serine/threonine-specific protein kinase
  misc_feature (1)..(217): Homolog of NCBI NO: 30696629 NR Description: protein kinase, putative [Arabidopsis thaliana]
  misc_feature (237)..(334): Homolog of NCBI NO: 30696629 NR Description: protein kinase, putative [Arabidopsis thaliana]
  misc_feature (1)..(217): Homolog of NCBI NO: 34907210 NR Description: putative serine/threonine kinase PBS1 protein
  misc_feature (237)..(333): Homolog of NCBI NO: 34907210 NR Description: putative serine/threonine kinase PBS1 protein
  misc_feature (1)..(217): Homolog of NCBI NO: 34394036 NR Description: putative protein serine/threonine kinase BNK1
  misc_feature (245)..(308): Homolog of NCBI NO: 34394036 NR Description: putative protein serine/threonine kinase BNK1
  misc_feature (1)..(217): Homolog of NCBI NO: 15238886 NR Description: protein kinase -like protein; protein id:
  misc_feature (245)..(308): Homolog of NCBI NO: 15238886 NR Description: protein kinase -like protein; protein id:
  misc_feature (1)..(217): Homolog of NCBI NO: 11259782 NR Description: protein kinase-like - Arabidopsis thaliana
MDCMIGEGGFGRVYKGFLTSLNQVVAVKRLDRNGLQGTREFFAEVMVLSLAQHPNLVNLIGYCVEDEQRVLVYEFMPNGSLEDHLFDLPEGSPSLDWFTRMRIVHGAAKGLEYLHDYADPPVIYRDFKASNILLQSDFNSKLSDFGLARLGPTEGKDHVSTRVMGTYGYCAPEYAMTGQLTAKSDVYSFGVVLLEIISGRRAIDGDRPTEEQNLISWVFHQARVLLTYLCCCLRRKKPMKVFFFLVWQAEPLLKDRRMFAQIVDPNLDGNYPVKGLHQALAIAAMCLQEEAETRPLMGDVVTALEFLAKPIEVVDNTNTTPASPTQTSSSDSSN

SEQ ID NO: 69541 - DNA, 1872 bp, Arabidopsis thaliana
  misc_feature (1)..(1872): Ceres Seq. ID no. 1818292
  misc_feature: MA Experiment ID: 20000227 Result: Up-regulated in Transcription
  misc_feature: MA Experiment 20000227 PARAMETER Experiment Name: At_Root-Tips-vs-Tops_P Parameter: Tissue Value: Root Tips vs. Root Tops
  misc_feature: MA Experiment ID: 20000286 Result: Up-regulated in Transcription
  misc_feature: MA Experiment 20000286 PARAMETER Experiment Name: At_Open_Flower_P Parameter: Age (day) Value: 21
  misc_feature: MA Experiment 20000286 PARAMETER Experiment Name: At_Open_Flower_P Parameter: Plant Line Value: WS
  misc_feature: MA Experiment 20000286 PARAMETER Experiment Name: At_Open_Flower_P Parameter: Tissue Value: Half Open vs. Whole Plant
  misc_feature: MA Experiment ID: 20001451 Result: Down-regulated in Transcription
  misc_feature: MA Experiment 20001451 PARAMETER Experiment Name: At_Far-red-induction_P Parameter: Age (day) Value: 7
  misc_feature: MA Experiment 20001451 PARAMETER Experiment Name: At_Far-red-induction_P Parameter: Light Value: Far-red vs. White
  misc_feature: MA Experiment 20001451 PARAMETER Experiment Name: At_Far-red-induction_P Parameter: Organism Value: A. thaliana
  misc_feature: MA Experiment 20001451 PARAMETER Experiment Name: At_Far-red-induction_P Parameter: Plant Line Value: Columbia
  misc_feature: MA Experiment 20001451 PARAMETER Experiment Name: At_Far-red-induction_P Parameter: Timepoint (hr) Value: 24
  misc_feature: MA Experiment 20001451 PARAMETER Experiment Name: At_Far-red-induction_P Parameter: Tissue Value: Whole Plant
  misc_feature: MA Experiment ID: 20001557 Result: Up-regulated in Transcription
  misc_feature: MA Experiment 20001557 PARAMETER Experiment Name: At_Drought_Soil_Dry_P Parameter: Age (day) Value: 27
  misc_feature: MA Experiment 20001557 PARAMETER Experiment Name: At_Drought_Soil_Dry_P Parameter: Organism Value: A. thaliana
  misc_feature: MA Experiment 20001557 PARAMETER Experiment Name: At_Drought_Soil_Dry_P Parameter: Plant Line Value: WS
  misc_feature: MA Experiment 20001557 PARAMETER Experiment Name: At_Drought_Soil_Dry_P Parameter: Post Timepoint (hr) Value: 3
  misc_feature: MA Experiment 20001557 PARAMETER Experiment Name: At_Drought_Soil_Dry_P Parameter: Post-Treatment Value: Re-Water vs. No Drought
  misc_feature: MA Experiment 20001557 PARAMETER Experiment Name: At_Drought_Soil_Dry_P Parameter: Timepoint (day) Value: 13
  misc_feature: MA Experiment 20001557 PARAMETER Experiment Name: At_Drought_Soil_Dry_P Parameter: Treatment Value: Drought vs. No Drought
  misc_feature: MA Experiment ID: 20001558 Result: Up-regulated in Transcription
  misc_feature: MA Experiment 20001558 PARAMETER Experiment Name: At_Drought_Soil_Dry_P Parameter: Age (day) Value: 27
  misc_feature: MA Experiment 20001558 PARAMETER Experiment Name: At_Drought_Soil_Dry_P Parameter: Organism Value: A. thaliana
  misc_feature: MA Experiment 20001558 PARAMETER Experiment Name: At_Drought_Soil_Dry_P Parameter: Plant Line Value: WS
  misc_feature: MA Experiment 20001558 PARAMETER Experiment Name: At_Drought_Soil_Dry_P Parameter: Post Timepoint (hr) Value: 6
  misc_feature: MA Experiment 20001558 PARAMETER Experiment Name: At_Drought_Soil_Dry_P Parameter: Post-Treatment Value: Re-Water vs. No Drought
  misc_feature: MA Experiment 20001558 PARAMETER Experiment Name: At_Drought_Soil_Dry_P Parameter: Timepoint (day) Value: 13
  misc_feature: MA Experiment 20001558 PARAMETER Experiment Name: At_Drought_Soil_Dry_P Parameter: Treatment Value: Drought vs. No Drought
  misc_feature: MA Experiment ID: 20001757 Result: Up-regulated in Transcription
  misc_feature: MA Experiment 20001757 PARAMETER Experiment Name: At_50mM_NH4NO3_L-to-H_P Parameter: Timepoint (hr) Value: 6
  misc_feature: MA Experiment 20001757 PARAMETER Experiment Name: At_50mM_NH4NO3_L-to-H_P Parameter: Tissue Value: Leaf
  misc_feature: MA Experiment 20001757 PARAMETER Experiment Name: At_50mM_NH4NO3_L-to-H_P Parameter: Treatment Value: 50mM NH4NO3 vs 100mM Mannitol
atggtttcttttttacctaatctgtttcgtctgtgtgttttgatctttacaaaagcagatcagtgccggcggcgatattgtccgaggataaaacatgtttgctctttccaaggttttgcggagagtctccgcctaggagcttgcaatgctgtctactctaagctagatataccattgggagaaagaaacattgctattgaatcaaacgctttgattcatgataaacacgaagctttgcctagattttatgagctctcttggtcttcctctaccggaagacgttcactttcctcggacgctggagctaaaactaccggagatgacgatgacctcgaagacaagaatgtagaccttgcaactccagacgagactagtagtgatagtgaagatggtgaggagttttccggtgatgaaggggatattgaaggagcagagctggaactacatgtcccggaaagcaagagaccatcggagatgtttaaggccattgtttctgtctcaggtctgtctgtagggagtgctcttgataagtgggttgaacaaggaaaggataccaaccgtaaagagtttgaaagtgcgatgctacaactccgtaaacgtcggatgtttgggagagcattgcagatgacagaatggttagacgaaaataagcagtttgaaatggaggagagagattatgcttgtcggcttgatctgatttccaaggtacgtggctggtacaagggagaagcttatatcaaaacaatcccggaatctttcagaggggaattggtctaccgaaccctcctggcgaatcatgtggcaactagcaatgtgagaacagctgaagcagttttcaacaaaatgaaggacttgggattccctctgtcaacattcacctgtaatcagatgcttattctttacaaaagggtcgacaagaagaaaatagccgatgtgttattgctgttggagaaggaaaatctgaagccgaatcttaacacatacaaaatcctgattgataccaaaggatcatcaaatgacataactgggatggaacaaattgtggagacaatgaaaagtgaaggtgttgagcttgaccttcgtgcacgagctctcattgcaagacactatgcatcagctgggcttaaagagaaggctgagaaagtgctgaaagagatggaaggtgaaagcttggaggaaaatcggcatatgtgcaaggatttgctttccgtctatggctatctccagagggaggatgaagtgcgcagagtttggaagatctgtgaagaaaacccccgttataacgaggtccttgctgcaatcttggcttttggaaagatcgataaagtcaaagatgcagaggcggtttttgagaaggtgttgaagatgtcccatagagtttcttctaatgtttactccgttctcttgagggtttacgtggatcacaagatggtctcagagggtaaggatcttgttaagcagatgtcagacagcgggtgcaatattggggccttaacatgggatgcagtgatcaagctctatgtggaagccggggaagtagaaaaggctgagtcttcactgagcaaggcaatacagtcgaaacagattaaaccgttgatgagctccttcatgtacttaatgcacgagtatgtgagaaggggtgatgttcataacacagagaaaatcttccagaggatgaagcaagctggctatcaatctcgcttctgggcgtaccaaacccttatccaagcttatgtcaatgccaaagctccagcttatggaatgaaggaaagaatgaaagctgataacatcttcccaaataaaagattagctgctcaactcgctaaagccgatcccttcaagaagacccctctctcggatctccttgattga

SEQ ID NO: 69542 - protein, 623 aa, Arabidopsis thaliana
  peptide (1)..(623): Ceres Seq. ID no. 1818293
  misc_feature (534)..(568): Pfam Name: PPR repeat Pfam Description: PPR repeat
  misc_feature (41)..(623): Homolog of NCBI NO: 15220095 NR Description: hypothetical protein; protein id: At1g80270.1, by cDNA: gi_17064897, supported by cDNA: gi_20259917 [Arabidopsis
  misc_feature (80)..(623): Homolog of NCBI NO: 6958202 NR Description: DNA-binding protein [Triticum aestivum]
  misc_feature (100)..(623): Homolog of NCBI NO: 34903362 NR Description: unnamed protein product [Oryza sativa (japonica group)] >gi|6498438|dbj|BAA87841.1| unnamed protein product
  misc_feature (53)..(623): Homolog of NCBI NO: 22331104 NR Description: DNA-binding protein, putative; protein id:
  misc_feature (96)..(607): Homolog of NCBI NO: 34900334 NR Description: P0592C06.16 [Oryza sativa (japonica
  misc_feature (254)..(607): Homolog of NCBI NO: 34394024 NR Description: putative DNA-binding protein [Oryza sativa
  misc_feature (170)..(614): Homolog of NCBI NO: 34905294 NR Description: putative DNA-binding protein [Oryza sativa
  misc_feature (177)..(597): Homolog of NCBI NO: 15235508 NR Description: hypothetical protein; protein id: At4g02820.1, by cDNA: gi_17064737 [Arabidopsis thaliana]
  misc_feature (177)..(597): Homolog of NCBI NO: 17064738 NR Description: Unknown protein [Arabidopsis thaliana]
  misc_feature (151)..(566): Homolog of NCBI NO: 15225409 NR Description: hypothetical protein; protein id: At2g20710.1
MVSFLPNLFRLCVLIFTKADQCRRRYCPRIKHVCSFQGFAESLRLGACNAVYSKLDIPLGERNIAIESNALIHDKHEALPRFYELSWSSSTGRRSLSSDAGAKTTGDDDDLEDKNVDLATPDETSSDSEDGEEFSGDEGDIEGAELELHVPESKRPSEMFKAIVSVSGLSVGSALDKWVEQGKDTNRKEFESAMLQLRKRRMFGRALQMTEWLDENKQFEMEERDYACRLDLISKVRGWYKGEAYIKTIPESFRGELVYRTLLANHVATSNVRTAEAVFNKMKDLGFPLSTFTCNQMLILYKRVDKKKIADVLLLLEKENLKPNLNTYKILIDTKGSSNDITGMEQIVETMKSEGVELDLRARALIARHYASAGLKEKAEKVLKEMEGESLEENRHMCKDLLSVYGYLQREDEVRRVWKICEENPRYNEVLAAILAFGKIDKVKDAEAVFEKVLKMSHRVSSNVYSVLLRVYVDHKMVSEGKDLVKQMSDSGCNIGALTWDAVIKLYVEAGEVEKAESSLSKAIQSKQIKPLMSSFMYLMHEYVRRGDVHNTEKIFQRMKQAGYQSRFWAYQTLIQAYVNAKAPAYGMKERMKADNIFPNKRLAAQLAKADPFKKTPLSDLLD

SEQ ID NO: 69543 - protein, 465 aa, Arabidopsis thaliana
  peptide (1)..(465): Ceres Seq. ID no. 1818294
  misc_feature (376)..(410): Pfam Name: PPR repeat Pfam Description: PPR repeat
  misc_feature (1)..(465): Homolog of NCBI NO: 15220095 NR Description: hypothetical protein; protein id: At1g80270.1, by cDNA: gi_17064897, supported by cDNA: gi_20259917 [Arabidopsis
  misc_feature (1)..(465): Homolog of NCBI NO: 6958202 NR Description: DNA-binding protein [Triticum aestivum]
  misc_feature (1)..(465): Homolog of NCBI NO: 34903362 NR Description: unnamed protein product [Oryza sativa (japonica group)] >gi|6498438|dbj|BAA87841.1| unnamed protein product
  misc_feature (1)..(465): Homolog of NCBI NO: 22331104 NR Description: DNA-binding protein, putative; protein id:
  misc_feature (1)..(449): Homolog of NCBI NO: 34900334 NR Description: P0592C06.16 [Oryza sativa (japonica
  misc_feature (96)..(449): Homolog of NCBI NO: 34394024 NR Description: putative DNA-binding protein [Oryza sativa
  misc_feature (12)..(456): Homolog of NCBI NO: 34905294 NR Description: putative DNA-binding protein [Oryza sativa
  misc_feature (19)..(439): Homolog of NCBI NO: 15235508 NR Description: hypothetical protein; protein id: At4g02820.1, by cDNA: gi_17064737 [Arabidopsis thaliana]
  misc_feature (19)..(439): Homolog of NCBI NO: 17064738 NR Description: Unknown protein [Arabidopsis thaliana]
  misc_feature (1)..(408): Homolog of NCBI NO: 15225409 NR Description: hypothetical protein; protein id: At2g20710.1
MFKAIVSVSGLSVGSALDKWVEQGKDTNRKEFESAMLQLRKRRMFGRALQMTEWLDENKQFEMEERDYACRLDLISKVRGWYKGEAYIKTIPESFRGELVYRTLLANHVATSNVRTAEAVFNKMKDLGFPLSTFTCNQMLILYKRVDKKKIADVLLLLEKENLKPNLNTYKILIDTKGSSNDITGMEQIVETMKSEGVELDLRARALIARHYASAGLKEKAEKVLKEMEGESLEENRHMCKDLLSVYGYLQREDEVRRVWKICEENPRYNEVLAAILAFGKIDKVKDAEAVFEKVLKMSHRVSSNVYSVLLRVYVDHKMVSEGKDLVKQMSDSGCNIGALTWDAVIKLYVEAGEVEKAESSLSKAIQSKQIKPLMSSFMYLMHEYVRRGDVHNTEKIFQRMKQAGYQSRFWAYQTLIQAYVNAKAPAYGMKERMKADNIFPNKRLAAQLAKADPFKKTPLSDLLD

SEQ ID NO: 69544 - protein, 430 aa, Arabidopsis thaliana
  peptide (1)..(430): Ceres Seq. ID no. 1818295
  misc_feature (341)..(375): Pfam Name: PPR repeat Pfam Description: PPR repeat
  misc_feature (1)..(430): Homolog of NCBI NO: 15220095 NR Description: hypothetical protein; protein id: At1g80270.1, by cDNA: gi_17064897, supported by cDNA: gi_20259917 [Arabidopsis
  misc_feature (1)..(430): Homolog of NCBI NO: 6958202 NR Description: DNA-binding protein [Triticum aestivum]
  misc_feature (1)..(430): Homolog of NCBI NO: 34903362 NR Description: unnamed protein product [Oryza sativa (japonica group)] >gi|6498438|dbj|BAA87841.1| unnamed protein product
  misc_feature (1)..(430): Homolog of NCBI NO: 22331104 NR Description: DNA-binding protein, putative; protein id:
  misc_feature (1)..(414): Homolog of NCBI NO: 34900334 NR Description: P0592C06.16 [Oryza sativa (japonica
  misc_feature (61)..(414): Homolog of NCBI NO: 34394024 NR Description: putative DNA-binding protein [Oryza sativa
  misc_feature (1)..(421): Homolog of NCBI NO: 34905294 NR Description: putative DNA-binding protein [Oryza sativa
  misc_feature (1)..(404): Homolog of NCBI NO: 15235508 NR Description: hypothetical protein; protein id: At4g02820.1, by cDNA: gi_17064737 [Arabidopsis thaliana]
  misc_feature (1)..(404): Homolog of NCBI NO: 17064738 NR Description: Unknown protein [Arabidopsis thaliana]
  misc_feature (1)..(373): Homolog of NCBI NO: 15225409 NR Description: hypothetical protein; protein id: At2g20710.1
MLQLRKRRMFGRALQMTEWLDENKQFEMEERDYACRLDLISKVRGWYKGEAYIKTIPESFRGELVYRTLLANHVATSNVRTAEAVFNKMKDLGFPLSTFTCNQMLILYKRVDKKKIADVLLLLEKENLKPNLNTYKILIDTKGSSNDITGMEQIVETMKSEGVELDLRARALIARHYASAGLKEKAEKVLKEMEGESLEENRHMCKDLLSVYGYLQREDEVRRVWKICEENPRYNEVLAAILAFGKIDKVKDAEAVFEKVLKMSHRVSSNVYSVLLRVYVDHKMVSEGKDLVKQMSDSGCNIGALTWDAVIKLYVEAGEVEKAESSLSKAIQSKQIKPLMSSFMYLMHEYVRRGDVHNTEKIFQRMKQAGYQSRFWAYQTLIQAYVNAKAPAYGMKERMKADNIFPNKRLAAQLAKADPFKKTPLSDLLD

SEQ ID NO: 69545 - DNA, 2853 bp, Arabidopsis thaliana
  misc_feature (1)..(2853): Ceres Seq. ID no. 1818328
  misc_feature: MA Experiment ID: 20000173 Result: Down-regulated in Transcription
  misc_feature: MA Experiment 20000173 PARAMETER Experiment Name: At_42deg_Heat_P Parameter: Age (day) Value: 14
  misc_feature: MA Experiment 20000173 PARAMETER Experiment Name: At_42deg_Heat_P Parameter: Organism Value: A. thaliana
  misc_feature: MA Experiment 20000173 PARAMETER Experiment Name: At_42deg_Heat_P Parameter: Plant Line Value: WS
  misc_feature: MA Experiment 20000173 PARAMETER Experiment Name: At_42deg_Heat_P Parameter: Temperature (deg C) Value: 42 vs. 22
  misc_feature: MA Experiment 20000173 PARAMETER Experiment Name: At_42deg_Heat_P Parameter: Timepoint (hr) Value: 6
  misc_feature: MA Experiment 20000173 PARAMETER Experiment Name: At_42deg_Heat_P Parameter: Tissue Value: Aerial
  misc_feature: MA Experiment ID: 20000184 Result: Down-regulated in Transcription
  misc_feature: MA Experiment 20000184 PARAMETER Experiment Name: At_Shoots__P Parameter: Age (day) Value: 7
  misc_feature: MA Experiment 20000184 PARAMETER Experiment Name: At_Shoots__P Parameter: Tissue Value: Shoots vs. Whole Plant
  misc_feature: MA Experiment ID: 20000495 Result: Up-regulated in Transcription
  misc_feature: MA Experiment 20000495 PARAMETER Experiment Name: At_Guard_Cells_P Parameter: Harvest Date Value: 8/2/2002
  misc_feature: MA Experiment 20000495 PARAMETER Experiment Name: At_Guard_Cells_P Parameter: Organism Value: A. thaliana
  misc_feature: MA Experiment 20000495 PARAMETER Experiment Name: At_Guard_Cells_P Parameter: Tissue Value: Guard Cells vs. Leaves
  misc_feature: MA Experiment ID: 20000794 Result: Up-regulated in Transcription
  misc_feature: MA Experiment 20000794 PARAMETER Experiment Name: At_Petals_P Parameter: Age (day) Value: 23-25 days
  misc_feature: MA Experiment 20000794 PARAMETER Experiment Name: At_Petals_P Parameter: Plant Line Value: WS
  misc_feature: MA Experiment 20000794 PARAMETER Experiment Name: At_Petals_P Parameter: Tissue Value: Petals vs. Whole plant
  misc_feature: MA Experiment ID: 20001451 Result: Up-regulated in Transcription
  misc_feature: MA Experiment 20001451 PARAMETER Experiment Name: At_Far-red-induction_P Parameter: Age (day) Value: 7
  misc_feature: MA Experiment 20001451 PARAMETER Experiment Name: At_Far-red-induction_P Parameter: Light Value: Far-red vs. White
  misc_feature: MA Experiment 20001451 PARAMETER Experiment Name: At_Far-red-induction_P Parameter: Organism Value: A. thaliana
  misc_feature: MA Experiment 20001451 PARAMETER Experiment Name: At_Far-red-induction_P Parameter: Plant Line Value: Columbia
  misc_feature: MA Experiment 20001451 PARAMETER Experiment Name: At_Far-red-induction_P Parameter: Timepoint (hr) Value: 24
  misc_feature: MA Experiment 20001451 PARAMETER Experiment Name: At_Far-red-induction_P Parameter: Tissue Value: Whole Plant
  misc_feature: MA Experiment ID: 20001911 Result: Up-regulated in Transcription
  misc_feature: MA Experiment 20001911 PARAMETER Experiment Name: At_Drought_Reproduction_P Parameter: Age (day) Value: 40
  misc_feature: MA Experiment 20001911 PARAMETER Experiment Name: At_Drought_Reproduction_P Parameter: Organism Value: A. thaliana
  misc_feature: MA Experiment 20001911 PARAMETER Experiment Name: At_Drought_Reproduction_P Parameter: Plant Line Value: WS
  misc_feature: MA Experiment 20001911 PARAMETER Experiment Name: At_Drought_Reproduction_P Parameter: Timepoint (day) Value: 10
  misc_feature: MA Experiment 20001911 PARAMETER Experiment Name: At_Drought_Reproduction_P Parameter: Tissue Value: Flowers
  misc_feature: MA Experiment 20001911 PARAMETER Experiment Name: At_Drought_Reproduction_P Parameter: Treatment Value: Drought vs. No Drought
atgagcacccagaagcaagtggtgactattcgggacctggtagatgaagccaagaaacgaattgtaatcgtggtcatatgcgtcgtcggactttcctacctcatgtccctgacaagttcatcggttttggttaaccttactcctgctgtgttattgatcatcctttttcgttattacactctcgatagtgaaatgaaaagaaaagctgcagcttacaccaacaagccatcgtcgtctctgaatgcaccaactctaaacaaaacacctgaactccctaaagcagctccacggtctgactggagaagcaaagtgaactctcaagtcgttgaggatgcaattgatcactttactcgtcacctcatttctgaatgggttctggatctttggtactctcgaattacaccggataagcaaggtcctgaagaactggtgtttattattaacgatgttcttggggaactttcacggcggtttagaaatgtaaatcttattgatctattgacaagggatttgattgatattatatgtcgccgtgtggagcttttccgcgagtgtcaagcaaagattgagagacaacaaaggagaagcctcagttttgaagacagagactcagaactaagacgtgtgatggccagtgaagataaattgcaccctgctttgttctctcctgaatccgagcataaggttctgcaacatatagtgaacagtctcattttagtaacatttaggccagaggatctgcactgtgcttttttccactataccgtgagggagctttttgcttgctgtgtgatccgaccagtcctaaacctagccaatcctcggttcataaatgagaggattgaagctgctgtaatgtcaaggataaagactactatcagatctagtgctgcagaagaggcttctcagtctgaagatctctcaaatgtttctcctgatcatttttctagatatatggacccctctgtcacaggtgttgagcttgtgcagttgaaaaatgaacagcaaaaaaattctaaaaagaaaagcgctacagataaacagcatgtaaaagagctctctaaagatccattgctttctatggacactcgatcttcccgatcgtggaactctttcccctcaacatccaaaataggtgatggtagtaaagatcctcaaggacatcgaggaggagagggttggggtgacgtgttagacatgatgtcacaaaggaaaactgagacccttgctcctgagcatcttgaaagcgtgtgggcaaaaggaagaaactataaaaagaaggaaggtgggaaagttgatgagcgcgtgcccccgagatggtctagcaaggctggtgactgcaatgaaaacactgtgaatgcaagagagtccagtcagcgtaaagttgtaaatacagacagtcatttatcaagttattcctctgctgaagaggatgaggagcaaacaaagagtagtcattcttatacatccgaggatgaggaaacggtaacaggtctaaacagtcctgggactcgtgtctgggatggtcgaacgaagaaaaatcttggtgtttcacggatacaccatccacttgaaaattcaggccgttctttaaaaaagaccagtaaagggcatgaacgttatcagcaagtacccggtcatcaatctggcaggaagagatccagaatttctggtcatattatagacgatgatgatagtgatgattctgaagatggttctttgactagatcatacagtggaatgtctgcaacgtcatctacatcatacgtttcagcggcagaaagtgaccttcccaatgcccctaaaagttctttgttggttgattcctttgcgaagttgagatgtgaggttctgggtgccaatattgtgaagggtagttctaagatgtttgctgtgtattcagttgcagtcacagatgaaagtaatcatagctggtctatcaaaagaagatttcgacattttgaggagcttcaccgacggctaaaagtgtttcctgagtacaaacttcatttaccgccaaagcatttcctatcaacaggcgtggacatacctgttatccaagagcgatgtgtactacttgacgagtatatcaagctacaacgaatttcaggatcaattgaagtttgggacttcctcagtgtggattctcagacttatgcgttctcaagttccttctcaatcattgagacgctaacagttaaacctgtcaataagacatctactgtcgctacaaatatagcaagtatgactcaggcagcaccaggtccgcttcctcggagggaaaatctgagttctgagaatgggatatcgggtcaaaatatgaggaataacgttatggtggatgatgtaaagtcaaaagtgaaaaatcttggaaatgatcatgtgaagacacctgatgtagatgtgagaaaccgcaaagagaatggcgggctaaaagtgggtactcaacatgccgatgatgtggcctgcgctggcctgcccaccgagtgggttcctccaaagctaacattacccttgctagacttagtagatgttgtctttcaactccaggagggtgggtggatcaggcggaaagctttttgggttgccaaacagatacttcaacttgggatgggggacgcattggacgattgggtacttgaaaaaatttgtcttttgcggcggggaactgtagttgcttctggaattcaacgggttgaacagatactatggccggatggtgtattcatgacaaagcatccaaaaaggcagcaacaatccagcatttctgaagaggagcagaaacaagaagcagagagacgagcaaagtttgttcatgagctgatgatcggtaatgagcgtcctgttatctga

SEQ ID NO: 69546 - protein, 950 aa, Arabidopsis thaliana
  peptide (1)..(950): Ceres Seq. ID no. 1818329
  misc_feature (106)..(290): Pfam Name: PXA domain Pfam Description: PXA domain
  misc_feature (56)..(367): Homolog of NCBI NO: 25411680 NR Description: hypothetical protein At2g15900 [imported] - thaliana >gi|5306243|gb|AAD41976.1| hypothetical protein
  misc_feature (612)..(835): Homolog of NCBI NO: 25411680 NR Description: hypothetical protein At2g15900 [imported] - thaliana >gi|5306243|gb|AAD41976.1| hypothetical protein
  misc_feature (378)..(485): Homolog of NCBI NO: 25411680 NR Description: hypothetical protein At2g15900 [imported] - thaliana >gi|5306243|gb|AAD41976.1| hypothetical protein
  misc_feature (56)..(367): Homolog of NCBI NO: 30679545 NR Description: expressed protein [Arabidopsis thaliana]
  misc_feature (612)..(835): Homolog of NCBI NO: 30679545 NR Description: expressed protein [Arabidopsis thaliana]
  misc_feature (378)..(485): Homolog of NCBI NO: 30679545 NR Description: expressed protein [Arabidopsis thaliana]
  misc_feature (787)..(928): Homolog of NCBI NO: 25411680 NR Description: hypothetical protein At2g15900 [imported] - thaliana >gi|5306243|gb|AAD41976.1| hypothetical protein
  misc_feature (787)..(928): Homolog of NCBI NO: 30679545 NR Description: expressed protein [Arabidopsis thaliana]
  misc_feature (5)..(157): Homolog of NCBI NO: 25411680 NR Description: hypothetical protein At2g15900 [imported] - thaliana >gi|5306243|gb|AAD41976.1| hypothetical protein
  misc_feature (5)..(157): Homolog of NCBI NO: 30679545 NR Description: expressed protein [Arabidopsis thaliana]
MSTQKQVVTIRDLVDEAKKRIVIVVICVVGLSYLMSLTSSSVLVNLTPAVLLIILFRYYTLDSEMKRKAAAYTNKPSSSLNAPTLNKTPELPKAAPRSDWRSKVNSQVVEDAIDHFTRHLISEWVLDLWYSRITPDKQGPEELVFIINDVLGELSRRFRNVNLIDLLTRDLIDIICRRVELFRECQAKIERQQRRSLSFEDRDSELRRVMASEDKLHPALFSPESEHKVLQHIVNSLILVTFRPEDLHCAFFHYTVRELFACCVIRPVLNLANPRFINERIEAAVMSRIKTTIRSSAAEEASQSEDLSNVSPDHFSRYMDPSVTGVELVQLKNEQQKNSKKKSATDKQHVKELSKDPLLSMDTRSSRSWNSFPSTSKIGDGSKDPQGHRGGEGWGDVLDMMSQRKTETLAPEHLESVWAKGRNYKKKEGGKVDERVPPRWSSKAGDCNENTVNARESSQRKVVNTDSHLSSYSSAEEDEEQTKSSHSYTSEDEETVTGLNSPGTRVWDGRTKKNLGVSRIHHPLENSGRSLKKTSKGHERYQQVPGHQSGRKRSRISGHIIDDDDSDDSEDGSLTRSYSGMSATSSTSYVSAAESDLPNAPKSSLLVDSFAKLRCEVLGANIVKGSSKMFAVYSVAVTDESNHSWSIKRRFRHFEELHRRLKVFPEYKLHLPPKHFLSTGVDIPVIQERCVLLDEYIKLQRISGSIEVWDFLSVDSQTYAFSSSFSIIETLTVKPVNKTSTVATNIASMTQAAPGPLPRRENLSSENGISGQNMRNNVMVDDVKSKVKNLGNDHVKTPDVDVRNRKENGGLKVGTQHADDVACAGLPTEWVPPKLTLPLLDLVDVVFQLQEGGWIRRKAFWVAKQILQLGMGDALDDWVLEKICLLRRGTVVASGIQRVEQILWPDGVFMTKHPKRQQQSSISEEEQKQEAERRAKFVHELMIGNERPVI

SEQ ID NO: 69547 - protein, 916 aa, Arabidopsis thaliana
  peptide (1)..(916): Ceres Seq. ID no. 1818330
  misc_feature (72)..(256): Pfam Name: PXA domain Pfam Description: PXA domain
  misc_feature (22)..(333): Homolog of NCBI NO: 25411680 NR Description: hypothetical protein At2g15900 [imported] - thaliana >gi|5306243|gb|AAD41976.1| hypothetical protein
  misc_feature (578)..(801): Homolog of NCBI NO: 25411680 NR Description: hypothetical protein At2g15900 [imported] - thaliana >gi|5306243|gb|AAD41976.1| hypothetical protein
  misc_feature (344)..(451): Homolog of NCBI NO: 25411680 NR Description: hypothetical protein At2g15900 [imported] - thaliana >gi|5306243|gb|AAD41976.1| hypothetical protein
  misc_feature (22)..(333): Homolog of NCBI NO: 30679545 NR Description: expressed protein [Arabidopsis thaliana]
  misc_feature (578)..(801): Homolog of NCBI NO: 30679545 NR Description: expressed protein [Arabidopsis thaliana]
  misc_feature (344)..(451): Homolog of NCBI NO: 30679545 NR Description: expressed protein [Arabidopsis thaliana]
  misc_feature (753)..(894): Homolog of NCBI NO: 25411680 NR Description: hypothetical protein At2g15900 [imported] - thaliana >gi|5306243|gb|AAD41976.1| hypothetical protein
  misc_feature (753)..(894): Homolog of NCBI NO: 30679545 NR Description: expressed protein [Arabidopsis thaliana]
  misc_feature (1)..(123): Homolog of NCBI NO: 25411680 NR Description: hypothetical protein At2g15900 [imported] - thaliana >gi|5306243|gb|AAD41976.1| hypothetical protein
  misc_feature (1)..(123): Homolog of NCBI NO: 30679545 NR Description: expressed protein [Arabidopsis thaliana]
MSLTSSSVLVNLTPAVLLIILFRYYTLDSEMKRKAAAYTNKPSSSLNAPTLNKTPELPKAAPRSDWRSKVNSQVVEDAIDHFTRHLISEWVLDLWYSRITPDKQGPEELVFIINDVLGELSRRFRNVNLIDLLTRDLIDIICRRVELFRECQAKIERQQRRSLSFEDRDSELRRVMASEDKLHPALFSPESEHKVLQHIVNSLILVTFRPEDLHCAFFHYTVRELFACCVIRPVLNLANPRFINERIEAAVMSRIKTTIRSSAAEEASQSEDLSNVSPDHFSRYMDPSVTGVELVQLKNEQQKNSKKKSATDKQHVKELSKDPLLSMDTRSSRSWNSFPSTSKIGDGSKDPQGHRGGEGWGDVLDMMSQRKTETLAPEHLESVWAKGRNYKKKEGGKVDERVPPRWSSKAGDCNENTVNARESSQRKVVNTDSHLSSYSSAEEDEEQTKSSHSYTSEDEETVTGLNSPGTRVWDGRTKKNLGVSRIHHPLENSGRSLKKTSKGHERYQQVPGHQSGRKRSRISGHIIDDDDSDDSEDGSLTRSYSGMSATSSTSYVSAAESDLPNAPKSSLLVDSFAKLRCEVLGANIVKGSSKMFAVYSVAVTDESNHSWSIKRRFRHFEELHRRLKVFPEYKLHLPPKHFLSTGVDIPVIQERCVLLDEYIKLQRISGSIEVWDFLSVDSQTYAFSSSFSIIETLTVKPVNKTSTVATNIASMTQAAPGPLPRRENLSSENGISGQNMRNNVMVDDVKSKVKNLGNDHVKTPDVDVRNRKENGGLKVGTQHADDVACAGLPTEWVPPKLTLPLLDLVDVVFQLQEGGWIRRKAFWVAKQILQLGMGDALDDWVLEKICLLRRGTVVASGIQRVEQILWPDGVFMTKHPKRQQQSSISEEEQKQEAERRAKFVHELMIGNERPVI

SEQ ID NO: 69548 - protein, 886 aa, Arabidopsis thaliana
  peptide (1)..(886): Ceres Seq. ID no. 1818331
  misc_feature (42)..(226): Pfam Name: PXA domain Pfam Description: PXA domain
  misc_feature (1)..(303): Homolog of NCBI NO: 25411680 NR Description: hypothetical protein At2g15900 [imported] - thaliana >gi|5306243|gb|AAD41976.1| hypothetical protein
  misc_feature (548)..(771): Homolog of NCBI NO: 25411680 NR Description: hypothetical protein At2g15900 [imported] - thaliana >gi|5306243|gb|AAD41976.1| hypothetical protein
  misc_feature (314)..(421): Homolog of NCBI NO: 25411680 NR Description: hypothetical protein At2g15900 [imported] - thaliana >gi|5306243|gb|AAD41976.1| hypothetical protein
  misc_feature (1)..(303): Homolog of NCBI NO: 30679545 NR Description: expressed protein [Arabidopsis thaliana]
  misc_feature (548)..(771): Homolog of NCBI NO: 30679545 NR Description: expressed protein [Arabidopsis thaliana]
  misc_feature (314)..(421): Homolog of NCBI NO: 30679545 NR Description: expressed protein [Arabidopsis thaliana]
  misc_feature (723)..(864): Homolog of NCBI NO: 25411680 NR Description: hypothetical protein At2g15900 [imported] - thaliana >gi|5306243|gb|AAD41976.1| hypothetical protein
  misc_feature (723)..(864): Homolog of NCBI NO: 30679545 NR Description: expressed protein [Arabidopsis thaliana]
  misc_feature (1)..(93): Homolog of NCBI NO: 25411680 NR Description: hypothetical protein At2g15900 [imported] - thaliana >gi|5306243|gb|AAD41976.1| hypothetical protein
  misc_feature (1)..(93): Homolog of NCBI NO: 30679545 NR Description: expressed protein [Arabidopsis thaliana]
MKRKAAAYTNKPSSSLNAPTLNKTPELPKAAPRSDWRSKVNSQVVEDAIDHFTRHLISEWVLDLWYSRITPDKQGPEELVFIINDVLGELSRRFRNVNLIDLLTRDLIDIICRRVELFRECQAKIERQQRRSLSFEDRDSELRRVMASEDKLHPALFSPESEHKVLQHIVNSLILVTFRPEDLHCAFFHYTVRELFACCVIRPVLNLANPRFINERIEAAVMSRIKTTIRSSAAEEASQSEDLSNVSPDHFSRYMDPSVTGVELVQLKNEQQKNSKKKSATDKQHVKELSKDPLLSMDTRSSRSWNSFPSTSKIGDGSKDPQGHRGGEGWGDVLDMMSQRKTETLAPEHLESVWAKGRNYKKKEGGKVDERVPPRWSSKAGDCNENTVNARESSQRKVVNTDSHLSSYSSAEEDEEQTKSSHSYTSEDEETVTGLNSPGTRVWDGRTKKNLGVSRIHHPLENSGRSLKKTSKGHERYQQVPGHQSGRKRSRISGHIIDDDDSDDSEDGSLTRSYSGMSATSSTSYVSAAESDLPNAPKSSLLVDSFAKLRCEVLGANIVKGSSKMFAVYSVAVTDESNHSWSIKRRFRHFEELHRRLKVFPEYKLHLPPKHFLSTGVDIPVIQERCVLLDEYIKLQRISGSIEVWDFLSVDSQTYAFSSSFSIIETLTVKPVNKTSTVATNIASMTQAAPGPLPRRENLSSENGISGQNMRNNVMVDDVKSKVKNLGNDHVKTPDVDVRNRKENGGLKVGTQHADDVACAGLPTEWVPPKLTLPLLDLVDVVFQLQEGGWIRRKAFWVAKQILQLGMGDALDDWVLEKICLLRRGTVVASGIQRVEQILWPDGVFMTKHPKRQQQSSISEEEQKQEAERRAKFVHELMIGNERPVI

SEQ ID NO: 69549 - DNA, 777 bp, Arabidopsis thaliana
  misc_feature (1)..(777): Ceres Seq. ID no. 1818332
  misc_feature: MA Experiment ID: 20000265 Result: Up-regulated in Transcription
  misc_feature: MA Experiment 20000265 PARAMETER Experiment Name: At_Open_Flower_P Parameter: Age (day) Value: 21
  misc_feature: MA Experiment 20000265 PARAMETER Experiment Name: At_Open_Flower_P Parameter: Plant Line Value: WS
  misc_feature: MA Experiment 20000265 PARAMETER Experiment Name: At_Open_Flower_P Parameter: Tissue Value: Closed Flower vs. Whole Plant
atggctgcttccgatgattcctctcactatttcaccgagtttaccttgtctgagattgtagacatggagaatctgtataaggagctcggtgaccaatctctccacaaagatttctgtcaaactgttgcctctacttttagttgttctgtgaatcggaatggcaaatcctctataacctggaaacaggtacagatttggttccaggagaagctgaagcatcaaagccaaccaaaatccaaaactttgccatctccccctttgcagattcatgacttatctaatcccagttcttatgcttcaaatgcctcaaatgctacctttgttgggaattctacctttgttcaaacacgaaaaggcaaggcctctgatttagctgatctggcttttgaggctaaatcagcgcgggactacgcgtggtatgacgtgtcttcgttccttacttatagagttcttcgcactggtgaactggaagtgcgtgtacggttttctgggttcgacaaccgacacgatgagtgggtaaacgtcaaaacatcagtgcgtgagcggtctattcctgtagaaccatcagagtgtgggagagtgaacgttggagacctgcttctatgtttccaagaaagagaggatcaagcactctactgtgatggtcatgttttgaatatcaagagagggattcatgatcacgcgagatgtaactgcgtgtttcttgttcgctacgagcttgacaatacagaggaatcgctgggactagaaagaatttgccgccgccctgaagagtaa

SEQ ID NO: 69550 - protein, 258 aa, Arabidopsis thaliana
  peptide (1)..(258): Ceres Seq. ID no. 1818333
  misc_feature (1)..(258): Homolog of NCBI NO: 25402795 NR Description: protein F9L1.16 [imported] - Arabidopsis thaliana
  misc_feature (22)..(258): Homolog of NCBI NO: 30684244 NR Description: expressed protein [Arabidopsis thaliana]
  misc_feature (22)..(244): Homolog of NCBI NO: 30684237 NR Description: expressed protein [Arabidopsis thaliana] unknown protein [Arabidopsis thaliana]
  misc_feature (14)..(257): Homolog of NCBI NO: 22331151 NR Description: unknown protein; protein id: At3g18380.1, by cDNA: gi_20260285 [Arabidopsis thaliana] unknown protein [Arabidopsis thaliana]
  misc_feature (18)..(257): Homolog of NCBI NO: 11994101 NR Description: gb|AAD39678.1~gene_id:MYF24.10~similar to unknown
MAASDDSSHYFTEFTLSEIVDMENLYKELGDQSLHKDFCQTVASTFSCSVNRNGKSSITWKQVQIWFQEKLKHQSQPKSKTLPSPPLQIHDLSNPSSYASNASNATFVGNSTFVQTRKGKASDLADLAFEAKSARDYAWYDVSSFLTYRVLRTGELEVRVRFSGFDNRHDEWVNVKTSVRERSIPVEPSECGRVNVGDLLLCFQEREDQALYCDGHVLNIKRGIHDHARCNCVFLVRYELDNTEESLGLERICRRPEE

SEQ ID NO: 69551 - protein, 237 aa, Arabidopsis thaliana
  peptide (1)..(237): Ceres Seq. ID no. 1818334
  misc_feature (1)..(237): Homolog of NCBI NO: 25402795 NR Description: protein F9L1.16 [imported] - Arabidopsis thaliana
  misc_feature (1)..(237): Homolog of NCBI NO: 30684244 NR Description: expressed protein [Arabidopsis thaliana]
  misc_feature (1)..(223): Homolog of NCBI NO: 30684237 NR Description: expressed protein [Arabidopsis thaliana] unknown protein [Arabidopsis thaliana]
  misc_feature (1)..(236): Homolog of NCBI NO: 22331151 NR Description: unknown protein; protein id: At3g18380.1, by cDNA: gi_20260285 [Arabidopsis thaliana] unknown protein [Arabidopsis thaliana]
  misc_feature (1)..(236): Homolog of NCBI NO: 11994101 NR Description: gb|AAD39678.1~gene_id:MYF24.10~similar to unknown
MENLYKELGDQSLHKDFCQTVASTFSCSVNRNGKSSITWKQVQIWFQEKLKHQSQPKSKTLPSPPLQIHDLSNPSSYASNASNATFVGNSTFVQTRKGKASDLADLAFEAKSARDYAWYDVSSFLTYRVLRTGELEVRVRFSGFDNRHDEWVNVKTSVRERSIPVEPSECGRVNVGDLLLCFQEREDQALYCDGHVLNIKRGIHDHARCNCVFLVRYELDNTEESLGLERICRRPEE

SEQ ID NO: 69552 - DNA, 1353 bp, Arabidopsis thaliana
  misc_feature (1)..(1353): Ceres Seq. ID no. 1818450
  misc_feature: MA Experiment ID: 20000307 Result: Up-regulated in Transcription
  misc_feature: MA Experiment 20000307 PARAMETER Experiment Name: At_Germinating_Seeds_Sub_P Parameter: Age (hr) Value: 24 vs. 0
  misc_feature: MA Experiment 20000307 PARAMETER Experiment Name: At_Germinating_Seeds_Sub_P Parameter: Organism Value: A. thaliana
  misc_feature: MA Experiment 20000307 PARAMETER Experiment Name: At_Germinating_Seeds_Sub_P Parameter: Plant Line Value: WS
  misc_feature: MA Experiment 20000307 PARAMETER Experiment Name: At_Germinating_Seeds_Sub_P Parameter: Tissue Value: Germinating Seeds
  misc_feature: MA Experiment ID: 20000327 Result: Down-regulated in Transcription
  misc_feature: MA Experiment 20000327 PARAMETER Experiment Name: At_42deg_Heat_Sub_P Parameter: Age (day) Value: 14
  misc_feature: MA Experiment 20000327 PARAMETER Experiment Name: At_42deg_Heat_Sub_P Parameter: Organism Value: A. thaliana
  misc_feature: MA Experiment 20000327 PARAMETER Experiment Name: At_42deg_Heat_Sub_P Parameter: Plant Line Value: WS
  misc_feature: MA Experiment 20000327 PARAMETER Experiment Name: At_42deg_Heat_Sub_P Parameter: Temperature (deg C) Value: 42 vs. 22
  misc_feature: MA Experiment 20000327 PARAMETER Experiment Name: At_42deg_Heat_Sub_P Parameter: Timepoint (hr) Value: 1
  misc_feature: MA Experiment 20000327 PARAMETER Experiment Name: At_42deg_Heat_Sub_P Parameter: Tissue Value: Aerial
  misc_feature: MA Experiment ID: 20000328 Result: Down-regulated in Transcription
  misc_feature: MA Experiment 20000328 PARAMETER Experiment Name: At_42deg_Heat_Sub_P Parameter: Age (day) Value: 14
  misc_feature: MA Experiment 20000328 PARAMETER Experiment Name: At_42deg_Heat_Sub_P Parameter: Organism Value: A. thaliana
  misc_feature: MA Experiment 20000328 PARAMETER Experiment Name: At_42deg_Heat_Sub_P Parameter: Plant Line Value: WS
  misc_feature: MA Experiment 20000328 PARAMETER Experiment Name: At_42deg_Heat_Sub_P Parameter: Temperature (deg C) Value: 42 vs. 22
  misc_feature: MA Experiment 20000328 PARAMETER Experiment Name: At_42deg_Heat_Sub_P Parameter: Timepoint (hr) Value: 6
  misc_feature: MA Experiment 20000328 PARAMETER Experiment Name: At_42deg_Heat_Sub_P Parameter: Tissue Value: Aerial
  misc_feature: MA Experiment ID: 20000329 Result: Down-regulated in Transcription
  misc_feature: MA Experiment 20000329 PARAMETER Experiment Name: At_4deg_Cold_Sub_P Parameter: Age (day) Value: 14
  misc_feature: MA Experiment 20000329 PARAMETER Experiment Name: At_4deg_Cold_Sub_P Parameter: Organism Value: A. thaliana
  misc_feature: MA Experiment 20000329 PARAMETER Experiment Name: At_4deg_Cold_Sub_P Parameter: Plant Line Value: WS
  misc_feature: MA Experiment 20000329 PARAMETER Experiment Name: At_4deg_Cold_Sub_P Parameter: Temperature (deg C) Value: 4 vs. 22
  misc_feature: MA Experiment 20000329 PARAMETER Experiment Name: At_4deg_Cold_Sub_P Parameter: Timepoint (hr) Value: 6
  misc_feature: MA Experiment 20000329 PARAMETER Experiment Name: At_4deg_Cold_Sub_P Parameter: Tissue Value: Aerial
  misc_feature: MA Experiment ID: 20000332 Result: Down-regulated in Transcription
  misc_feature: MA Experiment 20000332 PARAMETER Experiment Name: At_4deg_Cold_Sub_P Parameter: Age (day) Value: 14
  misc_feature: MA Experiment 20000332 PARAMETER Experiment Name: At_4deg_Cold_Sub_P Parameter: Organism Value: A. thaliana
  misc_feature: MA Experiment 20000332 PARAMETER Experiment Name: At_4deg_Cold_Sub_P Parameter: Plant Line Value: WS
  misc_feature: MA Experiment 20000332 PARAMETER Experiment Name: At_4deg_Cold_Sub_P Parameter: Temperature (deg C) Value: 4 vs. 22
  misc_feature: MA Experiment 20000332 PARAMETER Experiment Name: At_4deg_Cold_Sub_P Parameter: Timepoint (hr) Value: 2
  misc_feature: MA Experiment 20000332 PARAMETER Experiment Name: At_4deg_Cold_Sub_P Parameter: Tissue Value: Aerial
  misc_feature: MA Experiment ID: 20000347 Result: Down-regulated in Transcription
  misc_feature: MA Experiment 20000347 PARAMETER Experiment Name: At_2mM_SA_Sub_P Parameter: Age (day) Value: 14
  misc_feature: MA Experiment 20000347 PARAMETER Experiment Name: At_2mM_SA_Sub_P Parameter: Organism Value: A. thaliana
  misc_feature: MA Experiment 20000347 PARAMETER Experiment Name: At_2mM_SA_Sub_P Parameter: Plant Line Value: WS
  misc_feature: MA Experiment 20000347 PARAMETER Experiment Name: At_2mM_SA_Sub_P Parameter: Timepoint (hr) Value: 6
  misc_feature: MA Experiment 20000347 PARAMETER Experiment Name: At_2mM_SA_Sub_P Parameter: Tissue Value: Aerial
  misc_feature: MA Experiment 20000347 PARAMETER Experiment Name: At_2mM_SA_Sub_P Parameter: Treatment Value: 2mM SA vs. No Treatment
atgtctatattcaatcctgattcaatcaacaacgagctatcgaaaccaacatcgatctttggtctaaagctttgggtcgtcatcggaattttactaggatctcttatagtcatcgctctcttctttctctccctctgtttaacctctcgccggagaaaccgtaagccacgtcacgccgatttcgcatccgcagccgtagcaacgccgccgatttcaaaggagattcaggagatcgttagacctcctgcgcaagaccattgccatccgacgcagcccgttgcggcggagattcaagtggatatagggaagaccgagcaccgtgttgtgttctcggatcgagtctcgagtggtgaaagcagaggaacggttagtgaaacggcgtcgtattcagggagtggttgtgttggacctgaggtttcgcatcttggttggggaagatggtatactcttagagagcttgaagcagctactaatggattgtgtgaagagaatgtgatcggagaaggaggttatgggattgtttatagtgggattttaactgatggaactaaagtcgctgtcaagaatctgcttaacaacaggggtcaagctgagaaggagtttagagtggaagtggaagctatcgggcgtgtaaggcataagaatctcgttaggctattaggatactgcgtcgaaggagcatacaggatgctcgtgtatgactacgtcgataatggcaacttggagcaatggattcatggggatgttggtgataaaagtccgttgacttgggatattcgtatgaacataatactttgcatggcgaaaggattggcctatctgcatgagggtcttgaaccgaaagtcgttcatcgggacataaaatctagtaatattttgcttgatcgtcaatggaatgctaaggtatcagattttggacttgctaagctcttgttctccgagagcagctacgtgacaacccgagtaatgggaacttttggatatgttgcgcctgagtatgcttgcaccggaatgttgacagaaaagagtgatatctatagttttgggatattaatcatggagataatcaccggaagaaatcctgtcgattatagtcgacctcaaggagaggtgaatttggttgagtggctgaaaacaatggttggaaaccgaaggtctgaggaagtagtcgatccaaaaatacccgaaccgcccacttcaaaagctcttaaacgcgtgttgctcgtcgcgctgcgttgtgtggatccggacgcgaataagagacctaaaatgggtcatattatacacatgcttgaagctgaagacttgttctatcgtgacgtaagtcttataatcgtattaatgaacatttga

SEQ ID NO: 69553 - protein, 450 aa, Arabidopsis thaliana
  peptide (1)..(450): Ceres Seq. ID no. 1818451
  misc_feature (160)..(431): Pfam Name: Protein kinase domain Pfam Description: Protein kinase domain
  misc_feature (1)..(450): Homolog of NCBI NO: 15234142 NR Description: putative protein kinase; protein id: At4g01330.1
  misc_feature (1)..(440): Homolog of NCBI NO: 14194119 NR Description: At1g01540/F22L4_6 [Arabidopsis thaliana]
  misc_feature (1)..(440): Homolog of NCBI NO: 15223428 NR Description: protein serine/threonine kinase, putative; id: At1g01540.1, supported by cDNA: gi_12083265, supported by gi_14194118, supported by cDNA: gi_20334727 [Arabidopsis
  misc_feature (1)..(371): Homolog of NCBI NO: 30678150 NR Description: protein kinase family [Arabidopsis thaliana]
  misc_feature (8)..(440): Homolog of NCBI NO: 15235432 NR Description: putative serine/threonine protein kinase; protein At4g02630.1 [Arabidopsis thaliana] >gi|7488204|pir||T01086
  misc_feature (63)..(440): Homolog of NCBI NO: 34897534 NR Description: OSJNBa0042L16.4 [Oryza sativa (japonica
  misc_feature (10)..(92): Homolog of NCBI NO: 34897534 NR Description: OSJNBa0042L16.4 [Oryza sativa (japonica
  misc_feature (73)..(441): Homolog of NCBI NO: 37535714 NR Description: putative kinase [Oryza sativa (japonica
  misc_feature (7)..(75): Homolog of NCBI NO: 37535714 NR Description: putative kinase [Oryza sativa (japonica
  misc_feature (1)..(443): Homolog of NCBI NO: 7488207 NR Description: probable serine/threonine-specific protein kinase
MSIFNPDSINNELSKPTSIFGLKLWVVIGILLGSLIVIALFFLSLCLTSRRRNRKPRHADFASAAVATPPISKEIQEIVRPPAQDHCHPTQPVAAEIQVDIGKTEHRVVFSDRVSSGESRGTVSETASYSGSGCVGPEVSHLGWGRWYTLRELEAATNGLCEENVIGEGGYGIVYSGILTDGTKVAVKNLLNNRGQAEKEFRVEVEAIGRVRHKNLVRLLGYCVEGAYRMLVYDYVDNGNLEQWIHGDVGDKSPLTWDIRMNIILCMAKGLAYLHEGLEPKVVHRDIKSSNILLDRQWNAKVSDFGLAKLLFSESSYVTTRVMGTFGYVAPEYACTGMLTEKSDIYSFGILIMEIITGRNPVDYSRPQGEVNLVEWLKTMVGNRRSEEVVDPKIPEPPTSKALKRVLLVALRCVDPDANKRPKMGHIIHMLEAEDLFYRDVSLIIVLMNI

SEQ ID NO: 69554 - DNA, 2358 bp, Arabidopsis thaliana
  misc_feature (1)..(2358): Ceres Seq. ID no. 1818571
  misc_feature: MA Experiment ID: 20000180 Result: Up-regulated in Transcription
  misc_feature: MA Experiment 20000180 PARAMETER Experiment Name: At_Germinating_Seeds_P Parameter: Age (hr) Value: 24 vs. 0
  misc_feature: MA Experiment 20000180 PARAMETER Experiment Name: At_Germinating_Seeds_P Parameter: Tissue Value: Germinating Seeds
  misc_feature: MA Experiment ID: 20000185 Result: Down-regulated in Transcription
  misc_feature: MA Experiment 20000185 PARAMETER Experiment Name: At_Roots__P Parameter: Age (day) Value: 7 vs. 21
  misc_feature: MA Experiment 20000185 PARAMETER Experiment Name: At_Roots__P Parameter: Organism Value: A. thaliana
  misc_feature: MA Experiment 20000185 PARAMETER Experiment Name: At_Roots__P Parameter: Tissue Value: Roots vs. Whole Plant
  misc_feature: MA Experiment ID: 20000234 Result: Down-regulated in Transcription
  misc_feature: MA Experiment 20000234 PARAMETER Experiment Name: At_Siliques_P Parameter: Age (day) Value: 21
  misc_feature: MA Experiment 20000234 PARAMETER Experiment Name: At_Siliques_P Parameter: Organism Value: A. thaliana
  misc_feature: MA Experiment 20000234 PARAMETER Experiment Name: At_Siliques_P Parameter: Plant Line Value: WS
  misc_feature: MA Experiment 20000234 PARAMETER Experiment Name: At_Siliques_P Parameter: Tissue Value: Less Than 5mm Siliques vs. Whole Plant
  misc_feature: MA Experiment ID: 20000264 Result: Down-regulated in Transcription
  misc_feature: MA Experiment 20000264 PARAMETER Experiment Name: At_Open_Flower_P Parameter: Age (day) Value: 21
  misc_feature: MA Experiment 20000264 PARAMETER Experiment Name: At_Open_Flower_P Parameter: Plant Line Value: WS
  misc_feature: MA Experiment 20000264 PARAMETER Experiment Name: At_Open_Flower_P Parameter: Tissue Value: Open Flower vs. Whole Plant
  misc_feature: MA Experiment ID: 20000265 Result: Down-regulated in Transcription
  misc_feature: MA Experiment 20000265 PARAMETER Experiment Name: At_Open_Flower_P Parameter: Age (day) Value: 21
  misc_feature: MA Experiment 20000265 PARAMETER Experiment Name: At_Open_Flower_P Parameter: Plant Line Value: WS
  misc_feature: MA Experiment 20000265 PARAMETER Experiment Name: At_Open_Flower_P Parameter: Tissue Value: Closed Flower vs. Whole Plant
  misc_feature: MA Experiment ID: 20000438 Result: Down-regulated in Transcription
  misc_feature: MA Experiment 20000438 PARAMETER Experiment Name: At_Shoots__P Parameter: Age (day) Value: 14
  misc_feature: MA Experiment 20000438 PARAMETER Experiment Name: At_Shoots__P Parameter: Tissue Value: Shoots vs. Whole Plant
  misc_feature: MA Experiment ID: 20000439 Result: Down-regulated in Transcription
  misc_feature: MA Experiment 20000439 PARAMETER Experiment Name: At_Roots__P Parameter: Age (day) Value: 14 vs. 21
  misc_feature: MA Experiment 20000439 PARAMETER Experiment Name: At_Roots__P Parameter: Organism Value: A. thaliana
  misc_feature: MA Experiment 20000439 PARAMETER Experiment Name: At_Roots__P Parameter: Tissue Value: Roots vs. Whole Plant
  misc_feature: MA Experiment ID: 20000495 Result: Down-regulated in Transcription
  misc_feature: MA Experiment 20000495 PARAMETER Experiment Name: At_Guard_Cells_P Parameter: Harvest Date Value: 8/2/2002
  misc_feature: MA Experiment 20000495 PARAMETER Experiment Name: At_Guard_Cells_P Parameter: Organism Value: A. thaliana
  misc_feature: MA Experiment 20000495 PARAMETER Experiment Name: At_Guard_Cells_P Parameter: Tissue Value: Guard Cells vs. Leaves
  misc_feature: MA Experiment ID: 20000794 Result: Down-regulated in Transcription
  misc_feature: MA Experiment 20000794 PARAMETER Experiment Name: At_Petals_P Parameter: Age (day) Value: 23-25 days
  misc_feature: MA Experiment 20000794 PARAMETER Experiment Name: At_Petals_P Parameter: Plant Line Value: WS
  misc_feature: MA Experiment 20000794 PARAMETER Experiment Name: At_Petals_P Parameter: Tissue Value: Petals vs. Whole plant
  misc_feature: MA Experiment ID: 20001247 Result: Up-regulated in Transcription
  misc_feature: MA Experiment 20001247 PARAMETER Experiment Name: At_Far-red-induction_P Parameter: Age (day) Value: 7
  misc_feature: MA Experiment 20001247 PARAMETER Experiment Name: At_Far-red-induction_P Parameter: Light Value: Far-red vs. White
  misc_feature: MA Experiment 20001247 PARAMETER Experiment Name: At_Far-red-induction_P Parameter: Organism Value: A. thaliana
  misc_feature: MA Experiment 20001247 PARAMETER Experiment Name: At_Far-red-induction_P Parameter: Plant Line Value: Columbia
  misc_feature: MA Experiment 20001247 PARAMETER Experiment Name: At_Far-red-induction_P Parameter: Timepoint (hr) Value: 1
  misc_feature: MA Experiment 20001247 PARAMETER Experiment Name: At_Far-red-induction_P Parameter: Tissue Value: Whole Plant
  misc_feature: MA Experiment ID: 20001451 Result: Down-regulated in Transcription
  misc_feature: MA Experiment 20001451 PARAMETER Experiment Name: At_Far-red-induction_P Parameter: Age (day) Value: 7
  misc_feature: MA Experiment 20001451 PARAMETER Experiment Name: At_Far-red-induction_P Parameter: Light Value: Far-red vs. White
  misc_feature: MA Experiment 20001451 PARAMETER Experiment Name: At_Far-red-induction_P Parameter: Organism Value: A. thaliana
  misc_feature: MA Experiment 20001451 PARAMETER Experiment Name: At_Far-red-induction_P Parameter: Plant Line Value: Columbia
  misc_feature: MA Experiment 20001451 PARAMETER Experiment Name: At_Far-red-induction_P Parameter: Timepoint (hr) Value: 24
  misc_feature: MA Experiment 20001451 PARAMETER Experiment Name: At_Far-red-induction_P Parameter: Tissue Value: Whole Plant
  misc_feature: MA Experiment ID: 20001554 Result: Down-regulated in Transcription
  misc_feature: MA Experiment 20001554 PARAMETER Experiment Name: At_Drought_Soil_Dry_P Parameter: Age (day) Value: 21
  misc_feature: MA Experiment 20001554 PARAMETER Experiment Name: At_Drought_Soil_Dry_P Parameter: Organism Value: A. thaliana
  misc_feature: MA Experiment 20001554 PARAMETER Experiment Name: At_Drought_Soil_Dry_P Parameter: Plant Line Value: WS
  misc_feature: MA Experiment 20001554 PARAMETER Experiment Name: At_Drought_Soil_Dry_P Parameter: Post Timepoint (hr) Value: None
  misc_feature: MA Experiment 20001554 PARAMETER Experiment Name: At_Drought_Soil_Dry_P Parameter: Post-Treatment Value: None
  misc_feature: MA Experiment 20001554 PARAMETER Experiment Name: At_Drought_Soil_Dry_P Parameter: Timepoint (day) Value: 7
  misc_feature: MA Experiment 20001554 PARAMETER Experiment Name: At_Drought_Soil_Dry_P Parameter: Treatment Value: Drought vs. No Drought
  misc_feature: MA Experiment ID: 20001555 Result: Down-regulated in Transcription
  misc_feature: MA Experiment 20001555 PARAMETER Experiment Name: At_Drought_Soil_Dry_P Parameter: Age (day) Value: 24
  misc_feature: MA Experiment 20001555 PARAMETER Experiment Name: At_Drought_Soil_Dry_P Parameter: Organism Value: A. thaliana
  misc_feature: MA Experiment 20001555 PARAMETER Experiment Name: At_Drought_Soil_Dry_P Parameter: Plant Line Value: WS
  misc_feature: MA Experiment 20001555 PARAMETER Experiment Name: At_Drought_Soil_Dry_P Parameter: Post Timepoint (hr) Value: None
  misc_feature: MA Experiment 20001555 PARAMETER Experiment Name: At_Drought_Soil_Dry_P Parameter: Post-Treatment Value: None
  misc_feature: MA Experiment 20001555 PARAMETER Experiment Name: At_Drought_Soil_Dry_P Parameter: Timepoint (day) Value: 10
  misc_feature: MA Experiment 20001555 PARAMETER Experiment Name: At_Drought_Soil_Dry_P Parameter: Treatment Value: Drought vs. No Drought
  misc_feature: MA Experiment ID: 20001556 Result: Down-regulated in Transcription
  misc_feature: MA Experiment 20001556 PARAMETER Experiment Name: At_Drought_Soil_Dry_P Parameter: Age (day) Value: 26
  misc_feature: MA Experiment 20001556 PARAMETER Experiment Name: At_Drought_Soil_Dry_P Parameter: Organism Value: A. thaliana
  misc_feature: MA Experiment 20001556 PARAMETER Experiment Name: At_Drought_Soil_Dry_P Parameter: Plant Line Value: WS
  misc_feature: MA Experiment 20001556 PARAMETER Experiment Name: At_Drought_Soil_Dry_P Parameter: Post Timepoint (hr) Value: None
  misc_feature: MA Experiment 20001556 PARAMETER Experiment Name: At_Drought_Soil_Dry_P Parameter: Post-Treatment Value: None
  misc_feature: MA Experiment 20001556 PARAMETER Experiment Name: At_Drought_Soil_Dry_P Parameter: Timepoint (day) Value: 12
  misc_feature: MA Experiment 20001556 PARAMETER Experiment Name: At_Drought_Soil_Dry_P Parameter: Treatment Value: Drought vs. No Drought
  misc_feature: MA Experiment ID: 20001904 Result: Down-regulated in Transcription
  misc_feature: MA Experiment 20001904 PARAMETER Experiment Name: At_Drought_Reproduction_P Parameter: Age (day) Value: 37
  misc_feature: MA Experiment 20001904 PARAMETER Experiment Name: At_Drought_Reproduction_P Parameter: Organism Value: A. thaliana
  misc_feature: MA Experiment 20001904 PARAMETER Experiment Name: At_Drought_Reproduction_P Parameter: Plant Line Value: WS
  misc_feature: MA Experiment 20001904 PARAMETER Experiment Name: At_Drought_Reproduction_P Parameter: Timepoint (day) Value: 7
  misc_feature: MA Experiment 20001904 PARAMETER Experiment Name: At_Drought_Reproduction_P Parameter: Tissue Value: Rosettes
  misc_feature: MA Experiment 20001904 PARAMETER Experiment Name: At_Drought_Reproduction_P Parameter: Treatment Value: Drought vs. No Drought
  misc_feature: MA Experiment ID: 20001906 Result: Down-regulated in Transcription
  misc_feature: MA Experiment 20001906 PARAMETER Experiment Name: At_Drought_Reproduction_P Parameter: Age (day) Value: 35
  misc_feature: MA Experiment 20001906 PARAMETER Experiment Name: At_Drought_Reproduction_P Parameter: Organism Value: A. thaliana
  misc_feature: MA Experiment 20001906 PARAMETER Experiment Name: At_Drought_Reproduction_P Parameter: Plant Line Value: WS
  misc_feature: MA Experiment 20001906 PARAMETER Experiment Name: At_Drought_Reproduction_P Parameter: Timepoint (day) Value: 5
  misc_feature: MA Experiment 20001906 PARAMETER Experiment Name: At_Drought_Reproduction_P Parameter: Tissue Value: Siliques
  misc_feature: MA Experiment 20001906 PARAMETER Experiment Name: At_Drought_Reproduction_P Parameter: Treatment Value: Drought vs. No Drought
atgggagatcaaaaaacactttcttacgacaaatctaataaacccttttattcttcttcttcatctccatgttccttcacagccatcgtcgtcttcttgatcttcgtctcatatctcttatactcattcagtttcatctcttttctaaacccatattcaccttctaaatcccccaattctctcctcgtacccgttatccgtctcgggtcgggtcaaacacctgaggaacaaacggagctcaaacacatagtcttcggaatcgccgcgtcttcagatctatggaagcatcgtagagaatacgtgaaaacatggtggaaacctaacggagtcatgaacggcgccgtttggctcgacaaacccatcaacgacaccgtttcttcttcatcagctttgcctcagatcagaatctcttccgacacgtcgagtttcaagtaccgttaccgtaacggtcacagatcagcgatcaggatcacgagaatcgtgtccgagacggtgaggatgttaaacggaacggaagcggagagaaacgtgaggtgggttgtgatgggtgacgacgataccgtgtttttcacggaaaatcttgttagggttttgagaaagtacgatcataaacagttttattacatcggagctccgtccgagagtcatttgcagaatcttcatcagttttcttatggaatggcgtacggtggaggagggtttgctataagttatccattagccaaggttttggagaagatgcaagatcggtgtatcgagagatactccgatttgtacggatccgatgatcggattcatgcttgtatggctgagcttggtgttcctctcactaaagaagttggattccatcagtttgatgtatacgggaatctcttagggctattatctgtccatccacaagcaccaatagtatcaatccatcacctagacgtagtggatcctatattcccaaaaacaaaccgagtcaacgcattaaagaagctaatgatcccagcgaaactcgattcagcgagtcttgtccaacaatcggtatgctatgataagagtcatcagtggacaatgtcaatctcgtggggatacacagttcaaatcacgcgtacgtatatgccagcaaggatgatggaagtgcctactcgcacttttaatgattggcacttacgtagcgatttcactaatcttgcattcaacacacgtccggtaacatggacggattgtcagcgtcctcgtgtgttttatttctctcatgcgtttagtaactcttcttcttctgatacaacgacgattagccaatacttgaggcacgacgaatggtatcctaaatgtgaatggggaatcgcggatccttccgagatcaatcagatatttgtctacaaaaagcctactccggataggtggagcaaggttgttattaggtttgttcctagtaaagattcgaactttgcattcgttaatgctattgaagttatctctgcgcctaaggatttgattggtgacgttgcaacctctgtatctcatgatgggactgagaaattcaatggtttagctaaacaagcaatggaggttgtgtatagagtcaatgttggtggtagaaaagttactccttttaatgacacattgtggaggacttgggttactgatgaaggattcttgaaaaccggtgatgggtcgtctgagaaaagttacttcaccgggaggattaagtataggcgtggaggggcgagtcgtgaagttggtcctgataatgtttacaacactgctcgtgttggtaaaagaagcaatggattggttgatatgagttggggtttcaaggtgaatgtgggttacaagtatctcatccggatgcatttctgtgacatagctagcaaatctctcggcaggctttatttcaatgtctacattaacgggaacttggcgtatgaagatttcgatatctcatacgctgcggataatgtccttgcttctccgtattacattgatttcgtggtggatgctactgctgatgacaacaacccttcaggatcgtcgataaccgttagtgttggaccatcaaacaagactagtgttgatggaaatggagtggatgcgatattgaacggtgttgagatcatgaagatgaataactcgatgggtagtcttgatgggtatgtttcaacagagatgattctgagtacttgcccaaataggagaaacctgagcatatttatcgcaatgttggcgtttatgtgtatatttatgagcttctacattgtgactcaaagaaagagagttaaggatcagtatggctggacaaagctgtccatggacgtgcttgaagataattccaagtcagggaatcaatttacagcaagaaaggcttga

SEQ ID NO: 69555 - protein, 785 aa, Arabidopsis thaliana
  peptide (1)..(785): Ceres Seq. ID no. 1818572
  misc_feature (219)..(474): Pfam Name: Protein of unknown function, DUF604 Pfam Description: Protein of unknown function, DUF604
  misc_feature (3)..(467): Homolog of NCBI NO: 25336194 NR Description: F22L4.11 protein - Arabidopsis thaliana Contains similarity to a hypothetical protein F16G20.190
  misc_feature (30)..(467): Homolog of NCBI NO: 15223433 NR Description: hypothetical protein; protein id: At1g01570.1
  misc_feature (75)..(484): Homolog of NCBI NO: 18416156 NR Description: Expressed protein; protein id: At4g23490.1, by cDNA: gi_15529152 [Arabidopsis thaliana]
  misc_feature (74)..(467): Homolog of NCBI NO: 15238082 NR Description: putative protein; protein id: At5g41460.1 thaliana] >gi|9758054|dbj|BAB08517.1|
  misc_feature (75)..(484): Homolog of NCBI NO: 15529153 NR Description: AT4g23490/F16G20_190 [Arabidopsis thaliana]
  misc_feature (202)..(484): Homolog of NCBI NO: 15233347 NR Description: putative protein; protein id: At4g11350.1
  misc_feature (2)..(194): Homolog of NCBI NO: 15233347 NR Description: putative protein; protein id: At4g11350.1
  misc_feature (202)..(468): Homolog of NCBI NO: 7485555 NR Description: hypothetical protein F16G20.190 - Arabidopsis >gi|3451074|emb|CAA20470.1| putative protein [Arabidopsis >gi|7269197|emb|CAB79304.1| putative protein [Arabidopsis
  misc_feature (75)..(194): Homolog of NCBI NO: 7485555 NR Description: hypothetical protein F16G20.190 - Arabidopsis >gi|3451074|emb|CAA20470.1| putative protein [Arabidopsis >gi|7269197|emb|CAB79304.1| putative protein [Arabidopsis
  misc_feature (15)..(467): Homolog of NCBI NO: 37536418 NR Description: hypothetical protein [Oryza sativa (japonica group)] >gi|22002140|gb|AAM88624.1| hypothetical protein [Oryza
MGDQKTLSYDKSNKPFYSSSSSPCSFTAIVVFLIFVSYLLYSFSFISFLNPYSPSKSPNSLLVPVIRLGSGQTPEEQTELKHIVFGIAASSDLWKHRREYVKTWWKPNGVMNGAVWLDKPINDTVSSSSALPQIRISSDTSSFKYRYRNGHRSAIRITRIVSETVRMLNGTEAERNVRWVVMGDDDTVFFTENLVRVLRKYDHKQFYYIGAPSESHLQNLHQFSYGMAYGGGGFAISYPLAKVLEKMQDRCIERYSDLYGSDDRIHACMAELGVPLTKEVGFHQFDVYGNLLGLLSVHPQAPIVSIHHLDVVDPIFPKTNRVNALKKLMIPAKLDSASLVQQSVCYDKSHQWTMSISWGYTVQITRTYMPARMMEVPTRTFNDWHLRSDFTNLAFNTRPVTWTDCQRPRVFYFSHAFSNSSSSDTTTISQYLRHDEWYPKCEWGIADPSEINQIFVYKKPTPDRWSKVVIRFVPSKDSNFAFVNAIEVISAPKDLIGDVATSVSHDGTEKFNGLAKQAMEVVYRVNVGGRKVTPFNDTLWRTWVTDEGFLKTGDGSSEKSYFTGRIKYRRGGASREVGPDNVYNTARVGKRSNGLVDMSWGFKVNVGYKYLIRMHFCDIASKSLGRLYFNVYINGNLAYEDFDISYAADNVLASPYYIDFVVDATADDNNPSGSSITVSVGPSNKTSVDGNGVDAILNGVEIMKMNNSMGSLDGYVSTEMILSTCPNRRNLSIFIAMLAFMCIFMSFYIVTQRKRVKDQYGWTKLSMDVLEDNSKSGNQFTARKA

SEQ ID NO: 69556 - protein, 675 aa, Arabidopsis thaliana
  peptide (1)..(675): Ceres Seq. ID no. 1818573
  misc_feature (109)..(364): Pfam Name: Protein of unknown function, DUF604 Pfam Description: Protein of unknown function, DUF604
  misc_feature (92)..(374): Homolog of NCBI NO: 15233347 NR Description: putative protein; protein id: At4g11350.1
  misc_feature (1)..(84): Homolog of NCBI NO: 15233347 NR Description: putative protein; protein id: At4g11350.1
  misc_feature (92)..(358): Homolog of NCBI NO: 7485555 NR Description: hypothetical protein F16G20.190 - Arabidopsis >gi|3451074|emb|CAA20470.1| putative protein [Arabidopsis >gi|7269197|emb|CAB79304.1| putative protein [Arabidopsis
  misc_feature (1)..(357): Homolog of NCBI NO: 15223433 NR Description: hypothetical protein; protein id: At1g01570.1
  misc_feature (1)..(357): Homolog of NCBI NO: 15238082 NR Description: putative protein; protein id: At5g41460.1 thaliana] >gi|9758054|dbj|BAB08517.1|
  misc_feature (1)..(374): Homolog of NCBI NO: 15529153 NR Description: AT4g23490/F16G20_190 [Arabidopsis thaliana]
  misc_feature (1)..(374): Homolog of NCBI NO: 18416156 NR Description: Expressed protein; protein id: At4g23490.1, by cDNA: gi_15529152 [Arabidopsis thaliana]
  misc_feature (1)..(357): Homolog of NCBI NO: 25336194 NR Description: F22L4.11 protein - Arabidopsis thaliana Contains similarity to a hypothetical protein F16G20.190
  misc_feature (1)..(84): Homolog of NCBI NO: 7485555 NR Description: hypothetical protein F16G20.190 - Arabidopsis >gi|3451074|emb|CAA20470.1| putative protein [Arabidopsis >gi|7269197|emb|CAB79304.1| putative protein [Arabidopsis
  misc_feature (1)..(357): Homolog of NCBI NO: 37536418 NR Description: hypothetical protein [Oryza sativa (japonica group)] >gi|22002140|gb|AAM88624.1| hypothetical protein [Oryza
MNGAVWLDKPINDTVSSSSALPQIRISSDTSSFKYRYRNGHRSAIRITRIVSETVRMLNGTEAERNVRWVVMGDDDTVFFTENLVRVLRKYDHKQFYYIGAPSESHLQNLHQFSYGMAYGGGGFAISYPLAKVLEKMQDRCIERYSDLYGSDDRIHACMAELGVPLTKEVGFHQFDVYGNLLGLLSVHPQAPIVSIHHLDVVDPIFPKTNRVNALKKLMIPAKLDSASLVQQSVCYDKSHQWTMSISWGYTVQITRTYMPARMMEVPTRTFNDWHLRSDFTNLAFNTRPVTWTDCQRPRVFYFSHAFSNSSSSDTTTISQYLRHDEWYPKCEWGIADPSEINQIFVYKKPTPDRWSKVVIRFVPSKDSNFAFVNAIEVISAPKDLIGDVATSVSHDGTEKFNGLAKQAMEVVYRVNVGGRKVTPFNDTLWRTWVTDEGFLKTGDGSSEKSYFTGRIKYRRGGASREVGPDNVYNTARVGKRSNGLVDMSWGFKVNVGYKYLIRMHFCDIASKSLGRLYFNVYINGNLAYEDFDISYAADNVLASPYYIDFVVDATADDNNPSGSSITVSVGPSNKTSVDGNGVDAILNGVEIMKMNNSMGSLDGYVSTEMILSTCPNRRNLSIFIAMLAFMCIFMSFYIVTQRKRVKDQYGWTKLSMDVLEDNSKSGNQFTARKA

SEQ ID NO: 69557 - protein, 619 aa, Arabidopsis thaliana
  peptide (1)..(619): Ceres Seq. ID no. 1818574
  misc_feature (53)..(308): Pfam Name: Protein of unknown function, DUF604 Pfam Description: Protein of unknown function, DUF604
  misc_feature (1)..(301): Homolog of NCBI NO: 25336194 NR Description: F22L4.11 protein - Arabidopsis thaliana Contains similarity to a hypothetical protein F16G20.190
  misc_feature (1)..(301): Homolog of NCBI NO: 15223433 NR Description: hypothetical protein; protein id: At1g01570.1
  misc_feature (1)..(318): Homolog of NCBI NO: 18416156 NR Description: Expressed protein; protein id: At4g23490.1, by cDNA: gi_15529152 [Arabidopsis thaliana]
  misc_feature (1)..(301): Homolog of NCBI NO: 15238082 NR Description: putative protein; protein id: At5g41460.1 thaliana] >gi|9758054|dbj|BAB08517.1|
  misc_feature (1)..(318): Homolog of NCBI NO: 15529153 NR Description: AT4g23490/F16G20_190 [Arabidopsis thaliana]
  misc_feature (36)..(318): Homolog of NCBI NO: 15233347 NR Description: putative protein; protein id: At4g11350.1
  misc_feature (1)..(28): Homolog of NCBI NO: 15233347 NR Description: putative protein; protein id: At4g11350.1
  misc_feature (36)..(302): Homolog of NCBI NO: 7485555 NR Description: hypothetical protein F16G20.190 - Arabidopsis >gi|3451074|emb|CAA20470.1| putative protein [Arabidopsis >gi|7269197|emb|CAB79304.1| putative protein [Arabidopsis
  misc_feature (1)..(28): Homolog of NCBI NO: 7485555 NR Description: hypothetical protein F16G20.190 - Arabidopsis >gi|3451074|emb|CAA20470.1| putative protein [Arabidopsis >gi|7269197|emb|CAB79304.1| putative protein [Arabidopsis
  misc_feature (1)..(301): Homolog of NCBI NO: 37536418 NR Description: hypothetical protein [Oryza sativa (japonica group)] >gi|22002140|gb|AAM88624.1| hypothetical protein [Oryza
MLNGTEAERNVRWVVMGDDDTVFFTENLVRVLRKYDHKQFYYIGAPSESHLQNLHQFSYGMAYGGGGFAISYPLAKVLEKMQDRCIERYSDLYGSDDRIHACMAELGVPLTKEVGFHQFDVYGNLLGLLSVHPQAPIVSIHHLDVVDPIFPKTNRVNALKKLMIPAKLDSASLVQQSVCYDKSHQWTMSISWGYTVQITRTYMPARMMEVPTRTFNDWHLRSDFTNLAFNTRPVTWTDCQRPRVFYFSHAFSNSSSSDTTTISQYLRHDEWYPKCEWGIADPSEINQIFVYKKPTPDRWSKVVIRFVPSKDSNFAFVNAIEVISAPKDLIGDVATSVSHDGTEKFNGLAKQAMEVVYRVNVGGRKVTPFNDTLWRTWVTDEGFLKTGDGSSEKSYFTGRIKYRRGGASREVGPDNVYNTARVGKRSNGLVDMSWGFKVNVGYKYLIRMHFCDIASKSLGRLYFNVYINGNLAYEDFDISYAADNVLASPYYIDFVVDATADDNNPSGSSITVSVGPSNKTSVDGNGVDAILNGVEIMKMNNSMGSLDGYVSTEMILSTCPNRRNLSIFIAMLAFMCIFMSFYIVTQRKRVKDQYGWTKLSMDVLEDNSKSGNQFTARKA

SEQ ID NO: 69558 - DNA, 1242 bp, Arabidopsis thaliana
  misc_feature (1)..(1242): Ceres Seq. ID no. 1818595
  misc_feature: MA Experiment ID: 20000171 Result: Down-regulated in Transcription
  misc_feature: MA Experiment 20000171 PARAMETER Experiment Name: At_42deg_Heat_P Parameter: Age (day) Value: 14
  misc_feature: MA Experiment 20000171 PARAMETER Experiment Name: At_42deg_Heat_P Parameter: Organism Value: A. thaliana
  misc_feature: MA Experiment 20000171 PARAMETER Experiment Name: At_42deg_Heat_P Parameter: Plant Line Value: WS
  misc_feature: MA Experiment 20000171 PARAMETER Experiment Name: At_42deg_Heat_P Parameter: Temperature (deg C) Value: 42 vs. 22
  misc_feature: MA Experiment 20000171 PARAMETER Experiment Name: At_42deg_Heat_P Parameter: Timepoint (hr) Value: 1
  misc_feature: MA Experiment 20000171 PARAMETER Experiment Name: At_42deg_Heat_P Parameter: Tissue Value: Aerial
  misc_feature: MA Experiment ID: 20000173 Result: Down-regulated in Transcription
  misc_feature: MA Experiment 20000173 PARAMETER Experiment Name: At_42deg_Heat_P Parameter: Age (day) Value: 14
  misc_feature: MA Experiment 20000173 PARAMETER Experiment Name: At_42deg_Heat_P Parameter: Organism Value: A. thaliana
  misc_feature: MA Experiment 20000173 PARAMETER Experiment Name: At_42deg_Heat_P Parameter: Plant Line Value: WS
  misc_feature: MA Experiment 20000173 PARAMETER Experiment Name: At_42deg_Heat_P Parameter: Temperature (deg C) Value: 42 vs. 22
  misc_feature: MA Experiment 20000173 PARAMETER Experiment Name: At_42deg_Heat_P Parameter: Timepoint (hr) Value: 6
  misc_feature: MA Experiment 20000173 PARAMETER Experiment Name: At_42deg_Heat_P Parameter: Tissue Value: Aerial
  misc_feature: MA Experiment ID: 20000180 Result: Up-regulated in Transcription
  misc_feature: MA Experiment 20000180 PARAMETER Experiment Name: At_Germinating_Seeds_P Parameter: Age (hr) Value: 24 vs. 0
  misc_feature: MA Experiment 20000180 PARAMETER Experiment Name: At_Germinating_Seeds_P Parameter: Tissue Value: Germinating Seeds
  misc_feature: MA Experiment ID: 20000184 Result: Up-regulated in Transcription
  misc_feature: MA Experiment 20000184 PARAMETER Experiment Name: At_Shoots__P Parameter: Age (day) Value: 7
  misc_feature: MA Experiment 20000184 PARAMETER Experiment Name: At_Shoots__P Parameter: Tissue Value: Shoots vs. Whole Plant
  misc_feature: MA Experiment ID: 20000185 Result: Down-regulated in Transcription
  misc_feature: MA Experiment 20000185 PARAMETER Experiment Name: At_Roots__P Parameter: Age (day) Value: 7 vs. 21
  misc_feature: MA Experiment 20000185 PARAMETER Experiment Name: At_Roots__P Parameter: Organism Value: A. thaliana
  misc_feature: MA Experiment 20000185 PARAMETER Experiment Name: At_Roots__P Parameter: Tissue Value: Roots vs. Whole Plant
  misc_feature: MA Experiment ID: 20000227 Result: Down-regulated in Transcription
  misc_feature: MA Experiment 20000227 PARAMETER Experiment Name: At_Root-Tips-vs-Tops_P Parameter: Tissue Value: Root Tips vs. Root Tops
  misc_feature: MA Experiment ID: 20000265 Result: Up-regulated in Transcription
  misc_feature: MA Experiment 20000265 PARAMETER Experiment Name: At_Open_Flower_P Parameter: Age (day) Value: 21
  misc_feature: MA Experiment 20000265 PARAMETER Experiment Name: At_Open_Flower_P Parameter: Plant Line Value: WS
  misc_feature: MA Experiment 20000265 PARAMETER Experiment Name: At_Open_Flower_P Parameter: Tissue Value: Closed Flower vs. Whole Plant
  misc_feature: MA Experiment ID: 20000438 Result: Up-regulated in Transcription
  misc_feature: MA Experiment 20000438 PARAMETER Experiment Name: At_Shoots__P Parameter: Age (day) Value: 14
  misc_feature: MA Experiment 20000438 PARAMETER Experiment Name: At_Shoots__P Parameter: Tissue Value: Shoots vs. Whole Plant
  misc_feature: MA Experiment ID: 20001248 Result: Down-regulated in Transcription
  misc_feature: MA Experiment 20001248 PARAMETER Experiment Name: At_Far-red-induction_P Parameter: Age (day) Value: 7
  misc_feature: MA Experiment 20001248 PARAMETER Experiment Name: At_Far-red-induction_P Parameter: Light Value: Far-red vs. White
  misc_feature: MA Experiment 20001248 PARAMETER Experiment Name: At_Far-red-induction_P Parameter: Organism Value: A. thaliana
  misc_feature: MA Experiment 20001248 PARAMETER Experiment Name: At_Far-red-induction_P Parameter: Plant Line Value: Columbia
  misc_feature: MA Experiment 20001248 PARAMETER Experiment Name: At_Far-red-induction_P Parameter: Timepoint (hr) Value: 4
  misc_feature: MA Experiment 20001248 PARAMETER Experiment Name: At_Far-red-induction_P Parameter: Tissue Value: Whole Plant
  misc_feature: MA Experiment ID: 20001450 Result: Down-regulated in Transcription
  misc_feature: MA Experiment 20001450 PARAMETER Experiment Name: At_Far-red-induction_P Parameter: Age (day) Value: 7
  misc_feature: MA Experiment 20001450 PARAMETER Experiment Name: At_Far-red-induction_P Parameter: Light Value: Far-red vs. White
  misc_feature: MA Experiment 20001450 PARAMETER Experiment Name: At_Far-red-induction_P Parameter: Organism Value: A. thaliana
  misc_feature: MA Experiment 20001450 PARAMETER Experiment Name: At_Far-red-induction_P Parameter: Plant Line Value: Columbia
  misc_feature: MA Experiment 20001450 PARAMETER Experiment Name: At_Far-red-induction_P Parameter: Timepoint (hr) Value: 8
  misc_feature: MA Experiment 20001450 PARAMETER Experiment Name: At_Far-red-induction_P Parameter: Tissue Value: Whole Plant
  misc_feature: MA Experiment ID: 20001451 Result: Down-regulated in Transcription
  misc_feature: MA Experiment 20001451 PARAMETER Experiment Name: At_Far-red-induction_P Parameter: Age (day) Value: 7
  misc_feature: MA Experiment 20001451 PARAMETER Experiment Name: At_Far-red-induction_P Parameter: Light Value: Far-red vs. White
  misc_feature: MA Experiment 20001451 PARAMETER Experiment Name: At_Far-red-induction_P Parameter: Organism Value: A. thaliana
  misc_feature: MA Experiment 20001451 PARAMETER Experiment Name: At_Far-red-induction_P Parameter: Plant Line Value: Columbia
  misc_feature: MA Experiment 20001451 PARAMETER Experiment Name: At_Far-red-induction_P Parameter: Timepoint (hr) Value: 24
  misc_feature: MA Experiment 20001451 PARAMETER Experiment Name: At_Far-red-induction_P Parameter: Tissue Value: Whole Plant
  misc_feature: MA Experiment ID: 20001757 Result: Up-regulated in Transcription
  misc_feature: MA Experiment 20001757 PARAMETER Experiment Name: At_50mM_NH4NO3_L-to-H_P Parameter: Timepoint (hr) Value: 6
  misc_feature: MA Experiment 20001757 PARAMETER Experiment Name: At_50mM_NH4NO3_L-to-H_P Parameter: Tissue Value: Leaf
  misc_feature: MA Experiment 20001757 PARAMETER Experiment Name: At_50mM_NH4NO3_L-to-H_P Parameter: Treatment Value: 50mM NH4NO3 vs 100mM Mannitol
atggacagtgtaattaggtttaggaacagtatcaagatcaacagatctcgtgcttactacaaatcagaggagtcagatatcacggaaggagttgtgccatcggctgatggctcagctgaagctattttagttgaaggaaatctacagaacgcatctccatggtggcagcagtttcctagacgctgggtgatcgtcttgttatgcttttcgtcttttcttctttgcaatatggaccgtgtgaacatgagcattgcaattcttcccatgtcacaagaatataactggagtagtgcaactgttggcttaattcagtcctctttcttctggggctatttacttactcagattctgggaggtatatgggcagataagtttggcgggaagggtgttgcaatgcctgctatgaacaacatgctttctaaatggatccctgtctcagagagaagcagatcgcttgcactggtctatagtggcatgtatcttggttccgtcacaggattggcattctctcctatgctaatcaccaagttcggatggccatctgttttctactcgtttggctccctcggaagtatatggtttttgctatggctaaaatttgcatatagctctcccaaggatgacccggacctaagtgaagaagaaaaaaaggttatactgggaggtagcaaaccaagggaacctgttacagtgattccatggaagctaatactgtctaaacccccagtctgggctctcataatttcccacttctgccataattggggaactttcatactattgacatggatgcccacatattacaatcaggcacggagttcagcttcagttatatccttactgtttaatattttttgtgaacaagtcttgaagttcaacctcactgaatccgggctactatgcgttttgccatggctaaccatggctgtttttgctaatattggaggttggattgctgatactcttgtgagcagaggtctttcaattacaaacggctctgatgcattctctcagtcgggtctctactctaatcatcaagacattggcccacgatacgctggtgtactcttaggactatcaaacacagcaggagtcctagctggtgtctttggcactgcagctactggttacatcctccaacgaggttcatgggatgatgtgttcaaagtagcagttgcactgtatctaattggaactctggtctggaacttgttcgcaaccggagaaaaaattctcgactag

SEQ ID NO: 69559 - protein, 413 aa, Arabidopsis thaliana; identical to SEQ ID NO: 46014
  peptide (1)..(413): Ceres Seq. ID no. 1818596
  misc_feature (64)..(130): Pfam Name: Sugar (and other) transporter Pfam Description: Sugar (and other) transporter
  misc_feature (1)..(413): Homolog of NCBI NO: 7485271 NR Description: hypothetical protein A_IG005I10.nn - Arabidopsis >gi|2252847|gb|AAB62846.1| A_IG005I10.nn gene product thaliana] >gi|6049889|gb|AAF02804.1|AF195115_24 weak similarity
  misc_feature (127)..(270): Homolog of NCBI NO: 34903342 NR Description: unnamed protein product [Oryza sativa (japonica group)] >gi|6498428|dbj|BAA87831.1| unnamed protein product
  misc_feature (37)..(130): Homolog of NCBI NO: 34903342 NR Description: unnamed protein product [Oryza sativa (japonica group)] >gi|6498428|dbj|BAA87831.1| unnamed protein product
  misc_feature (327)..(413): Homolog of NCBI NO: 34903342 NR Description: unnamed protein product [Oryza sativa (japonica group)] >gi|6498428|dbj|BAA87831.1| unnamed protein product
  misc_feature (285)..(330): Homolog of NCBI NO: 34903342 NR Description: unnamed protein product [Oryza sativa (japonica group)] >gi|6498428|dbj|BAA87831.1| unnamed protein product
  misc_feature (127)..(270): Homolog of NCBI NO: 30678625 NR Description: expressed protein [Arabidopsis thaliana]
  misc_feature (327)..(413): Homolog of NCBI NO: 30678625 NR Description: expressed protein [Arabidopsis thaliana]
  misc_feature (285)..(331): Homolog of NCBI NO: 30678625 NR Description: expressed protein [Arabidopsis thaliana]
  misc_feature (1)..(198): Homolog of NCBI NO: 30678625 NR Description: expressed protein [Arabidopsis thaliana]
  misc_feature (127)..(285): Homolog of NCBI NO: 15227589 NR Description: putative Na+-dependent inorganic phosphate protein id: At2g29650.1, supported by cDNA: gi_17064975

SEQ ID NO: 69560 - protein, 337 aa, Arabidopsis thaliana
  peptide (1)..(337): Ceres Seq. ID no. 1818597
  misc_feature (1)..(54): Pfam Name: Sugar (and other) transporter Pfam Description: Sugar (and other) transporter
  misc_feature (1)..(337): Homolog of NCBI NO: 7485271 NR Description: hypothetical protein A_IG005I10.nn - Arabidopsis >gi|2252847|gb|AAB62846.1| A_IG005I10.nn gene product thaliana] >gi|6049889|gb|AAF02804.1|AF195115_24 weak similarity
  misc_feature (51)..(194): Homolog of NCBI NO: 34903342 NR Description: unnamed protein product [Oryza sativa (japonica group)] >gi|6498428|dbj|BAA87831.1| unnamed protein product
  misc_feature (1)..(54): Homolog of NCBI NO: 34903342 NR Description: unnamed protein product [Oryza sativa (japonica group)] >gi|6498428|dbj|BAA87831.1| unnamed protein product
  misc_feature (251)..(337): Homolog of NCBI NO: 34903342 NR Description: unnamed protein product [Oryza sativa (japonica group)] >gi|6498428|dbj|BAA87831.1| unnamed protein product
  misc_feature (209)..(254): Homolog of NCBI NO: 34903342 NR Description: unnamed protein product [Oryza sativa (japonica group)] >gi|6498428|dbj|BAA87831.1| unnamed protein product
  misc_feature (51)..(194): Homolog of NCBI NO: 30678625 NR Description: expressed protein [Arabidopsis thaliana]
  misc_feature (251)..(337): Homolog of NCBI NO: 30678625 NR Description: expressed protein [Arabidopsis thaliana]
  misc_feature (209)..(255): Homolog of NCBI NO: 30678625 NR Description: expressed protein [Arabidopsis thaliana]
  misc_feature (1)..(122): Homolog of NCBI NO: 30678625 NR Description: expressed protein [Arabidopsis thaliana]
  misc_feature (51)..(209): Homolog of NCBI NO: 15227589 NR Description: putative Na+-dependent inorganic phosphate protein id: At2g29650.1, supported by cDNA: gi_17064975
MDRVNMSIAILPMSQEYNWSSATVGLIQSSFFWGYLLTQILGGIWADKFGGKGVAMPAMNNMLSKWIPVSERSRSLALVYSGMYLGSVTGLAFSPMLITKFGWPSVFYSFGSLGSIWFLLWLKFAYSSPKDDPDLSEEEKKVILGGSKPREPVTVIPWKLILSKPPVWALIISHFCHNWGTFILLTWMPTYYNQARSSASVISLLFNIFCEQVLKFNLTESGLLCVLPWLTMAVFANIGGWIADTLVSRGLSITNGSDAFSQSGLYSNHQDIGPRYAGVLLGLSNTAGVLAGVFGTAATGYILQRGSWDDVFKVAVALYLIGTLVWNLFATGEKILD

SEQ ID NO: 69561 - protein, 332 aa, Arabidopsis thaliana
  peptide (1)..(332): Ceres Seq. ID no. 1818598
  misc_feature (46)..(189): Pfam Name: Sugar (and other) transporter Pfam Description: Sugar (and other) transporter
  misc_feature (1)..(332): Homolog of NCBI NO: 7485271 NR Description: hypothetical protein A_IG005I10.nn - Arabidopsis >gi|2252847|gb|AAB62846.1| A_IG005I10.nn gene product thaliana] >gi|6049889|gb|AAF02804.1|AF195115_24 weak similarity
  misc_feature (46)..(189): Homolog of NCBI NO: 34903342 NR Description: unnamed protein product [Oryza sativa (japonica group)] >gi|6498428|dbj|BAA87831.1| unnamed protein product
  misc_feature (1)..(49): Homolog of NCBI NO: 34903342 NR Description: unnamed protein product [Oryza sativa (japonica group)] >gi|6498428|dbj|BAA87831.1| unnamed protein product
  misc_feature (246)..(332): Homolog of NCBI NO: 34903342 NR Description: unnamed protein product [Oryza sativa (japonica group)] >gi|6498428|dbj|BAA87831.1| unnamed protein product
  misc_feature (204)..(249): Homolog of NCBI NO: 34903342 NR Description: unnamed protein product [Oryza sativa (japonica group)] >gi|6498428|dbj|BAA87831.1| unnamed protein product
  misc_feature (46)..(189): Homolog of NCBI NO: 30678625 NR Description: expressed protein [Arabidopsis thaliana]
  misc_feature (246)..(332): Homolog of NCBI NO: 30678625 NR Description: expressed protein [Arabidopsis thaliana]
  misc_feature (204)..(250): Homolog of NCBI NO: 30678625 NR Description: expressed protein [Arabidopsis thaliana]
  misc_feature (1)..(117): Homolog of NCBI NO: 30678625 NR Description: expressed protein [Arabidopsis thaliana]
  misc_feature (46)..(204): Homolog of NCBI NO: 15227589 NR Description: putative Na+-dependent inorganic phosphate protein id: At2g29650.1, supported by cDNA: gi_17064975
MSIAILPMSQEYNWSSATVGLIQSSFFWGYLLTQILGGIWADKFGGKGVAMPAMNNMLSKWIPVSERSRSLALVYSGMYLGSVTGLAFSPMLITKFGWPSVFYSFGSLGSIWFLLWLKFAYSSPKDDPDLSEEEKKVILGGSKPREPVTVIPWKLILSKPPVWALIISHFCHNWGTFILLTWMPTYYNQARSSASVISLLFNIFCEQVLKFNLTESGLLCVLPWLTMAVFANIGGWIADTLVSRGLSITNGSDAFSQSGLYSNHQDIGPRYAGVLLGLSNTAGVLAGVFGTAATGYILQRGSWDDVFKVAVALYLIGTLVWNLFATGEKILD

SEQ ID NO: 69562 - DNA, 2481 bp, Arabidopsis thaliana
  misc_feature (1)..(2481): Ceres Seq. ID no. 1818829
  misc_feature: MA Experiment ID: 20000179 Result: Up-regulated in Transcription
  misc_feature: MA Experiment 20000179 PARAMETER Experiment Name: At_Germinating_Seeds_P Parameter: Age (hr) Value: 6 vs. 0
  misc_feature: MA Experiment 20000179 PARAMETER Experiment Name: At_Germinating_Seeds_P Parameter: Tissue Value: Germinating Seeds
  misc_feature: MA Experiment ID: 20000185 Result: Down-regulated in Transcription
  misc_feature: MA Experiment 20000185 PARAMETER Experiment Name: At_Roots__P Parameter: Age (day) Value: 7 vs. 21
  misc_feature: MA Experiment 20000185 PARAMETER Experiment Name: At_Roots__P Parameter: Organism Value: A. thaliana
  misc_feature: MA Experiment 20000185 PARAMETER Experiment Name: At_Roots__P Parameter: Tissue Value: Roots vs. Whole Plant
  misc_feature: MA Experiment ID: 20000227 Result: Down-regulated in Transcription
  misc_feature: MA Experiment 20000227 PARAMETER Experiment Name: At_Root-Tips-vs-Tops_P Parameter: Tissue Value: Root Tips vs. Root Tops
  misc_feature: MA Experiment ID: 20000439 Result: Down-regulated in Transcription
  misc_feature: MA Experiment 20000439 PARAMETER Experiment Name: At_Roots__P Parameter: Age (day) Value: 14 vs. 21
  misc_feature: MA Experiment 20000439 PARAMETER Experiment Name: At_Roots__P Parameter: Organism Value: A. thaliana
  misc_feature: MA Experiment 20000439 PARAMETER Experiment Name: At_Roots__P Parameter: Tissue Value: Roots vs. Whole Plant
  misc_feature: MA Experiment ID: 20001450 Result: Up-regulated in Transcription
  misc_feature: MA Experiment 20001450 PARAMETER Experiment Name: At_Far-red-induction_P Parameter: Age (day) Value: 7
  misc_feature: MA Experiment 20001450 PARAMETER Experiment Name: At_Far-red-induction_P Parameter: Light Value: Far-red vs. White
  misc_feature: MA Experiment 20001450 PARAMETER Experiment Name: At_Far-red-induction_P Parameter: Organism Value: A. thaliana
  misc_feature: MA Experiment 20001450 PARAMETER Experiment Name: At_Far-red-induction_P Parameter: Plant Line Value: Columbia
  misc_feature: MA Experiment 20001450 PARAMETER Experiment Name: At_Far-red-induction_P Parameter: Timepoint (hr) Value: 8
  misc_feature: MA Experiment 20001450 PARAMETER Experiment Name: At_Far-red-induction_P Parameter: Tissue Value: Whole Plant
  misc_feature: Pfam Name: K_trans Pfam Description: K+ potassium transporter
atggaggaaattgaagaaggaagcagcaacaacagcataagacgtgttggtaccggaagtagtgaccggagatgggttgatggaagcgaggtagactctgaaacgccgctgttttcagaaatcagagatagagactatagttttgggaatttgaggagaagattaatgaaaaaacccaaaagagctgattctcttgatgttgaagctatggaaattgcaggttctcatggtcacaatctcaaggatttgtcacttttgactacacttggaatagcgtttcagacgttaggtgttgtgtatggtgatatgggaacaagtcctttgtatgtgttcagtgatgtgtttagtaaagttcctataagatcagaagttgatgttcttggagctttgtctctcgttatctacactattgctgtgattcctttggcaaagtatgtatttgtagtccttaaagctaacgacaatggcgaaggtaatgcttccgcaccgatgtgtttagtaaagtatgcaaaggtgaataagctgccaaatcaacaacctgcggatgagcagatctcgagttttaggcttaaactcccaactcctgagctggaaagagctctggggattaaagaagctttggagacaaaagggtatttgaaaactcttcttttgcttttagtcctaatgggaacttccatgattattggcgatggaattctaacaccagctatgtcagtgatgtctgcaatgagtggtctacaaggtgaagttaaaggatttggaacaaatgcattggttatgtcttcgattgtgattctcgtggctttgttcagcatacaacggtttgggacgggtaaagttggttttctatttgctccagttctggcgctctggttcttctctcttggtgctattggaatctataatctgttgaagtatgacttcactgtcataagagcactaaacccgttttatatcgttttgttcttcaacaagaatagcaaacaggcttggtctgctcttggtggatgtgtcttatgcataacaggagctgaagcaatgtttgcagatttaggacatttctcagttcgttctatacagatggcatttacttgcgtggtgttcccatgccttctcttagcttacatgggtcaagctgcttatctaacaaagcatcccgaggcctcagctcgcatattctatgattcagttccaaagagtttgttctggccggtgtttgtgattgcaacattagctgctatgatagctagccaagccatgatctccgcgactttctcatgcgtcaaacaagccatggctctcggttgctttccaaggctgaagataatccacacttctaagaaacggataggtcaaatctatataccagttatcaactggttcttgatgatcatgtgcattcttgtcgtctccatcttcagaagcacaacccacattgccaatgcttacggcatagcagaggtaggtgtaatgatggttagcacagttttggtaactctagtgatgcttcttatttggcaaaccaatatatttctcgccctttgctttccccttatatttggatcagtggagaccatttacttgctagctgttctcaccaagatattggaaggcggttgggttccgctagtattcgccactttcttcctcactgtaatgtacatttggaactacggaagtgtactcaagtaccaaagcgaggtcagggaaagaatctccatggattttatgcgtgagctcggttcaactcttgggaccattcgaatccctgggattggactcctttataacgagcttgtccaaggtataccttccatttttggacagttcttgctcactcttcctgcgattcactcaacaatcatctttgtctgcatcaaatatgttcctgtcccggttgttcctcaagaagagaggttcctcttcagacgggtttgtcctaaggactaccatatgttcaggtgcattgcgaggtatggttacaaagatgtcagaaaagaagattctagagtctttgaacagcttcttattgaaagtctagagaagttcttgagatgtgaagcattagaggatgctctagagagcactctgaatgattttgatcccgatagagtttccgttgcaagtgatacttacacggacgacctcatggctcctctcatccaccgtgcaaagcgttctgagccagagcaagagttggattcagaggttttgccatcttcaagcgtagggtcgtctatggaggaagatccagctctggaatatgaacttgcggctttgagagaagccacagactcggggctaacgtatttactggctcatggagatgtaagggcgaagaagaattcgattttcgtgaagaagcttgtgattaattacttctatgcgtttctaaggagaaattgcagagctggagctgcgaatctcactgttcctcatatgaacatcttgcaagctgggatgacttatatggtctag

SEQ ID NO: 69563 - protein, 826 aa, Arabidopsis thaliana
  peptide (1)..(826): Ceres Seq. ID no. 1818830
  misc_feature: Pfam Name: K_trans Pfam Description: K+ potassium transporter
  misc_feature (2)..(826): Homolog of NCBI NO: 22326688 NR Description: potassium transport protein-like; protein id:
  misc_feature (43)..(826): Homolog of NCBI NO: 22329125 NR Description: putative potassium transporter AtKT5p (AtKT5); id: At4g33530.1, supported by cDNA: gi_20466180 [Arabidopsis >gi|20466181|gb|AAM20408.1| putative potassium transporter AtKT5p
  misc_feature (238)..(826): Homolog of NCBI NO: 9955527 NR Description: potassium transport protein-like [Arabidopsis
  misc_feature (2)..(239): Homolog of NCBI NO: 9955527 NR Description: potassium transport protein-like [Arabidopsis
  misc_feature (43)..(826): Homolog of NCBI NO: 7488157 NR Description: probable potassium transport protein KT5 - thaliana >gi|3859659|emb|CAA20566.1| putative potassium
  misc_feature (43)..(826): Homolog of NCBI NO: 25345483 NR Description: probable potassium transporter AtKT5p (AtKT5) - Arabidopsis thaliana >gi|7270301|emb|CAB80070.1| putative
  misc_feature (88)..(826): Homolog of NCBI NO: 18250714 NR Description: putative potasium transporter [Oryza sativa
  misc_feature (91)..(729): Homolog of NCBI NO: 18250688 NR Description: putative potasium transporter [Oryza sativa
  misc_feature (751)..(826): Homolog of NCBI NO: 18250688 NR Description: putative potasium transporter [Oryza sativa
  misc_feature (28)..(826): Homolog of NCBI NO: 30017546 NR Description: putative potassium transporter [Oryza sativa
MEEIEEGSSNNSIRRVGTGSSDRRWVDGSEVDSETPLFSEIRDRDYSFGNLRRRLMKKPKRADSLDVEAMEIAGSHGHNLKDLSLLTTLGIAFQTLGVVYGDMGTSPLYVFSDVFSKVPIRSEVDVLGALSLVIYTIAVIPLAKYVFVVLKANDNGEGNASAPMCLVKYAKVNKLPNQQPADEQISSFRLKLPTPELERALGIKEALETKGYLKTLLLLLVLMGTSMIIGDGILTPAMSVMSAMSGLQGEVKGFGTNALVMSSIVILVALFSIQRFGTGKVGFLFAPVLALWFFSLGAIGIYNLLKYDFTVIRALNPFYIVLFFNKNSKQAWSALGGCVLCITGAEAMFADLGHFSVRSIQMAFTCVVFPCLLLAYMGQAAYLTKHPEASARIFYDSVPKSLFWPVFVIATLAAMIASQAMISATFSCVKQAMALGCFPRLKIIHTSKKRIGQIYIPVINWFLMIMCILVVSIFRSTTHIANAYGIAEVGVMMVSTVLVTLVMLLIWQTNIFLALCFPLIFGSVETIYLLAVLTKILEGGWVPLVFATFFLTVMYIWNYGSVLKYQSEVRERISMDFMRELGSTLGTIRIPGIGLLYNELVQGIPSIFGQFLLTLPAIHSTIIFVCIKYVPVPVVPQEERFLFRRVCPKDYHMFRCIARYGYKDVRKEDSRVFEQLLIESLEKFLRCEALEDALESTLNDFDPDRVSVASDTYTDDLMAPLIHRAKRSEPEQELDSEVLPSSSVGSSMEEDPALEYELAALREATDSGLTYLLAHGDVRAKKNSIFVKKLVINYFYAFLRRNCRAGAANLTVPHMNILQAGMTYMV

SEQ ID NO: 69564 - protein, 771 aa, Arabidopsis thaliana
  peptide (1)..(771): Ceres Seq. ID no. 1818831
  misc_feature: Pfam Name: K_trans Pfam Description: K+ potassium transporter
  misc_feature (1)..(771): Homolog of NCBI NO: 22326688 NR Description: potassium transport protein-like; protein id:
  misc_feature (1)..(771): Homolog of NCBI NO: 22329125 NR Description: putative potassium transporter AtKT5p (AtKT5); id: At4g33530.1, supported by cDNA: gi_20466180 [Arabidopsis >gi|20466181|gb|AAM20408.1| putative potassium transporter AtKT5p
  misc_feature (183)..(771): Homolog of NCBI NO: 9955527 NR Description: potassium transport protein-like [Arabidopsis
  misc_feature (1)..(184): Homolog of NCBI NO: 9955527 NR Description: potassium transport protein-like [Arabidopsis
  misc_feature (1)..(771): Homolog of NCBI NO: 7488157 NR Description: probable potassium transport protein KT5 - thaliana >gi|3859659|emb|CAA20566.1| putative potassium
  misc_feature (1)..(771): Homolog of NCBI NO: 25345483 NR Description: probable potassium transporter AtKT5p (AtKT5) - Arabidopsis thaliana >gi|7270301|emb|CAB80070.1| putative
  misc_feature (33)..(771): Homolog of NCBI NO: 18250714 NR Description: putative potasium transporter [Oryza sativa
  misc_feature (36)..(674): Homolog of NCBI NO: 18250688 NR Description: putative potasium transporter [Oryza sativa
  misc_feature (696)..(771): Homolog of NCBI NO: 18250688 NR Description: putative potasium transporter [Oryza sativa
  misc_feature (1)..(771): Homolog of NCBI NO: 30017546 NR Description: putative potassium transporter [Oryza sativa
MKKPKRADSLDVEAMEIAGSHGHNLKDLSLLTTLGIAFQTLGVVYGDMGTSPLYVFSDVFSKVPIRSEVDVLGALSLVIYTIAVIPLAKYVFVVLKANDNGEGNASAPMCLVKYAKVNKLPNQQPADEQISSFRLKLPTPELERALGIKEALETKGYLKTLLLLLVLMGTSMIIGDGILTPAMSVMSAMSGLQGEVKGFGTNALVMSSIVILVALFSIQRFGTGKVGFLFAPVLALWFFSLGAIGIYNLLKYDFTVIRALNPFYIVLFFNKNSKQAWSALGGCVLCITGAEAMFADLGHFSVRSIQMAFTCVVFPCLLLAYMGQAAYLTKHPEASARIFYDSVPKSLFWPVFVIATLAAMIASQAMISATFSCVKQAMALGCFPRLKIIHTSKKRIGQIYIPVINWFLMIMCILVVSIFRSTTHIANAYGIAEVGVMMVSTVLVTLVMLLIWQTNIFLALCFPLIFGSVETIYLLAVLTKILEGGWVPLVFATFFLTVMYIWNYGSVLKYQSEVRERISMDFMRELGSTLGTIRIPGIGLLYNELVQGIPSIFGQFLLTLPAIHSTIIFVCIKYVPVPVVPQEERFLFRRVCPKDYHMFRCIARYGYKDVRKEDSRVFEQLLIESLEKFLRCEALEDALESTLNDFDPDRVSVASDTYTDDLMAPLIHRAKRSEPEQELDSEVLPSSSVGSSMEEDPALEYELAALREATDSGLTYLLAHGDVRAKKNSIFVKKLVINYFYAFLRRNCRAGAANLTVPHMNILQAGMTYMV

SEQ ID NO: 69565 - protein, 757 aa, Arabidopsis thaliana
  peptide (1)..(757): Ceres Seq. ID no. 1818832
  misc_feature: Pfam Name: K_trans Pfam Description: K+ potassium transporter
  misc_feature (1)..(757): Homolog of NCBI NO: 22326688 NR Description: potassium transport protein-like; protein id:
  misc_feature (1)..(757): Homolog of NCBI NO: 22329125 NR Description: putative potassium transporter AtKT5p (AtKT5); id: At4g33530.1, supported by cDNA: gi_20466180 [Arabidopsis >gi|20466181|gb|AAM20408.1| putative potassium transporter AtKT5p
  misc_feature (169)..(757): Homolog of NCBI NO: 9955527 NR Description: potassium transport protein-like [Arabidopsis
  misc_feature (1)..(170): Homolog of NCBI NO: 9955527 NR Description: potassium transport protein-like [Arabidopsis
  misc_feature (1)..(757): Homolog of NCBI NO: 7488157 NR Description: probable potassium transport protein KT5 - thaliana >gi|3859659|emb|CAA20566.1| putative potassium
  misc_feature (1)..(757): Homolog of NCBI NO: 25345483 NR Description: probable potassium transporter AtKT5p (AtKT5) - Arabidopsis thaliana >gi|7270301|emb|CAB80070.1| putative
  misc_feature (19)..(757): Homolog of NCBI NO: 18250714 NR Description: putative potasium transporter [Oryza sativa
  misc_feature (22)..(660): Homolog of NCBI NO: 18250688 NR Description: putative potasium transporter [Oryza sativa
  misc_feature (682)..(757): Homolog of NCBI NO: 18250688 NR Description: putative potasium transporter [Oryza sativa
  misc_feature (1)..(757): Homolog of NCBI NO: 30017546 NR Description: putative potassium transporter [Oryza sativa
MEIAGSHGHNLKDLSLLTTLGIAFQTLGVVYGDMGTSPLYVFSDVFSKVPIRSEVDVLGALSLVIYTIAVIPLAKYVFVVLKANDNGEGNASAPMCLVKYAKVNKLPNQQPADEQISSFRLKLPTPELERALGIKEALETKGYLKTLLLLLVLMGTSMIIGDGILTPAMSVMSAMSGLQGEVKGFGTNALVMSSIVILVALFSIQRFGTGKVGFLFAPVLALWFFSLGAIGIYNLLKYDFTVIRALNPFYIVLFFNKNSKQAWSALGGCVLCITGAEAMFADLGHFSVRSIQMAFTCVVFPCLLLAYMGQAAYLTKHPEASARIFYDSVPKSLFWPVFVIATLAAMIASQAMISATFSCVKQAMALGCFPRLKIIHTSKKRIGQIYIPVINWFLMIMCILVVSIFRSTTHIANAYGIAEVGVMMVSTVLVTLVMLLIWQTNIFLALCFPLIFGSVETIYLLAVLTKILEGGWVPLVFATFFLTVMYIWNYGSVLKYQSEVRERISMDFMRELGSTLGTIRIPGIGLLYNELVQGIPSIFGQFLLTLPAIHSTIIFVCIKYVPVPVVPQEERFLFRRVCPKDYHMFRCIARYGYKDVRKEDSRVFEQLLIESLEKFLRCEALEDALESTLNDFDPDRVSVASDTYTDDLMAPLIHRAKRSEPEQELDSEVLPSSSVGSSMEEDPALEYELAALREATDSGLTYLLAHGDVRAKKNSIFVKKLVINYFYAFLRRNCRAGAANLTVPHMNILQAGMTYMV

SEQ ID NO: 69566 - DNA, 1035 bp, Arabidopsis thaliana
  misc_feature (1)..(1035): Ceres Seq. ID no. 1819036
  misc_feature: MA Experiment ID: 20000185 Result: Down-regulated in Transcription
  misc_feature: MA Experiment 20000185 PARAMETER Experiment Name: At_Roots__P Parameter: Age (day) Value: 7 vs. 21
  misc_feature: MA Experiment 20000185 PARAMETER Experiment Name: At_Roots__P Parameter: Organism Value: A. thaliana
  misc_feature: MA Experiment 20000185 PARAMETER Experiment Name: At_Roots__P Parameter: Tissue Value: Roots vs. Whole Plant
  misc_feature: MA Experiment ID: 20000234 Result: Down-regulated in Transcription
  misc_feature: MA Experiment 20000234 PARAMETER Experiment Name: At_Siliques_P Parameter: Age (day) Value: 21
  misc_feature: MA Experiment 20000234 PARAMETER Experiment Name: At_Siliques_P Parameter: Organism Value: A. thaliana
  misc_feature: MA Experiment 20000234 PARAMETER Experiment Name: At_Siliques_P Parameter: Plant Line Value: WS
  misc_feature: MA Experiment 20000234 PARAMETER Experiment Name: At_Siliques_P Parameter: Tissue Value: Less Than 5mm Siliques vs. Whole Plant
  misc_feature: MA Experiment ID: 20000235 Result: Down-regulated in Transcription
  misc_feature: MA Experiment 20000235 PARAMETER Experiment Name: At_Siliques_P Parameter: Age (day) Value: 21
  misc_feature: MA Experiment 20000235 PARAMETER Experiment Name: At_Siliques_P Parameter: Organism Value: A. thaliana
  misc_feature: MA Experiment 20000235 PARAMETER Experiment Name: At_Siliques_P Parameter: Plant Line Value: WS
  misc_feature: MA Experiment 20000235 PARAMETER Experiment Name: At_Siliques_P Parameter: Tissue Value: 5-10mm Siliques vs. Whole Plant
  misc_feature: MA Experiment ID: 20000265 Result: Down-regulated in Transcription
  misc_feature: MA Experiment 20000265 PARAMETER Experiment Name: At_Open_Flower_P Parameter: Age (day) Value: 21
  misc_feature: MA Experiment 20000265 PARAMETER Experiment Name: At_Open_Flower_P Parameter: Plant Line Value: WS
  misc_feature: MA Experiment 20000265 PARAMETER Experiment Name: At_Open_Flower_P Parameter: Tissue Value: Closed Flower vs. Whole Plant
  misc_feature: MA Experiment ID: 20000437 Result: Up-regulated in Transcription
  misc_feature: MA Experiment 20000437 PARAMETER Experiment Name: At_Drought_P Parameter: Age (day) Value: 8
  misc_feature: MA Experiment 20000437 PARAMETER Experiment Name: At_Drought_P Parameter: Organism Value: A. thaliana
  misc_feature: MA Experiment 20000437 PARAMETER Experiment Name: At_Drought_P Parameter: Plant Line Value: WS
  misc_feature: MA Experiment 20000437 PARAMETER Experiment Name: At_Drought_P Parameter: Timepoint (hr) Value: 24
  misc_feature: MA Experiment 20000437 PARAMETER Experiment Name: At_Drought_P Parameter: Tissue Value: Whole Plant
  misc_feature: MA Experiment 20000437 PARAMETER Experiment Name: At_Drought_P Parameter: Treatment Value: Drought vs. No Drought
  misc_feature: MA Experiment ID: 20000438 Result: Down-regulated in Transcription
  misc_feature: MA Experiment 20000438 PARAMETER Experiment Name: At_Shoots__P Parameter: Age (day) Value: 14
  misc_feature: MA Experiment 20000438 PARAMETER Experiment Name: At_Shoots__P Parameter: Tissue Value: Shoots vs. Whole Plant
atggtgatgatgaagaagcttttgtcgaaccgtttgttcaatatgtcaaaaacggcgtcgcaaagtctcatgaactgtcgtacttcgtcttcttcttcgttagccatgcgaactagggttcctaaagatataggagaagccacgattgatccagagcctggagatttgacgatttctcagaggtttttgaataaattctccatgaatgggattgatacgacttcgaagatgtctattggggagagtctgatggagaagcttaaagaaatggatatgaacaaggatcggattcgattagacggactttctcatccgaaggaggagacgttagggcttactgtgcaagacgtgaagaagttgctaagagcagcagagatcgaagttattaaaacgaagctgatggagacaggaaaaatctggattcgttactcagatttcttaggtgtttgtagtgattcttctttggatccttctcaaggagctttgatcgctaagatgcttgatgattcaggaaacgttatcgttatgggaaactctgtttgtttaagacctcatcaggtcttgtgtgttgatcagttaaccaaatccatagaggggcttcttcctttatcacaaatccataacccgaatgacccaagaagaaaggagctaaatgagcttgaagctataaagacggtcattgaccaaaaagcacattctttggtgagaagagagctttgggctggtttgggttacttgatcatccaaaccgcagggtttatgaggctaacgttttgggacctgacatgggatgttatggaaccgatctgtttctatgtctcatcggtatatttcatggcgggttacacatttttcctcaagacatcgagagagccttcctttcaaggtttttaccaaagcaggtttgaggctaaacaaaggaaactgatgcaatctgaggattttgatgttgggaggtatgatgagctgaaaaagctgtttaatcccaagccttcaggtgctgttcccaagattcttggatctctacagaattga

SEQ ID NO: 69567 - protein, 344 aa, Arabidopsis thaliana
  peptide (1)..(344): Ceres Seq. ID no. 1819037
  misc_feature (149)..(336): Pfam Name: Protein of unknown function, DUF607 Pfam Description: Protein of unknown function, DUF607
  misc_feature (1)..(344): Homolog of NCBI NO: 15234535 NR Description: putative protein; protein id: At4g36820.1
  misc_feature (4)..(344): Homolog of NCBI NO: 15224063 NR Description: hypothetical protein; protein id: At2g23790.1
  misc_feature (4)..(344): Homolog of NCBI NO: 24496456 NR Description: hypothetical protein [Arabidopsis thaliana]
  misc_feature (17)..(329): Homolog of NCBI NO: 14596231 NR Description: Unknown protein [Arabidopsis thaliana]
  misc_feature (17)..(329): Homolog of NCBI NO: 15240047 NR Description: putative protein; protein id: At5g66650.1, by cDNA: gi_14596230 [Arabidopsis thaliana] contains similarity to unknown
  misc_feature (83)..(325): Homolog of NCBI NO: 37535778 NR Description: unknown protein [Oryza sativa (japonica
  misc_feature (97)..(331): Homolog of NCBI NO: 15239011 NR Description: unknown protein; protein id: At5g42610.1 thaliana] >gi|10177139|dbj|BAB10499.1| gene_id:MFO20.2~unknown
  misc_feature (73)..(325): Homolog of NCBI NO: 20330769 NR Description: Hypothetical protein [Oryza sativa (japonica
  misc_feature (103)..(324): Homolog of NCBI NO: 22330290 NR Description: hypothetical protein; protein id: At1g57610.1, by cDNA: gi_17979162 [Arabidopsis thaliana]
  misc_feature (106)..(343): Homolog of NCBI NO: 34909244 NR Description: B1148D12.10 [Oryza sativa (japonica
MVMMKKLLSNRLFNMSKTASQSLMNCRTSSSSSLAMRTRVPKDIGEATIDPEPGDLTISQRFLNKFSMNGIDTTSKMSIGESLMEKLKEMDMNKDRIRLDGLSHPKEETLGLTVQDVKKLLRAAEIEVIKTKLMETGKIWIRYSDFLGVCSDSSLDPSQGALIAKMLDDSGNVIVMGNSVCLRPHQVLCVDQLTKSIEGLLPLSQIHNPNDPRRKELNELEAIKTVIDQKAHSLVRRELWAGLGYLIIQTAGFMRLTFWDLTWDVMEPICFYVSSVYFMAGYTFFLKTSREPSFQGFYQSRFEAKQRKLMQSEDFDVGRYDELKKLFNPKPSGAVPKILGSLQN

SEQ ID NO: 69568 - protein, 342 aa, Arabidopsis thaliana
  peptide (1)..(342): Ceres Seq. ID no. 1819038
  misc_feature (147)..(334): Pfam Name: Protein of unknown function, DUF607 Pfam Description: Protein of unknown function, DUF607
  misc_feature (104)..(341): Homolog of NCBI NO: 34909244 NR Description: B1148D12.10 [Oryza sativa (japonica
  misc_feature (1)..(342): Homolog of NCBI NO: 15234535 NR Description: putative protein; protein id: At4g36820.1
  misc_feature (2)..(342): Homolog of NCBI NO: 15224063 NR Description: hypothetical protein; protein id: At2g23790.1
  misc_feature (2)..(342): Homolog of NCBI NO: 24496456 NR Description: hypothetical protein [Arabidopsis thaliana]
  misc_feature (15)..(327): Homolog of NCBI NO: 14596231 NR Description: Unknown protein [Arabidopsis thaliana]
  misc_feature (15)..(327): Homolog of NCBI NO: 15240047 NR Description: putative protein; protein id: At5g66650.1, by cDNA: gi_14596230 [Arabidopsis thaliana] contains similarity to unknown
  misc_feature (81)..(323): Homolog of NCBI NO: 37535778 NR Description: unknown protein [Oryza sativa (japonica
  misc_feature (95)..(329): Homolog of NCBI NO: 15239011 NR Description: unknown protein; protein id: At5g42610.1 thaliana] >gi|10177139|dbj|BAB10499.1| gene_id:MFO20.2~unknown
  misc_feature (71)..(323): Homolog of NCBI NO: 20330769 NR Description: Hypothetical protein [Oryza sativa (japonica
  misc_feature (101)..(322): Homolog of NCBI NO: 22330290 NR Description: hypothetical protein; protein id: At1g57610.1, by cDNA: gi_17979162 [Arabidopsis thaliana]
MMKKLLSNRLFNMSKTASQSLMNCRTSSSSSLAMRTRVPKDIGEATIDPEPGDLTISQRFLNKFSMNGIDTTSKMSIGESLMEKLKEMDMNKDRIRLDGLSHPKEETLGLTVQDVKKLLRAAEIEVIKTKLMETGKIWIRYSDFLGVCSDSSLDPSQGALIAKMLDDSGNVIVMGNSVCLRPHQVLCVDQLTKSIEGLLPLSQIHNPNDPRRKELNELEAIKTVIDQKAHSLVRRELWAGLGYLIIQTAGFMRLTFWDLTWDVMEPICFYVSSVYFMAGYTFFLKTSREPSFQGFYQSRFEAKQRKLMQSEDFDVGRYDELKKLFNPKPSGAVPKILGSLQN

SEQ ID NO: 69569 - protein, 341 aa, Arabidopsis thaliana
  peptide (1)..(341): Ceres Seq. ID no. 1819039
  misc_feature (146)..(333): Pfam Name: Protein of unknown function, DUF607 Pfam Description: Protein of unknown function, DUF607
  misc_feature (1)..(341): Homolog of NCBI NO: 15234535 NR Description: putative protein; protein id: At4g36820.1
  misc_feature (1)..(341): Homolog of NCBI NO: 15224063 NR Description: hypothetical protein; protein id: At2g23790.1
  misc_feature (1)..(341): Homolog of NCBI NO: 24496456 NR Description: hypothetical protein [Arabidopsis thaliana]
  misc_feature (14)..(326): Homolog of NCBI NO: 14596231 NR Description: Unknown protein [Arabidopsis thaliana]
  misc_feature (14)..(326): Homolog of NCBI NO: 15240047 NR Description: putative protein; protein id: At5g66650.1, by cDNA: gi_14596230 [Arabidopsis thaliana] contains similarity to unknown
  misc_feature (80)..(322): Homolog of NCBI NO: 37535778 NR Description: unknown protein [Oryza sativa (japonica
  misc_feature (94)..(328): Homolog of NCBI NO: 15239011 NR Description: unknown protein; protein id: At5g42610.1 thaliana] >gi|10177139|dbj|BAB10499.1| gene_id:MFO20.2~unknown
  misc_feature (70)..(322): Homolog of NCBI NO: 20330769 NR Description: Hypothetical protein [Oryza sativa (japonica
  misc_feature (100)..(321): Homolog of NCBI NO: 22330290 NR Description: hypothetical protein; protein id: At1g57610.1, by cDNA: gi_17979162 [Arabidopsis thaliana]
  misc_feature (103)..(340): Homolog of NCBI NO: 34909244 NR Description: B1148D12.10 [Oryza sativa (japonica
MKKLLSNRLFNMSKTASQSLMNCRTSSSSSLAMRTRVPKDIGEATIDPEPGDLTISQRFLNKFSMNGIDTTSKMSIGESLMEKLKEMDMNKDRIRLDGLSHPKEETLGLTVQDVKKLLRAAEIEVIKTKLMETGKIWIRYSDFLGVCSDSSLDPSQGALIAKMLDDSGNVIVMGNSVCLRPHQVLCVDQLTKSIEGLLPLSQIHNPNDPRRKELNELEAIKTVIDQKAHSLVRRELWAGLGYLIIQTAGFMRLTFWDLTWDVMEPICFYVSSVYFMAGYTFFLKTSREPSFQGFYQSRFEAKQRKLMQSEDFDVGRYDELKKLFNPKPSGAVPKILGSLQN

SEQ ID NO: 69570 - DNA, 1212 bp, Arabidopsis thaliana
  misc_feature (1)..(1212): Ceres Seq. ID no. 1819132
  misc_feature: MA Experiment ID: 20000794 Result: Up-regulated in Transcription
  misc_feature: MA Experiment 20000794 PARAMETER Experiment Name: At_Petals_P Parameter: Age (day) Value: 23-25 days
  misc_feature: MA Experiment 20000794 PARAMETER Experiment Name: At_Petals_P Parameter: Plant Line Value: WS
  misc_feature: MA Experiment 20000794 PARAMETER Experiment Name: At_Petals_P Parameter: Tissue Value: Petals vs. Whole plant
atggaagaaaagctgccaaaatcgctcaagaatctcgatttgaatacgaatcgtggtcgtggaccagagaataagattcttgtttcagcttatgtatcttcgtcacgtaagcctcgctttcgacaatctttcttttctcgagctcggttaaaattgggttctgagaatggattactgaatttgggtctaagcatggctggtggaatgtctccactgaaatcaaaacctccatctcttgtgagctcatgtcttggtgttattgggaagcatttggaggatatgattcgttgtttagctgaaatctctgttatatttcctgcagacatcaagatgtcgattgcagcaattgctagaagaaaaaagctgctggatgatgatgtgattatctgtttggctgacagttcctgggaaattctagatgttagcggttcagatgttacgaattttggcttagctaaagtggcagaaatctgcaaatctctccgagctgtggacattaggtattatagttgcttgctaagaatttactctggtcttgctggttctttagtttggggcttctgtatgttggataagtggtgctcccggtgcaacaaaatctcatccatgggcgtcttagagcttgtacaacactgcagatcattggagactcttagatgcgggggatgcccaagcagtgagtccacggcacgcagatctttgagtatttttaagccaaacttgagtaatgttgaaggagaaacatgggaagaaatagacacttcagagattggccatggtggtcaatcattgcgttggcttgtttggccacgaattgataaggattcactggagatgttatcctcggagtgtccaagaatagtggtaaatcccaagccatcacttgtcgcgtacagagcagacgaggttcctcgagaagcactaccagatgttgcactggacgaaccatttgtcaaagatattgatcctaagacgtgggttgttactggagttgtgcagaagcccacatctttcccgttaagcaatgaactgtcaatagcagagaagttcagactagcatttgcagagagagatgcaagaatggcccctaaacgtgcaaagaatgcaaggcaacgtcaacgtcgtgctgagagggattggatgatgtcaagcgacgaagccaaagcaatggtttttgcatcaaaggctaccagatctttgcacaagagttaa

SEQ ID NO: 69571 - protein, 403 aa, Arabidopsis thaliana
  peptide (1)..(403): Ceres Seq. ID no. 1819133
  misc_feature (1)..(403): Homolog of NCBI NO: 7485340 NR Description: hypothetical protein F10M23.320 - Arabidopsis >gi|4455221|emb|CAB36544.1| putative protein [Arabidopsis >gi|7269551|emb|CAB79553.1| putative protein [Arabidopsis
  misc_feature (195)..(403): Homolog of NCBI NO: 30687441 NR Description: expressed protein [Arabidopsis thaliana]
  misc_feature (53)..(166): Homolog of NCBI NO: 30687441 NR Description: expressed protein [Arabidopsis thaliana]
  misc_feature (1)..(164): Homolog of NCBI NO: 30687441 NR Description: expressed protein [Arabidopsis thaliana]
MEEKLPKSLKNLDLNTNRGRGPENKILVSAYVSSSRKPRFRQSFFSRARLKLGSENGLLNLGLSMAGGMSPLKSKPPSLVSSCLGVIGKHLEDMIRCLAEISVIFPADIKMSIAAIARRKKLLDDDVIICLADSSWEILDVSGSDVTNFGLAKVAEICKSLRAVDIRYYSCLLRIYSGLAGSLVWGFCMLDKWCSRCNKISSMGVLELVQHCRSLETLRCGGCPSSESTARRSLSIFKPNLSNVEGETWEEIDTSEIGHGGQSLRWLVWPRIDKDSLEMLSSECPRIVVNPKPSLVAYRADEVPREALPDVALDEPFVKDIDPKTWVVTGVVQKPTSFPLSNELSIAEKFRLAFAERDARMAPKRAKNARQRQRRAERDWMMSSDEAKAMVFASKATRSLHKS

SEQ ID NO: 69572 - protein, 339 aa, Arabidopsis thaliana
  peptide (1)..(339): Ceres Seq. ID no. 1819134
  misc_feature (1)..(339): Homolog of NCBI NO: 7485340 NR Description: hypothetical protein F10M23.320 - Arabidopsis >gi|4455221|emb|CAB36544.1| putative protein [Arabidopsis >gi|7269551|emb|CAB79553.1| putative protein [Arabidopsis
  misc_feature (131)..(339): Homolog of NCBI NO: 30687441 NR Description: expressed protein [Arabidopsis thaliana]
  misc_feature (1)..(102): Homolog of NCBI NO: 30687441 NR Description: expressed protein [Arabidopsis thaliana]
  misc_feature (1)..(100): Homolog of NCBI NO: 30687441 NR Description: expressed protein [Arabidopsis thaliana]
MAGGMSPLKSKPPSLVSSCLGVIGKHLEDMIRCLAEISVIFPADIKMSIAAIARRKKLLDDDVIICLADSSWEILDVSGSDVTNFGLAKVAEICKSLRAVDIRYYSCLLRIYSGLAGSLVWGFCMLDKWCSRCNKISSMGVLELVQHCRSLETLRCGGCPSSESTARRSLSIFKPNLSNVEGETWEEIDTSEIGHGGQSLRWLVWPRIDKDSLEMLSSECPRIVVNPKPSLVAYRADEVPREALPDVALDEPFVKDIDPKTWVVTGVVQKPTSFPLSNELSIAEKFRLAFAERDARMAPKRAKNARQRQRRAERDWMMSSDEAKAMVFASKATRSLHKS

SEQ ID NO: 69573 - protein, 335 aa, Arabidopsis thaliana
  peptide (1)..(335): Ceres Seq. ID no. 1819135
  misc_feature (1)..(335): Homolog of NCBI NO: 7485340 NR Description: hypothetical protein F10M23.320 - Arabidopsis >gi|4455221|emb|CAB36544.1| putative protein [Arabidopsis >gi|7269551|emb|CAB79553.1| putative protein [Arabidopsis
  misc_feature (127)..(335): Homolog of NCBI NO: 30687441 NR Description: expressed protein [Arabidopsis thaliana]
  misc_feature (1)..(98): Homolog of NCBI NO: 30687441 NR Description: expressed protein [Arabidopsis thaliana]
  misc_feature (1)..(96): Homolog of NCBI NO: 30687441 NR Description: expressed protein [Arabidopsis thaliana]
MSPLKSKPPSLVSSCLGVIGKHLEDMIRCLAEISVIFPADIKMSIAAIARRKKLLDDDVIICLADSSWEILDVSGSDVTNFGLAKVAEICKSLRAVDIRYYSCLLRIYSGLAGSLVWGFCMLDKWCSRCNKISSMGVLELVQHCRSLETLRCGGCPSSESTARRSLSIFKPNLSNVEGETWEEIDTSEIGHGGQSLRWLVWPRIDKDSLEMLSSECPRIVVNPKPSLVAYRADEVPREALPDVALDEPFVKDIDPKTWVVTGVVQKPTSFPLSNELSIAEKFRLAFAERDARMAPKRAKNARQRQRRAERDWMMSSDEAKAMVFASKATRSLHKS

SEQ ID NO: 69574 - DNA, 1317 bp, Arabidopsis thaliana
  misc_feature (1)..(1317): Ceres Seq. ID no. 1819204
  misc_feature: MA Experiment ID: 20000307 Result: Up-regulated in Transcription
  misc_feature: MA Experiment 20000307 PARAMETER Experiment Name: At_Germinating_Seeds_Sub_P Parameter: Age (hr) Value: 24 vs. 0
  misc_feature: MA Experiment 20000307 PARAMETER Experiment Name: At_Germinating_Seeds_Sub_P Parameter: Organism Value: A. thaliana
  misc_feature: MA Experiment 20000307 PARAMETER Experiment Name: At_Germinating_Seeds_Sub_P Parameter: Plant Line Value: WS
  misc_feature: MA Experiment 20000307 PARAMETER Experiment Name: At_Germinating_Seeds_Sub_P Parameter: Tissue Value: Germinating Seeds
  misc_feature: MA Experiment ID: 20000440 Result: Up-regulated in Transcription
  misc_feature: MA Experiment 20000440 PARAMETER Experiment Name: At_Closed-Flower__Sub_P Parameter: Tissue Value: Closed Flower vs. Whole Plant
  misc_feature: Pfam Name: CTP_transf_1 Pfam Description: Cytidylyltransferase family
atgaatactaataaccagagagataaccattatcccaacattcctaattcaccaagggattacaattatactcctagctctccaacagctcgcattcgacaccgcaggcgatcaagcgaggtgaacagaagcaatgtaagcagagtaagcaatttgttacttggtgataagaacaagtacagatcaatgtggataaggacatgctcatctctctggatgctcggtggagttgtgtttataatctacatgggtcatctctacatttgggctatggttgtggttatacagatattcatggccaaagagctcttctttcttcgcagaagagctcatgaagaacgtcgcttacccggtttctggctcttgaattggcacttcttcttcacggctatgttgtttgtctatggacgcatcattcaacagcagctagtcaacacggtttcttcagatagattcatatacaagcttgtgagtggtcttatcaagtaccagatggttatttgctacttcttgtacatcgcaggtctcatatggtttatccttacattgaagaataagatgtataagtatcagtttgggcaatacgcttggacacatatgatccttatcgttgtctttactcaatcttctttcaccgtcgccaatatttttgaagggatcttctggtttcttctaccagcagcactgattgctatgaacgatgtagcagcttacttcttcggtttctatttcgggaaaactccgctcatcaagttgtctccaaagaaaacatgggaaggtttcatcggagcatcagttgcaactataatctctgcatttatttttgctaatgtcttaggccagttccaatggcttacatgtccaaggaaggatttttcaactggttggcttcattgtgatccaggccctctcttcaggccagagtattacccatttccctcttggattactccattttctccatggaaagggatctcgaccctgcctgtccaatggcatgctttttctctcggtctattcgcatccattatggcgccttttggtggcttcttcgcaagcggtttcaaaagagctttcaagatcaaggatttcggagacagcataccaggacatggaggatttactgacagaatggattgccaaatggttatggcggttttcgcatacatctacatccaatctttcattgttaatcgggactacagtgtcgagatgatcctagaccagatatcgaggagcctgggacacgaggagcagaaaatgctttatgaaaagctcggagacattcttcaacataagttgcaagggaggttttaa

SEQ ID NO: 69575 - protein, 438 aa, Arabidopsis thaliana
  peptide (1)..(438): Ceres Seq. ID no. 1819205
  misc_feature: Pfam Name: CTP_transf_1 Pfam Description: Cytidylyltransferase family
  misc_feature (1)..(438): Homolog of NCBI NO: 15236874 NR Description: putative CDP-diacylglycerol synthetase; protein
  misc_feature (24)..(430): Homolog of NCBI NO: 20303635 NR Description: putative CDP-diacylglycerol synthetase [Oryza
  misc_feature (25)..(436): Homolog of NCBI NO: 3121837 NR Description: Phosphatidate cytidylyltransferase
  misc_feature (24)..(434): Homolog of NCBI NO: 30696710 NR Description: phosphatidate cytidylyltransferase (CDS) thaliana] >gi|3121836|sp|O04928|CDS1_ARATH Phosphatidate
  misc_feature (24)..(434): Homolog of NCBI NO: 7484839 NR Description: CDP-diacylglycerol synthetase homolog F24O1.17 -
  misc_feature (25)..(436): Homolog of NCBI NO: 15235611 NR Description: CDP-diacylglycerol synthetase-like protein; id: At4g22340.1, supported by cDNA: 112115., supported by cDNA:
  misc_feature (24)..(148): Homolog of NCBI NO: 37532798 NR Description: putative phosphatidate cytidylyltransferase
  misc_feature (291)..(381): Homolog of NCBI NO: 37532798 NR Description: putative phosphatidate cytidylyltransferase
  misc_feature (399)..(430): Homolog of NCBI NO: 37532798 NR Description: putative phosphatidate cytidylyltransferase
  misc_feature (53)..(426): Homolog of NCBI NO: 7676150 NR Description: PHOSPHATIDATE CYTIDYLYLTRANSFERASE 1
MNTNNQRDNHYPNIPNSPRDYNYTPSSPTARIRHRRRSSEVNRSNVSRVSNLLLGDKNKYRSMWIRTCSSLWMLGGVVFIIYMGHLYIWAMVVVIQIFMAKELFFLRRRAHEERRLPGFWLLNWHFFFTAMLFVYGRIIQQQLVNTVSSDRFIYKLVSGLIKYQMVICYFLYIAGLIWFILTLKNKMYKYQFGQYAWTHMILIVVFTQSSFTVANIFEGIFWFLLPAALIAMNDVAAYFFGFYFGKTPLIKLSPKKTWEGFIGASVATIISAFIFANVLGQFQWLTCPRKDFSTGWLHCDPGPLFRPEYYPFPSWITPFSPWKGISTLPVQWHAFSLGLFASIMAPFGGFFASGFKRAFKIKDFGDSIPGHGGFTDRMDCQMVMAVFAYIYIQSFIVNRDYSVEMILDQISRSLGHEEQKMLYEKLGDILQHKLQGRF

SEQ ID NO: 69576 - protein, 376 aa, Arabidopsis thaliana
  peptide (1)..(376): Ceres Seq. ID no. 1819206
  misc_feature: Pfam Name: CTP_transf_1 Pfam Description: Cytidylyltransferase family
  misc_feature (1)..(376): Homolog of NCBI NO: 15236874 NR Description: putative CDP-diacylglycerol synthetase; protein
  misc_feature (1)..(368): Homolog of NCBI NO: 20303635 NR Description: putative CDP-diacylglycerol synthetase [Oryza
  misc_feature (1)..(374): Homolog of NCBI NO: 3121837 NR Description: Phosphatidate cytidylyltransferase
  misc_feature (1)..(372): Homolog of NCBI NO: 30696710 NR Description: phosphatidate cytidylyltransferase (CDS) thaliana] >gi|3121836|sp|O04928|CDS1_ARATH Phosphatidate
  misc_feature (1)..(372): Homolog of NCBI NO: 7484839 NR Description: CDP-diacylglycerol synthetase homolog F24O1.17 -
  misc_feature (1)..(374): Homolog of NCBI NO: 15235611 NR Description: CDP-diacylglycerol synthetase-like protein; id: At4g22340.1, supported by cDNA: 112115., supported by cDNA:
  misc_feature (1)..(86): Homolog of NCBI NO: 37532798 NR Description: putative phosphatidate cytidylyltransferase
  misc_feature (229)..(319): Homolog of NCBI NO: 37532798 NR Description: putative phosphatidate cytidylyltransferase
  misc_feature (337)..(368): Homolog of NCBI NO: 37532798 NR Description: putative phosphatidate cytidylyltransferase
  misc_feature (1)..(364): Homolog of NCBI NO: 7676150 NR Description: PHOSPHATIDATE CYTIDYLYLTRANSFERASE 1
MWIRTCSSLWMLGGVVFIIYMGHLYIWAMVVVIQIFMAKELFFLRRRAHEERRLPGFWLLNWHFFFTAMLFVYGRIIQQQLVNTVSSDRFIYKLVSGLIKYQMVICYFLYIAGLIWFILTLKNKMYKYQFGQYAWTHMILIVVFTQSSFTVANIFEGIFWFLLPAALIAMNDVAAYFFGFYFGKTPLIKLSPKKTWEGFIGASVATIISAFIFANVLGQFQWLTCPRKDFSTGWLHCDPGPLFRPEYYPFPSWITPFSPWKGISTLPVQWHAFSLGLFASIMAPFGGFFASGFKRAFKIKDFGDSIPGHGGFTDRMDCQMVMAVFAYIYIQSFIVNRDYSVEMILDQISRSLGHEEQKMLYEKLGDILQHKLQGRF

SEQ ID NO: 69577 - protein, 366 aa, Arabidopsis thaliana
  peptide (1)..(366): Ceres Seq. ID no. 1819207
  misc_feature: Pfam Name: CTP_transf_1 Pfam Description: Cytidylyltransferase family
  misc_feature (1)..(366): Homolog of NCBI NO: 15236874 NR Description: putative CDP-diacylglycerol synthetase; protein
  misc_feature (1)..(358): Homolog of NCBI NO: 20303635 NR Description: putative CDP-diacylglycerol synthetase [Oryza
  misc_feature (1)..(364): Homolog of NCBI NO: 3121837 NR Description: Phosphatidate cytidylyltransferase
  misc_feature (1)..(362): Homolog of NCBI NO: 30696710 NR Description: phosphatidate cytidylyltransferase (CDS) thaliana] >gi|3121836|sp|O04928|CDS1_ARATH Phosphatidate
  misc_feature (1)..(362): Homolog of NCBI NO: 7484839 NR Description: CDP-diacylglycerol synthetase homolog F24O1.17 -
  misc_feature (1)..(364): Homolog of NCBI NO: 15235611 NR Description: CDP-diacylglycerol synthetase-like protein; id: At4g22340.1, supported by cDNA: 112115., supported by cDNA:
  misc_feature (1)..(76): Homolog of NCBI NO: 37532798 NR Description: putative phosphatidate cytidylyltransferase
  misc_feature (219)..(309): Homolog of NCBI NO: 37532798 NR Description: putative phosphatidate cytidylyltransferase
  misc_feature (327)..(358): Homolog of NCBI NO: 37532798 NR Description: putative phosphatidate cytidylyltransferase
  misc_feature (1)..(354): Homolog of NCBI NO: 7676150 NR Description: PHOSPHATIDATE CYTIDYLYLTRANSFERASE 1
MLGGVVFIIYMGHLYIWAMVVVIQIFMAKELFFLRRRAHEERRLPGFWLLNWHFFFTAMLFVYGRIIQQQLVNTVSSDRFIYKLVSGLIKYQMVICYFLYIAGLIWFILTLKNKMYKYQFGQYAWTHMILIVVFTQSSFTVANIFEGIFWFLLPAALIAMNDVAAYFFGFYFGKTPLIKLSPKKTWEGFIGASVATIISAFIFANVLGQFQWLTCPRKDFSTGWLHCDPGPLFRPEYYPFPSWITPFSPWKGISTLPVQWHAFSLGLFASIMAPFGGFFASGFKRAFKIKDFGDSIPGHGGFTDRMDCQMVMAVFAYIYIQSFIVNRDYSVEMILDQISRSLGHEEQKMLYEKLGDILQHKLQGRF

SEQ ID NO: 69578 - DNA, 1095 bp, Arabidopsis thaliana
  misc_feature (1)..(1095): Ceres Seq. ID no. 1819255
  misc_feature: MA Experiment ID: 20000171 Result: Down-regulated in Transcription
  misc_feature: MA Experiment 20000171 PARAMETER Experiment Name: At_42deg_Heat_P Parameter: Age (day) Value: 14
  misc_feature: MA Experiment 20000171 PARAMETER Experiment Name: At_42deg_Heat_P Parameter: Organism Value: A. thaliana
  misc_feature: MA Experiment 20000171 PARAMETER Experiment Name: At_42deg_Heat_P Parameter: Plant Line Value: WS
  misc_feature: MA Experiment 20000171 PARAMETER Experiment Name: At_42deg_Heat_P Parameter: Temperature (deg C) Value: 42 vs. 22
  misc_feature: MA Experiment 20000171 PARAMETER Experiment Name: At_42deg_Heat_P Parameter: Timepoint (hr) Value: 1
  misc_feature: MA Experiment 20000171 PARAMETER Experiment Name: At_42deg_Heat_P Parameter: Tissue Value: Aerial
  misc_feature: MA Experiment ID: 20000227 Result: Down-regulated in Transcription
  misc_feature: MA Experiment 20000227 PARAMETER Experiment Name: At_Root-Tips-vs-Tops_P Parameter: Tissue Value: Root Tips vs. Root Tops
  misc_feature: MA Experiment ID: 20001560 Result: Down-regulated in Transcription
  misc_feature: MA Experiment 20001560 PARAMETER Experiment Name: At_Drought_Soil_Dry_P Parameter: Age (day) Value: 28
  misc_feature: MA Experiment 20001560 PARAMETER Experiment Name: At_Drought_Soil_Dry_P Parameter: Organism Value: A. thaliana
  misc_feature: MA Experiment 20001560 PARAMETER Experiment Name: At_Drought_Soil_Dry_P Parameter: Plant Line Value: WS
  misc_feature: MA Experiment 20001560 PARAMETER Experiment Name: At_Drought_Soil_Dry_P Parameter: Post Timepoint (hr) Value: None
  misc_feature: MA Experiment 20001560 PARAMETER Experiment Name: At_Drought_Soil_Dry_P Parameter: Post-Treatment Value: None
  misc_feature: MA Experiment 20001560 PARAMETER Experiment Name: At_Drought_Soil_Dry_P Parameter: Timepoint (day) Value: 14
  misc_feature: MA Experiment 20001560 PARAMETER Experiment Name: At_Drought_Soil_Dry_P Parameter: Treatment Value: Drought vs. No Drought
atgaggaataatcctgtccttccggtttccgatcctcccctcgccggtgagaatgatagcgatggtaaaggtgtcgatgatcggcttttcaaaggatctgccatgaccaaacgtggagcttatgctgctctttcttacatggcttgtgctggtaatttcctcgatttcacttgtatcattgattcgaatcacgtgttttggagtagagtccagttctggaagatcatctctttcacagctgctgattctttttctattgatagtgcctcaacctttgtgccagtgaagacattgtttcacacccttcctctagcaatagcatatcttttgtacatggttgtattactctgctcgtgcgtgctggctttcgtcttaaactactgcattttccttaacaccactctcaattcagctttgacgcagacaatttgtggcaatatgaaggatctattcacggttggactaggctggatgctctttggaggactcccattcgacctgatgaatgtgattggacagctttttggtttcttcggcccgggaaaatcaaattttctcaataatcaatctatggacgttccaccacgccgctctttggctgcgtctctctcgcctctccggctaatcgatggactccctcgtcggaggagtttcaattataatcagatgcctgaagagcccatcaaactcactgttctcaagcttgatggatcttcctttggtattcaagtgttgaagacagcgacagtaggggagctcaagatggcagtagaagctgcgttttctcacttgcccatctcaggccctggcaagatctcatggttctcaaccacaccggaaacccggaaaaagaacgtaataagggaagttgaagaagacggtgttgttgactccatccctcggagccaaccaagctttctagcaactgtattgggaggtttgctctcttacaagtcgacgccaagtcaacgaggtactaaatacagaaacgtgactgcaagtagagtttttaacaaactcattgcaaggtttcgtttcaagtgtaattccgagaaggatgtgtggaacagaaaaaaactcatatccgaaacctaa

SEQ ID NO: 69579 - protein, 364 aa, Arabidopsis thaliana
  peptide (1)..(364): Ceres Seq. ID no. 1819256
  misc_feature (228)..(259): Pfam Name: Ubiquitin family Pfam Description: Ubiquitin family
  misc_feature (1)..(364): Homolog of NCBI NO: 15236724 NR Description: hypothetical protein; protein id: At4g32270.1
  misc_feature (266)..(364): Homolog of NCBI NO: 26450559 NR Description: unknown protein [Arabidopsis thaliana]
  misc_feature (191)..(274): Homolog of NCBI NO: 26450559 NR Description: unknown protein [Arabidopsis thaliana]
  misc_feature (215)..(274): Homolog of NCBI NO: 15239396 NR Description: putative protein; protein id: At5g25340.1, by cDNA: 262084. [Arabidopsis thaliana] unknown protein [Arabidopsis thaliana]
  misc_feature (215)..(274): Homolog of NCBI NO: 21554720 NR Description: unknown [Arabidopsis thaliana]
MRNNPVLPVSDPPLAGENDSDGKGVDDRLFKGSAMTKRGAYAALSYMACAGNFLDFTCIIDSNHVFWSRVQFWKIISFTAADSFSIDSASTFVPVKTLFHTLPLAIAYLLYMVVLLCSCVLAFVLNYCIFLNTTLNSALTQTICGNMKDLFTVGLGWMLFGGLPFDLMNVIGQLFGFFGPGKSNFLNNQSMDVPPRRSLAASLSPLRLIDGLPRRRSFNYNQMPEEPIKLTVLKLDGSSFGIQVLKTATVGELKMAVEAAFSHLPISGPGKISWFSTTPETRKKNVIREVEEDGVVDSIPRSQPSFLATVLGGLLSYKSTPSQRGTKYRNVTASRVFNKLIARFRFKCNSEKDVWNRKKLISET

SEQ ID NO: 69580 - protein, 330 aa, Arabidopsis thaliana
  peptide (1)..(330): Ceres Seq. ID no. 1819257
  misc_feature (194)..(225): Pfam Name: Ubiquitin family Pfam Description: Ubiquitin family
  misc_feature (1)..(330): Homolog of NCBI NO: 15236724 NR Description: hypothetical protein; protein id: At4g32270.1
  misc_feature (232)..(330): Homolog of NCBI NO: 26450559 NR Description: unknown protein [Arabidopsis thaliana]
  misc_feature (157)..(240): Homolog of NCBI NO: 26450559 NR Description: unknown protein [Arabidopsis thaliana]
  misc_feature (181)..(240): Homolog of NCBI NO: 15239396 NR Description: putative protein; protein id: At5g25340.1, by cDNA: 262084. [Arabidopsis thaliana] unknown protein [Arabidopsis thaliana]
  misc_feature (181)..(240): Homolog of NCBI NO: 21554720 NR Description: unknown [Arabidopsis thaliana]
MTKRGAYAALSYMACAGNFLDFTCIIDSNHVFWSRVQFWKIISFTAADSFSIDSASTFVPVKTLFHTLPLAIAYLLYMVVLLCSCVLAFVLNYCIFLNTTLNSALTQTICGNMKDLFTVGLGWMLFGGLPFDLMNVIGQLFGFFGPGKSNFLNNQSMDVPPRRSLAASLSPLRLIDGLPRRRSFNYNQMPEEPIKLTVLKLDGSSFGIQVLKTATVGELKMAVEAAFSHLPISGPGKISWFSTTPETRKKNVIREVEEDGVVDSIPRSQPSFLATVLGGLLSYKSTPSQRGTKYRNVTASRVFNKLIARFRFKCNSEKDVWNRKKLISET

SEQ ID NO: 69581 - protein, 318 aa, Arabidopsis thaliana
  peptide (1)..(318): Ceres Seq. ID no. 1819258
  misc_feature (182)..(213): Pfam Name: Ubiquitin family Pfam Description: Ubiquitin family
  misc_feature (1)..(318): Homolog of NCBI NO: 15236724 NR Description: hypothetical protein; protein id: At4g32270.1
  misc_feature (220)..(318): Homolog of NCBI NO: 26450559 NR Description: unknown protein [Arabidopsis thaliana]
  misc_feature (145)..(228): Homolog of NCBI NO: 26450559 NR Description: unknown protein [Arabidopsis thaliana]
  misc_feature (169)..(228): Homolog of NCBI NO: 15239396 NR Description: putative protein; protein id: At5g25340.1, by cDNA: 262084. [Arabidopsis thaliana] unknown protein [Arabidopsis thaliana]
  misc_feature (169)..(228): Homolog of NCBI NO: 21554720 NR Description: unknown [Arabidopsis thaliana]
MACAGNFLDFTCIIDSNHVFWSRVQFWKIISFTAADSFSIDSASTFVPVKTLFHTLPLAIAYLLYMVVLLCSCVLAFVLNYCIFLNTTLNSALTQTICGNMKDLFTVGLGWMLFGGLPFDLMNVIGQLFGFFGPGKSNFLNNQSMDVPPRRSLAASLSPLRLIDGLPRRRSFNYNQMPEEPIKLTVLKLDGSSFGIQVLKTATVGELKMAVEAAFSHLPISGPGKISWFSTTPETRKKNVIREVEEDGVVDSIPRSQPSFLATVLGGLLSYKSTPSQRGTKYRNVTASRVFNKLIARFRFKCNSEKDVWNRKKLISET

SEQ ID NO: 69582 - DNA, 1140 bp, Arabidopsis thaliana
  misc_feature (1)..(1140): Ceres Seq. ID no. 1819289
  misc_feature: MA Experiment ID: 20000173 Result: Down-regulated in Transcription
  misc_feature: MA Experiment 20000173 PARAMETER Experiment Name: At_42deg_Heat_P Parameter: Age (day) Value: 14
  misc_feature: MA Experiment 20000173 PARAMETER Experiment Name: At_42deg_Heat_P Parameter: Organism Value: A. thaliana
  misc_feature: MA Experiment 20000173 PARAMETER Experiment Name: At_42deg_Heat_P Parameter: Plant Line Value: WS
  misc_feature: MA Experiment 20000173 PARAMETER Experiment Name: At_42deg_Heat_P Parameter: Temperature (deg C) Value: 42 vs. 22
  misc_feature: MA Experiment 20000173 PARAMETER Experiment Name: At_42deg_Heat_P Parameter: Timepoint (hr) Value: 6
  misc_feature: MA Experiment 20000173 PARAMETER Experiment Name: At_42deg_Heat_P Parameter: Tissue Value: Aerial
  misc_feature: MA Experiment ID: 20000180 Result: Up-regulated in Transcription
  misc_feature: MA Experiment 20000180 PARAMETER Experiment Name: At_Germinating_Seeds_P Parameter: Age (hr) Value: 24 vs. 0
  misc_feature: MA Experiment 20000180 PARAMETER Experiment Name: At_Germinating_Seeds_P Parameter: Tissue Value: Germinating Seeds
  misc_feature: MA Experiment ID: 20000185 Result: Down-regulated in Transcription
  misc_feature: MA Experiment 20000185 PARAMETER Experiment Name: At_Roots__P Parameter: Age (day) Value: 7 vs. 21
  misc_feature: MA Experiment 20000185 PARAMETER Experiment Name: At_Roots__P Parameter: Organism Value: A. thaliana
  misc_feature: MA Experiment 20000185 PARAMETER Experiment Name: At_Roots__P Parameter: Tissue Value: Roots vs. Whole Plant
  misc_feature: MA Experiment ID: 20000235 Result: Up-regulated in Transcription
  misc_feature: MA Experiment 20000235 PARAMETER Experiment Name: At_Siliques_P Parameter: Age (day) Value: 21
  misc_feature: MA Experiment 20000235 PARAMETER Experiment Name: At_Siliques_P Parameter: Organism Value: A. thaliana
  misc_feature: MA Experiment 20000235 PARAMETER Experiment Name: At_Siliques_P Parameter: Plant Line Value: WS
  misc_feature: MA Experiment 20000235 PARAMETER Experiment Name: At_Siliques_P Parameter: Tissue Value: 5-10mm Siliques vs. Whole Plant
  misc_feature: MA Experiment ID: 20000265 Result: Up-regulated in Transcription
  misc_feature: MA Experiment 20000265 PARAMETER Experiment Name: At_Open_Flower_P Parameter: Age (day) Value: 21
  misc_feature: MA Experiment 20000265 PARAMETER Experiment Name: At_Open_Flower_P Parameter: Plant Line Value: WS
  misc_feature: MA Experiment 20000265 PARAMETER Experiment Name: At_Open_Flower_P Parameter: Tissue Value: Closed Flower vs. Whole Plant
  misc_feature: MA Experiment ID: 20000437 Result: Down-regulated in Transcription
  misc_feature: MA Experiment 20000437 PARAMETER Experiment Name: At_Drought_P Parameter: Age (day) Value: 8
  misc_feature: MA Experiment 20000437 PARAMETER Experiment Name: At_Drought_P Parameter: Organism Value: A. thaliana
  misc_feature: MA Experiment 20000437 PARAMETER Experiment Name: At_Drought_P Parameter: Plant Line Value: WS
  misc_feature: MA Experiment 20000437 PARAMETER Experiment Name: At_Drought_P Parameter: Timepoint (hr) Value: 24
  misc_feature: MA Experiment 20000437 PARAMETER Experiment Name: At_Drought_P Parameter: Tissue Value: Whole Plant
  misc_feature: MA Experiment 20000437 PARAMETER Experiment Name: At_Drought_P Parameter: Treatment Value: Drought vs. No Drought
  misc_feature: MA Experiment ID: 20000441 Result: Down-regulated in Transcription
  misc_feature: MA Experiment 20000441 PARAMETER Experiment Name: At_1uM_BR-BRZ__P Parameter: Tissue Value: Shoot Apices
  misc_feature: MA Experiment 20000441 PARAMETER Experiment Name: At_1uM_BR-BRZ__P Parameter: Treatment Value: 1uM BR vs. No Treatment
  misc_feature: MA Experiment ID: 20000443 Result: Down-regulated in Transcription
  misc_feature: MA Experiment 20000443 PARAMETER Experiment Name: At_1uM_BR-BRZ__P Parameter: Tissue Value: Shoot Apices
  misc_feature: MA Experiment 20000443 PARAMETER Experiment Name: At_1uM_BR-BRZ__P Parameter: Treatment Value: 1uM BRZ vs. No Treatment
  misc_feature: MA Experiment ID: 20000794 Result: Up-regulated in Transcription
  misc_feature: MA Experiment 20000794 PARAMETER Experiment Name: At_Petals_P Parameter: Age (day) Value: 23-25 days
  misc_feature: MA Experiment 20000794 PARAMETER Experiment Name: At_Petals_P Parameter: Plant Line Value: WS
  misc_feature: MA Experiment 20000794 PARAMETER Experiment Name: At_Petals_P Parameter: Tissue Value: Petals vs. Whole plant
  misc_feature: MA Experiment ID: 20001911 Result: Down-regulated in Transcription
  misc_feature: MA Experiment 20001911 PARAMETER Experiment Name: At_Drought_Reproduction_P Parameter: Age (day) Value: 40
  misc_feature: MA Experiment 20001911 PARAMETER Experiment Name: At_Drought_Reproduction_P Parameter: Organism Value: A. thaliana
  misc_feature: MA Experiment 20001911 PARAMETER Experiment Name: At_Drought_Reproduction_P Parameter: Plant Line Value: WS
  misc_feature: MA Experiment 20001911 PARAMETER Experiment Name: At_Drought_Reproduction_P Parameter: Timepoint (day) Value: 10
  misc_feature: MA Experiment 20001911 PARAMETER Experiment Name: At_Drought_Reproduction_P Parameter: Tissue Value: Flowers
  misc_feature: MA Experiment 20001911 PARAMETER Experiment Name: At_Drought_Reproduction_P Parameter: Treatment Value: Drought vs. No Drought
atgggaaagattcttcatcttcttcttcttcttcttaaggtctctgttcttgaattcatcattagtgtttctgcttttacttcacctgcttcacagccttctctttctcctgtttacacttccatggcttccttttctccagggatccacatgggcaaaggccaagaacacaagttagatgcacacaagaaacttctaatcgctctcataatcacctcatcttctctaggactaatacttgtatcttgtttatgcttttgggtttattggtctaagaaatctcccaaaaacaccaagaactcaggtaataatcatcttaacattaagaatgagaacaaatctgcaaaactttacatttgtaacaagattctgtatcagtttcttcattgtgatctctctgttttgatatctaaatggtttcatgcggaagaaggtgagagtaggatttcattatccaagaagggctttgtgcagtccttcgattacaagacactagagaaagcaacaggcggtttcaaagacggtaatcttataggacgaggcgggttcggagatgtttacaaggcctgtttaggcaacaacactctagcagcagtcaaaaagatcgaaaacgttagtcaagaagcaaaacgagaatttcaggtaccaaaacaaaacacaactgttgagtatctccacgagcgttgtcgtcctccggttatccacagagatcttaaatcgtcaaatattctccttgattcttccttcaacgccaagatttcggattttggtcttgcggtaatggtgggggctcacggcaaaaacaacattaaactatcaggaacacttggttatgttgctccagaatatctcctagatggaaaattgacggataagagtgatgtttatgcgtttggtgtggttttacttgaactcttgttaggaagacggccggttgagaaattgagttcggttcagtgtcaatctcttgtcacttggatagcattggttaatgagtgtaccgtttcgaaaaatttgcaggcaatgccccaacttacggatagatcaaagcttccgaaaatcgtggatccggttatcaaagatacaatggatcataagcacttataccaggtttgcgtcatcttttgtctttgtgtttag

SEQ ID NO: 69583 - protein, 379 aa, Arabidopsis thaliana
  peptide (1)..(379): Ceres Seq. ID no. 1819290
  misc_feature (172)..(234): Pfam Name: Protein kinase domain Pfam Description: Protein kinase domain
  misc_feature (1)..(379): Homolog of NCBI NO: 7434336 NR Description: hypothetical protein F10N7.190 - Arabidopsis >gi|3858939|emb|CAA16589.1| serine/threonine protein kinase like
  misc_feature (145)..(379): Homolog of NCBI NO: 30689231 NR Description: protein kinase family [Arabidopsis thaliana]
  misc_feature (1)..(111): Homolog of NCBI NO: 30689231 NR Description: protein kinase family [Arabidopsis thaliana]
  misc_feature (222)..(347): Homolog of NCBI NO: 15224692 NR Description: hypothetical protein; protein id: At2g25220.1
  misc_feature (146)..(218): Homolog of NCBI NO: 15224692 NR Description: hypothetical protein; protein id: At2g25220.1
  misc_feature (69)..(234): Homolog of NCBI NO: 11358833 NR Description: ser/thr specific protein kinase-like protein -
  misc_feature (222)..(379): Homolog of NCBI NO: 11358833 NR Description: ser/thr specific protein kinase-like protein -
  misc_feature (222)..(379): Homolog of NCBI NO: 30683447 NR Description: protein kinase family [Arabidopsis thaliana]
  misc_feature (152)..(234): Homolog of NCBI NO: 30683447 NR Description: protein kinase family [Arabidopsis thaliana]
  misc_feature (222)..(379): Homolog of NCBI NO: 11259774 NR Description: ser/thr specific protein kinase-like protein -
MGKILHLLLLLLKVSVLEFIISVSAFTSPASQPSLSPVYTSMASFSPGIHMGKGQEHKLDAHKKLLIALIITSSSLGLILVSCLCFWVYWSKKSPKNTKNSGNNHLNIKNENKSAKLYICNKILYQFLHCDLSVLISKWFHAEEGESRISLSKKGFVQSFDYKTLEKATGGFKDGNLIGRGGFGDVYKACLGNNTLAAVKKIENVSQEAKREFQVPKQNTTVEYLHERCRPPVIHRDLKSSNILLDSSFNAKISDFGLAVMVGAHGKNNIKLSGTLGYVAPEYLLDGKLTDKSDVYAFGVVLLELLLGRRPVEKLSSVQCQSLVTWIALVNECTVSKNLQAMPQLTDRSKLPKIVDPVIKDTMDHKHLYQVCVIFCLCV

SEQ ID NO: 69584 - protein, 338 aa, Arabidopsis thaliana
  peptide (1)..(338): Ceres Seq. ID no. 1819291
  misc_feature (131)..(193): Pfam Name: Protein kinase domain Pfam Description: Protein kinase domain
  misc_feature (1)..(338): Homolog of NCBI NO: 7434336 NR Description: hypothetical protein F10N7.190 - Arabidopsis >gi|3858939|emb|CAA16589.1| serine/threonine protein kinase like
  misc_feature (104)..(338): Homolog of NCBI NO: 30689231 NR Description: protein kinase family [Arabidopsis thaliana]
  misc_feature (1)..(70): Homolog of NCBI NO: 30689231 NR Description: protein kinase family [Arabidopsis thaliana]
  misc_feature (181)..(306): Homolog of NCBI NO: 15224692 NR Description: hypothetical protein; protein id: At2g25220.1
  misc_feature (105)..(177): Homolog of NCBI NO: 15224692 NR Description: hypothetical protein; protein id: At2g25220.1
  misc_feature (28)..(193): Homolog of NCBI NO: 11358833 NR Description: ser/thr specific protein kinase-like protein -
  misc_feature (181)..(338): Homolog of NCBI NO: 11358833 NR Description: ser/thr specific protein kinase-like protein -
  misc_feature (181)..(338): Homolog of NCBI NO: 30683447 NR Description: protein kinase family [Arabidopsis thaliana]
  misc_feature (111)..(193): Homolog of NCBI NO: 30683447 NR Description: protein kinase family [Arabidopsis thaliana]
  misc_feature (181)..(338): Homolog of NCBI NO: 11259774 NR Description: ser/thr specific protein kinase-like protein -
MASFSPGIHMGKGQEHKLDAHKKLLIALIITSSSLGLILVSCLCFWVYWSKKSPKNTKNSGNNHLNIKNENKSAKLYICNKILYQFLHCDLSVLISKWFHAEEGESRISLSKKGFVQSFDYKTLEKATGGFKDGNLIGRGGFGDVYKACLGNNTLAAVKKIENVSQEAKREFQVPKQNTTVEYLHERCRPPVIHRDLKSSNILLDSSFNAKISDFGLAVMVGAHGKNNIKLSGTLGYVAPEYLLDGKLTDKSDVYAFGVVLLELLLGRRPVEKLSSVQCQSLVTWIALVNECTVSKNLQAMPQLTDRSKLPKIVDPVIKDTMDHKHLYQVCVIFCLCV

SEQ ID NO: 69585 - protein, 329 aa, Arabidopsis thaliana
  peptide (1)..(329): Ceres Seq. ID no. 1819292
  misc_feature (122)..(184): Pfam Name: Protein kinase domain Pfam Description: Protein kinase domain
  misc_feature (1)..(329): Homolog of NCBI NO: 7434336 NR Description: hypothetical protein F10N7.190 - Arabidopsis >gi|3858939|emb|CAA16589.1| serine/threonine protein kinase like
  misc_feature (95)..(329): Homolog of NCBI NO: 30689231 NR Description: protein kinase family [Arabidopsis thaliana]
  misc_feature (1)..(61): Homolog of NCBI NO: 30689231 NR Description: protein kinase family [Arabidopsis thaliana]
  misc_feature (172)..(297): Homolog of NCBI NO: 15224692 NR Description: hypothetical protein; protein id: At2g25220.1
  misc_feature (96)..(168): Homolog of NCBI NO: 15224692 NR Description: hypothetical protein; protein id: At2g25220.1
  misc_feature (19)..(184): Homolog of NCBI NO: 11358833 NR Description: ser/thr specific protein kinase-like protein -
  misc_feature (172)..(329): Homolog of NCBI NO: 11358833 NR Description: ser/thr specific protein kinase-like protein -
  misc_feature (172)..(329): Homolog of NCBI NO: 30683447 NR Description: protein kinase family [Arabidopsis thaliana]
  misc_feature (102)..(184): Homolog of NCBI NO: 30683447 NR Description: protein kinase family [Arabidopsis thaliana]
  misc_feature (172)..(329): Homolog of NCBI NO: 11259774 NR Description: ser/thr specific protein kinase-like protein -
MGKGQEHKLDAHKKLLIALIITSSSLGLILVSCLCFWVYWSKKSPKNTKNSGNNHLNIKNENKSAKLYICNKILYQFLHCDLSVLISKWFHAEEGESRISLSKKGFVQSFDYKTLEKATGGFKDGNLIGRGGFGDVYKACLGNNTLAAVKKIENVSQEAKREFQVPKQNTTVEYLHERCRPPVIHRDLKSSNILLDSSFNAKISDFGLAVMVGAHGKNNIKLSGTLGYVAPEYLLDGKLTDKSDVYAFGVVLLELLLGRRPVEKLSSVQCQSLVTWIALVNECTVSKNLQAMPQLTDRSKLPKIVDPVIKDTMDHKHLYQVCVIFCLCV

SEQ ID NO: 69586 - DNA, 693 bp, Arabidopsis thaliana
  misc_feature (1)..(693): Ceres Seq. ID no. 1819360
  misc_feature: MA Experiment ID: 20000328 Result: Up-regulated in Transcription
  misc_feature: MA Experiment 20000328 PARAMETER Experiment Name: At_42deg_Heat_Sub_P Parameter: Age (day) Value: 14
  misc_feature: MA Experiment 20000328 PARAMETER Experiment Name: At_42deg_Heat_Sub_P Parameter: Organism Value: A. thaliana
  misc_feature: MA Experiment 20000328 PARAMETER Experiment Name: At_42deg_Heat_Sub_P Parameter: Plant Line Value: WS
  misc_feature: MA Experiment 20000328 PARAMETER Experiment Name: At_42deg_Heat_Sub_P Parameter: Temperature (deg C) Value: 42 vs. 22
  misc_feature: MA Experiment 20000328 PARAMETER Experiment Name: At_42deg_Heat_Sub_P Parameter: Timepoint (hr) Value: 6
  misc_feature: MA Experiment 20000328 PARAMETER Experiment Name: At_42deg_Heat_Sub_P Parameter: Tissue Value: Aerial
  misc_feature: MA Experiment ID: 20000329 Result: Up-regulated in Transcription
  misc_feature: MA Experiment 20000329 PARAMETER Experiment Name: At_4deg_Cold_Sub_P Parameter: Age (day) Value: 14
  misc_feature: MA Experiment 20000329 PARAMETER Experiment Name: At_4deg_Cold_Sub_P Parameter: Organism Value: A. thaliana
  misc_feature: MA Experiment 20000329 PARAMETER Experiment Name: At_4deg_Cold_Sub_P Parameter: Plant Line Value: WS
  misc_feature: MA Experiment 20000329 PARAMETER Experiment Name: At_4deg_Cold_Sub_P Parameter: Temperature (deg C) Value: 4 vs. 22
  misc_feature: MA Experiment 20000329 PARAMETER Experiment Name: At_4deg_Cold_Sub_P Parameter: Timepoint (hr) Value: 6
  misc_feature: MA Experiment 20000329 PARAMETER Experiment Name: At_4deg_Cold_Sub_P Parameter: Tissue Value: Aerial
  misc_feature: MA Experiment ID: 20000332 Result: Up-regulated in Transcription
  misc_feature: MA Experiment 20000332 PARAMETER Experiment Name: At_4deg_Cold_Sub_P Parameter: Age (day) Value: 14
  misc_feature: MA Experiment 20000332 PARAMETER Experiment Name: At_4deg_Cold_Sub_P Parameter: Organism Value: A. thaliana
  misc_feature: MA Experiment 20000332 PARAMETER Experiment Name: At_4deg_Cold_Sub_P Parameter: Plant Line Value: WS
  misc_feature: MA Experiment 20000332 PARAMETER Experiment Name: At_4deg_Cold_Sub_P Parameter: Temperature (deg C) Value: 4 vs. 22
  misc_feature: MA Experiment 20000332 PARAMETER Experiment Name: At_4deg_Cold_Sub_P Parameter: Timepoint (hr) Value: 2
  misc_feature: MA Experiment 20000332 PARAMETER Experiment Name: At_4deg_Cold_Sub_P Parameter: Tissue Value: Aerial
  misc_feature: MA Experiment ID: 20000355 Result: Up-regulated in Transcription
  misc_feature: MA Experiment 20000355 PARAMETER Experiment Name: At_Siliques_Sub_P Parameter: Age (day) Value: 21
  misc_feature: MA Experiment 20000355 PARAMETER Experiment Name: At_Siliques_Sub_P Parameter: Organism Value: A. thaliana
  misc_feature: MA Experiment 20000355 PARAMETER Experiment Name: At_Siliques_Sub_P Parameter: Plant Line Value: WS
  misc_feature: MA Experiment 20000355 PARAMETER Experiment Name: At_Siliques_Sub_P Parameter: Tissue Value: Less Than 5mm Siliques vs. Whole Plant
  misc_feature: MA Experiment ID: 20000440 Result: Up-regulated in Transcription
  misc_feature: MA Experiment 20000440 PARAMETER Experiment Name: At_Closed-Flower__Sub_P Parameter: Tissue Value: Closed Flower vs. Whole Plant
atggctttctcttacgcatcattctctacacccttcaatggtttcgctgcaaatccgtctccgattacttccgcttttctcggcccatcattgagattctccaccagaacatcaaaaactcggaatccgagtaatggggtttcagtgaaatcgtcaaatagtcataggtttctagtcaaatctaaaaatttcagtgtctatgcaagggctgcagcagagaagtctgttcacgatttcactgtaaaggacatcgatggtaatgatgtttctctggacaaattcaaaggaaaacctttgttgatcgttaacgttgcgtcaagatgtggtttgacatcatcaaattactcagagctttctcaactgtacgaaaaatacaagaaccaaggatttgagattcttgctttcccttgcaatcaatttggaggtcaagaacccggttcaaaccctgagatcaagcaatttgcttgcacccggttcaaagcagagttccctatattcgacaaggttgatgtgaatggaccaagcacagctccaatctacaagttcttgaaatccaatgctggtggtttccttggtgatatcatcaaatggaactttgagaaattcttggttgataaaaagggcaaagttgtcgagagataccctcccacaacttctcctttccaaatcgaggtaccaaattcaaaactctaa

SEQ ID NO: 69587 - protein, 230 aa, Arabidopsis thaliana
  peptide (1)..(230): Ceres Seq. ID no. 1819361
  misc_feature (75)..(184): Pfam Name: Glutathione peroxidase Pfam Description: Glutathione peroxidase
  misc_feature (1)..(230): Homolog of NCBI NO: 7433114 NR Description: glutathione peroxidase (EC 1.11.1.9) F11C18.70 -
  misc_feature (1)..(230): Homolog of NCBI NO: 22329066 NR Description: glutathione peroxidase, putative; protein id:
  misc_feature (4)..(230): Homolog of NCBI NO: 20147455 NR Description: glutathione peroxidase [Brassica napus]
  misc_feature (4)..(230): Homolog of NCBI NO: 40388501 NR Description: GPx [Brassica oleracea var. botrytis]
  misc_feature (4)..(230): Homolog of NCBI NO: 2129599 NR Description: glutathione peroxidase (EC 1.11.1.9) precursor - thaliana >gi|1061036|emb|CAA61965.1| glutathione peroxidase
  misc_feature (4)..(230): Homolog of NCBI NO: 15224678 NR Description: glutathione peroxidase, putative; protein id: supported by cDNA: gi_14334959, supported by cDNA: gi_17104618 thaliana] >gi|20141398|sp|P52032|GSHY_ARATH Phospholipid
  misc_feature (1)..(230): Homolog of NCBI NO: 20138099 NR Description: Phospholipid hydroperoxide glutathione chloroplast precursor (PHGPx) >gi|7433115|pir||T06462 glutathione
  misc_feature (66)..(230): Homolog of NCBI NO: 2982362 NR Description: glutathione peroxidase [Zantedeschia aethiopica]
  misc_feature (68)..(230): Homolog of NCBI NO: 22268405 NR Description: putative glutathione peroxidase [Zea mays]
  misc_feature (68)..(230): Homolog of NCBI NO: 21360380 NR Description: glutathione peroxidase 1 [Oryza sativa]
MAFSYASFSTPFNGFAANPSPITSAFLGPSLRFSTRTSKTRNPSNGVSVKSSNSHRFLVKSKNFSVYARAAAEKSVHDFTVKDIDGNDVSLDKFKGKPLLIVNVASRCGLTSSNYSELSQLYEKYKNQGFEILAFPCNQFGGQEPGSNPEIKQFACTRFKAEFPIFDKVDVNGPSTAPIYKFLKSNAGGFLGDIIKWNFEKFLVDKKGKVVERYPPTTSPFQIEVPNSKL

SEQ ID NO: 69588 - DNA, 1221 bp, Arabidopsis thaliana
  misc_feature (1)..(1221): Ceres Seq. ID no. 1819452
  misc_feature: MA Experiment ID: 20000794 Result: Up-regulated in Transcription
  misc_feature: MA Experiment 20000794 PARAMETER Experiment Name: At_Petals_P Parameter: Age (day) Value: 23-25 days
  misc_feature: MA Experiment 20000794 PARAMETER Experiment Name: At_Petals_P Parameter: Plant Line Value: WS
  misc_feature: MA Experiment 20000794 PARAMETER Experiment Name: At_Petals_P Parameter: Tissue Value: Petals vs. Whole plant
atgcaagagttagactcttctaacgatgaatgggtgaaagaacttgaaggagagaacgaggaatcgaaattcacagggaggagattagttaaaaagtcgatttctgttcctgaattggtagacgaagttgaagaagatctcgacgattttacagaacctgcggatgattttaatgacaaagtagggaagaagagacagaggaagaagaaagatgagtctggtcttgagaagacaaaaaagaacaagaagcaaaattccgaagaggttcaagagatgtgggattcaattacgaacaacactaactcacagtatggtgataaggtcgtagtaaaacctcctaagaaaaaagatgaagatgctgaggagataaaaaaactgttcagtcttaggaaaaagaagagcaagtgcgataaaacctccatggagattgggatgcaagtagaacaagtgatggcgaatcttgaaatcgcggtagaagacgacgtaatttgtaacagagaaggaaaacccgccattaataaactcatgaagttacctcttctcaatgaaactctctcaaagaaacctcttcaaggtgagttcttagaccatggagtacttaaccttctcaagaattggctcgagccgcttcctgatggtagcttgccgaatataaacatccgcagtgccgttttgatgattctcaacgattttcgtatcgatcttgatcaagactctagaagagaacagttgatcaagagcggtctcgggaaggtcataatgttcttatcaaaatcagatgaagaaactacacctaataggagactcgctaatgatataatcaacaaatggggccgtatcatttataataagagcacaagatatgataacatgtttactcaggaggaacttgatgagcaacggcaaatactattaagaagacagaccaaaacagctcctaaggtgtctggaacaagagctagagactttaatacagatattgacctttatgagctaggaacttggacaggaagagcaagagcaaaaataccaacaacaatgtcgatggactttaagatccgtcctccatcgaaggttgacattaaccaagaagaggaaccttgttccaagtggcaaatggaaaaaagacataaaaacaagcagcaaaagaacatcaggaaagggggcatgcaagcattgaagcttagtgtagacggacgcactatgctcaagtacttgtag

SEQ ID NO: 69589 - protein, 406 aa, Arabidopsis thaliana
  peptide (1)..(406): Ceres Seq. ID no. 1819453
  misc_feature (145)..(402): Pfam Name: IWS1 C-terminus Pfam Description: IWS1 C-terminus
  misc_feature (1)..(406): Homolog of NCBI NO: 15234085 NR Description: putative protein; protein id: At4g19000.1
  misc_feature (60)..(406): Homolog of NCBI NO: 15222574 NR Description: unknown protein; protein id: At1g32130.1
  misc_feature (112)..(406): Homolog of NCBI NO: 34895776 NR Description: P0434B04.3 [Oryza sativa (japonica
  misc_feature (31)..(402): Homolog of NCBI NO: 31203501 NR Description: ENSANGP00000010073 [Anopheles gambiae]
  misc_feature (56)..(402): Homolog of NCBI NO: 24642454 NR Description: CG9915-PA [Drosophila melanogaster]
  misc_feature (1)..(402): Homolog of NCBI NO: 16552402 NR Description: unnamed protein product [Homo sapiens]
  misc_feature (1)..(402): Homolog of NCBI NO: 21739669 NR Description: hypothetical protein [Homo sapiens]
  misc_feature (1)..(402): Homolog of NCBI NO: 24308177 NR Description: hypothetical protein FLJ10006 [Homo sapiens]
  misc_feature (3)..(402): Homolog of NCBI NO: 30352010 NR Description: hypothetical protein 3000008H23 [Mus musculus]
  misc_feature (124)..(402): Homolog of NCBI NO: 7023152 NR Description: unnamed protein product [Homo sapiens]
MQELDSSNDEWVKELEGENEESKFTGRRLVKKSISVPELVDEVEEDLDDFTEPADDFNDKVGKKRQRKKKDESGLEKTKKNKKQNSEEVQEMWDSITNNTNSQYGDKVVVKPPKKKDEDAEEIKKLFSLRKKKSKCDKTSMEIGMQVEQVMANLEIAVEDDVICNREGKPAINKLMKLPLLNETLSKKPLQGEFLDHGVLNLLKNWLEPLPDGSLPNINIRSAVLMILNDFRIDLDQDSRREQLIKSGLGKVIMFLSKSDEETTPNRRLANDIINKWGRIIYNKSTRYDNMFTQEELDEQRQILLRRQTKTAPKVSGTRARDFNTDIDLYELGTWTGRARAKIPTTMSMDFKIRPPSKVDINQEEEPCSKWQMEKRHKNKQQKNIRKGGMQALKLSVDGRTMLKYL

SEQ ID NO: 69590 - protein, 315 aa, Arabidopsis thaliana
  peptide (1)..(315): Ceres Seq. ID no. 1819454
  misc_feature (54)..(311): Pfam Name: IWS1 C-terminus Pfam Description: IWS1 C-terminus
  misc_feature (1)..(311): Homolog of NCBI NO: 30352010 NR Description: hypothetical protein 3000008H23 [Mus musculus]
  misc_feature (1)..(315): Homolog of NCBI NO: 15234085 NR Description: putative protein; protein id: At4g19000.1
  misc_feature (21)..(315): Homolog of NCBI NO: 34895776 NR Description: P0434B04.3 [Oryza sativa (japonica
  misc_feature (1)..(311): Homolog of NCBI NO: 24642454 NR Description: CG9915-PA [Drosophila melanogaster]
  misc_feature (1)..(311): Homolog of NCBI NO: 21739669 NR Description: hypothetical protein [Homo sapiens]
  misc_feature (1)..(311): Homolog of NCBI NO: 24308177 NR Description: hypothetical protein FLJ10006 [Homo sapiens]
  misc_feature (1)..(311): Homolog of NCBI NO: 16552402 NR Description: unnamed protein product [Homo sapiens]
  misc_feature (1)..(311): Homolog of NCBI NO: 31203501 NR Description: ENSANGP00000010073 [Anopheles gambiae]
  misc_feature (1)..(315): Homolog of NCBI NO: 15222574 NR Description: unknown protein; protein id: At1g32130.1
  misc_feature (33)..(311): Homolog of NCBI NO: 7023152 NR Description: unnamed protein product [Homo sapiens]
MWDSITNNTNSQYGDKVVVKPPKKKDEDAEEIKKLFSLRKKKSKCDKTSMEIGMQVEQVMANLEIAVEDDVICNREGKPAINKLMKLPLLNETLSKKPLQGEFLDHGVLNLLKNWLEPLPDGSLPNINIRSAVLMILNDFRIDLDQDSRREQLIKSGLGKVIMFLSKSDEETTPNRRLANDIINKWGRIIYNKSTRYDNMFTQEELDEQRQILLRRQTKTAPKVSGTRARDFNTDIDLYELGTWTGRARAKIPTTMSMDFKIRPPSKVDINQEEEPCSKWQMEKRHKNKQQKNIRKGGMQALKLSVDGRTMLKYL

SEQ ID NO: 69591 - protein, 266 aa, Arabidopsis thaliana
  peptide (1)..(266): Ceres Seq. ID no. 1819455
  misc_feature (5)..(262): Pfam Name: IWS1 C-terminus Pfam Description: IWS1 C-terminus
  misc_feature (1)..(266): Homolog of NCBI NO: 15234085 NR Description: putative protein; protein id: At4g19000.1
  misc_feature (1)..(266): Homolog of NCBI NO: 15222574 NR Description: unknown protein; protein id: At1g32130.1
  misc_feature (1)..(266): Homolog of NCBI NO: 34895776 NR Description: P0434B04.3 [Oryza sativa (japonica
  misc_feature (1)..(262): Homolog of NCBI NO: 31203501 NR Description: ENSANGP00000010073 [Anopheles gambiae]
  misc_feature (1)..(262): Homolog of NCBI NO: 24642454 NR Description: CG9915-PA [Drosophila melanogaster]
  misc_feature (1)..(262): Homolog of NCBI NO: 16552402 NR Description: unnamed protein product [Homo sapiens]
  misc_feature (1)..(262): Homolog of NCBI NO: 21739669 NR Description: hypothetical protein [Homo sapiens]
  misc_feature (1)..(262): Homolog of NCBI NO: 24308177 NR Description: hypothetical protein FLJ10006 [Homo sapiens]
  misc_feature (1)..(262): Homolog of NCBI NO: 30352010 NR Description: hypothetical protein 3000008H23 [Mus musculus]
  misc_feature (1)..(262): Homolog of NCBI NO: 7023152 NR Description: unnamed protein product [Homo sapiens]
MEIGMQVEQVMANLEIAVEDDVICNREGKPAINKLMKLPLLNETLSKKPLQGEFLDHGVLNLLKNWLEPLPDGSLPNINIRSAVLMILNDFRIDLDQDSRREQLIKSGLGKVIMFLSKSDEETTPNRRLANDIINKWGRIIYNKSTRYDNMFTQEELDEQRQILLRRQTKTAPKVSGTRARDFNTDIDLYELGTWTGRARAKIPTTMSMDFKIRPPSKVDINQEEEPCSKWQMEKRHKNKQQKNIRKGGMQALKLSVDGRTMLKYL

SEQ ID NO: 69592 - DNA, 2445 bp, Arabidopsis thaliana
  misc_feature (1)..(2445): Ceres Seq. ID no. 1819549
  misc_feature: MA Experiment ID: 20000180 Result: Up-regulated in Transcription
  misc_feature: MA Experiment 20000180 PARAMETER Experiment Name: At_Germinating_Seeds_P Parameter: Age (hr) Value: 24 vs. 0
  misc_feature: MA Experiment 20000180 PARAMETER Experiment Name: At_Germinating_Seeds_P Parameter: Tissue Value: Germinating Seeds
  misc_feature: MA Experiment ID: 20000227 Result: Up-regulated in Transcription
  misc_feature: MA Experiment 20000227 PARAMETER Experiment Name: At_Root-Tips-vs-Tops_P Parameter: Tissue Value: Root Tips vs. Root Tops
  misc_feature: MA Experiment ID: 20000234 Result: Up-regulated in Transcription
  misc_feature: MA Experiment 20000234 PARAMETER Experiment Name: At_Siliques_P Parameter: Age (day) Value: 21
  misc_feature: MA Experiment 20000234 PARAMETER Experiment Name: At_Siliques_P Parameter: Organism Value: A. thaliana
  misc_feature: MA Experiment 20000234 PARAMETER Experiment Name: At_Siliques_P Parameter: Plant Line Value: WS
  misc_feature: MA Experiment 20000234 PARAMETER Experiment Name: At_Siliques_P Parameter: Tissue Value: Less Than 5mm Siliques vs. Whole Plant
  misc_feature: MA Experiment ID: 20000235 Result: Up-regulated in Transcription
  misc_feature: MA Experiment 20000235 PARAMETER Experiment Name: At_Siliques_P Parameter: Age (day) Value: 21
  misc_feature: MA Experiment 20000235 PARAMETER Experiment Name: At_Siliques_P Parameter: Organism Value: A. thaliana
  misc_feature: MA Experiment 20000235 PARAMETER Experiment Name: At_Siliques_P Parameter: Plant Line Value: WS
  misc_feature: MA Experiment 20000235 PARAMETER Experiment Name: At_Siliques_P Parameter: Tissue Value: 5-10mm Siliques vs. Whole Plant
  misc_feature: MA Experiment ID: 20000286 Result: Up-regulated in Transcription
  misc_feature: MA Experiment 20000286 PARAMETER Experiment Name: At_Open_Flower_P Parameter: Age (day) Value: 21
  misc_feature: MA Experiment 20000286 PARAMETER Experiment Name: At_Open_Flower_P Parameter: Plant Line Value: WS
  misc_feature: MA Experiment 20000286 PARAMETER Experiment Name: At_Open_Flower_P Parameter: Tissue Value: Half Open vs. Whole Plant
  misc_feature: MA Experiment ID: 20000527 Result: Down-regulated in Transcription
  misc_feature: MA Experiment 20000527 PARAMETER Experiment Name: At_10percent_PEG_P Parameter: Age (day) Value: 20
  misc_feature: MA Experiment 20000527 PARAMETER Experiment Name: At_10percent_PEG_P Parameter: Organism Value: A. thaliana
  misc_feature: MA Experiment 20000527 PARAMETER Experiment Name: At_10percent_PEG_P Parameter: Plant Line Value: WS
  misc_feature: MA Experiment 20000527 PARAMETER Experiment Name: At_10percent_PEG_P Parameter: Timepoint (day) Value: 20
  misc_feature: MA Experiment 20000527 PARAMETER Experiment Name: At_10percent_PEG_P Parameter: Tissue Value: Whole Plant
  misc_feature: MA Experiment 20000527 PARAMETER Experiment Name: At_10percent_PEG_P Parameter: Treatment Value: 10percent PEG vs. No Treatment
  misc_feature: MA Experiment ID: 20000794 Result: Up-regulated in Transcription
  misc_feature: MA Experiment 20000794 PARAMETER Experiment Name: At_Petals_P Parameter: Age (day) Value: 23-25 days
  misc_feature: MA Experiment 20000794 PARAMETER Experiment Name: At_Petals_P Parameter: Plant Line Value: WS
  misc_feature: MA Experiment 20000794 PARAMETER Experiment Name: At_Petals_P Parameter: Tissue Value: Petals vs. Whole plant
atgagtagatcaccagacaagcttgctcttcctcctcctcctcctcctcccccatctcgtaccgtcgttgtggctctaagtgggagcagtaaaagcaaatatgtagttacatgggcgatcgaaaaatttgctactgaaggaaatgttggcttcaagctgcttcacatccatccaatgattacttctgtacctacaccaagtaaagttccaactatgcctttagaagttcttgtgatcgaatcagataatgtggcagccgcaatagctgaagaagtgactcgggattcaatagacagaattgtcattggaggctcatcccgtagttttttctcaaggaaagctgatatttgctcggtgatatcagctttgatgccaaacttttgtacagtctatgttgtttcaaaaggtaaattgtcatgcgtccgaccatcagactcagacggaaatgctactataagagaagatggtagtgagagaacaaattcttcaagcggttcttctggtcccacctcagaaatggtgtgtatatctaattctgttaccccattttctcttctagattcatcagatgtaatgtcaagtgcgcatgactctcaatctcgtcctctatcccttccggtcaggagaatgcaacatttccctgcaattgcaggacaggcatcagttccaatggaaacgagttctgttggctcggatgaaaccaggtgcatgtctttggatgcagaggaagctagagatgtttcaagtatcaatagaagcagcacagatactacatcacgttggactcctcggcgtagagattatgaggagagaaaagaagctatgagttcttcttcgagcaaccgtgaatacgggaattttggtactaggtttagttggagtggcatgggtgtcgatactacacactctcgggcttctcaacaagcttccaacatgtctgatgctctaagtgaacaatcctatacagacaaccaggtaaacctaaactttgaggttgagaagttgagagctgagcttagacacgttcaagaaatgtatgctgtggctcaaaccgaaacctttgatgcttctcgaaagcttggtgaacttaaccaacgtcggttagaagaagccataaagcttgaagagctaaagctgaaggagtatgaagctcgagagttagcagaaaaggaaaagcagaattttgagaaggcaaggagagatgcagagagcatgagagaaagagcagagagagaaattgcgcagagaagagaagccgaaaggaaatccgcacgtgatactaaagagaaagagaagctcgagggcactctcgggtctcctcagctgcaatatcagcactttgcttgggaagaaattatggctgccacttcatcattctcagaagaactgaagatcggaatgggagcttacggagctgtttacaagtgtaatctgcatcatacaactgcagttgtcaaagttttgcagtcagctgaaaatcaactttccaaacaattccaacaagagctcgaaatcttgagcaagattaggcatccacatttggttctccttctaggagcgtgcccggagcaaggtgctttagtttatgagtacatggaaaacggtagcttggaggacagacttttccaggtcaacaacagtccgccactcccgtggtttgagcggtttaggattgcttgggaagttgcagcggctcttgtcttcctccacaaatcaaagcctaaaccaatcattcaccgtgatcttaaacctgcaaacatcttacttgatcacaactttgtcagcaaagttggagacgtgggactctcaacgatggttcaagtcgatcctctatcaactaaattcactatatacaaacaaacaagccccgtgggaacgttatgctatattgatccggaatatcagcgcactggaaggatatcatcgaaatcagatatctactcctttggaatgattcttcttcagcttctcacagcaaaacctgctattgcattgacacatttcgttgagagcgcaatggatagtaatgatgagttccttaagatcttagatcagaaagccggtaactggccgattgaagaaacccgggaattggccgcattagctttgtgttgtacagagctacgcgggaaagatagacctgatttgaaagatcagattcttccagcgctcgaaaacctaaagaaagtagctgaaaaggcaaggaactcattttccggcgtatcgacacagcctcccactcatttcatctgcccattacttaaggacgtgatgaacgagccgtgcgttgcagcagacggatacacatacgaccgtcatgcgatagaggagtggcttaaggagcacaacacatcgccgatgacggattcaccgttgcatagcaagaaccttttacccaattatactctttacacagccatcatggaatggaggtctacacgatag

SEQ ID NO: 69593 - protein, 814 aa, Arabidopsis thaliana
  peptide (1)..(814): Ceres Seq. ID no. 1819550
  misc_feature (18)..(134): Pfam Name: Universal stress protein family Pfam Description: Universal stress protein family
  misc_feature (74)..(814): Homolog of NCBI NO: 15240280 NR Description: putative protein; protein id: At5g61550.1
  misc_feature (15)..(92): Homolog of NCBI NO: 15240280 NR Description: putative protein; protein id: At5g61550.1
  misc_feature (331)..(812): Homolog of NCBI NO: 15241414 NR Description: putative protein; protein id: At5g51270.1
  misc_feature (5)..(101): Homolog of NCBI NO: 15241414 NR Description: putative protein; protein id: At5g51270.1
  misc_feature (227)..(812): Homolog of NCBI NO: 30697549 NR Description: protein kinase family [Arabidopsis thaliana]
  misc_feature (22)..(68): Homolog of NCBI NO: 30697549 NR Description: protein kinase family [Arabidopsis thaliana]
  misc_feature (227)..(812): Homolog of NCBI NO: 9758471 NR Description: contains similarity to receptor-like protein
  misc_feature (227)..(812): Homolog of NCBI NO: 37536860 NR Description: putative protein kinase [Oryza sativa (japonica group)] >gi|13569983|gb|AAK31267.1| putative protein kinase sativa] >gi|31433514|gb|AAP55019.1| putative protein kinase
  misc_feature (75)..(205): Homolog of NCBI NO: 37536860 NR Description: putative protein kinase [Oryza sativa (japonica group)] >gi|13569983|gb|AAK31267.1| putative protein kinase sativa] >gi|31433514|gb|AAP55019.1| putative protein kinase
  misc_feature (368)..(812): Homolog of NCBI NO: 29367517 NR Description: putative serine/threonine protein kinase [Oryza
MSRSPDKLALPPPPPPPPSRTVVVALSGSSKSKYVVTWAIEKFATEGNVGFKLLHIHPMITSVPTPSKVPTMPLEVLVIESDNVAAAIAEEVTRDSIDRIVIGGSSRSFFSRKADICSVISALMPNFCTVYVVSKGKLSCVRPSDSDGNATIREDGSERTNSSSGSSGPTSEMVCISNSVTPFSLLDSSDVMSSAHDSQSRPLSLPVRRMQHFPAIAGQASVPMETSSVGSDETRCMSLDAEEARDVSSINRSSTDTTSRWTPRRRDYEERKEAMSSSSSNREYGNFGTRFSWSGMGVDTTHSRASQQASNMSDALSEQSYTDNQVNLNFEVEKLRAELRHVQEMYAVAQTETFDASRKLGELNQRRLEEAIKLEELKLKEYEARELAEKEKQNFEKARRDAESMRERAEREIAQRREAERKSARDTKEKEKLEGTLGSPQLQYQHFAWEEIMAATSSFSEELKIGMGAYGAVYKCNLHHTTAVVKVLQSAENQLSKQFQQELEILSKIRHPHLVLLLGACPEQGALVYEYMENGSLEDRLFQVNNSPPLPWFERFRIAWEVAAALVFLHKSKPKPIIHRDLKPANILLDHNFVSKVGDVGLSTMVQVDPLSTKFTIYKQTSPVGTLCYIDPEYQRTGRISSKSDIYSFGMILLQLLTAKPAIALTHFVESAMDSNDEFLKILDQKAGNWPIEETRELAALALCCTELRGKDRPDLKDQILPALENLKKVAEKARNSFSGVSTQPPTHFICPLLKDVMNEPCVAADGYTYDRHAIEEWLKEHNTSPMTDSPLHSKNLLPNYTLYTAIMEWRSTR

SEQ ID NO: 69594 - protein, 756 aa, Arabidopsis thaliana
  peptide (1)..(756): Ceres Seq. ID no. 1819551
  misc_feature (1)..(76): Pfam Name: Universal stress protein family Pfam Description: Universal stress protein family
  misc_feature (16)..(756): Homolog of NCBI NO: 15240280 NR Description: putative protein; protein id: At5g61550.1
  misc_feature (1)..(34): Homolog of NCBI NO: 15240280 NR Description: putative protein; protein id: At5g61550.1
  misc_feature (273)..(754): Homolog of NCBI NO: 15241414 NR Description: putative protein; protein id: At5g51270.1
  misc_feature (1)..(43): Homolog of NCBI NO: 15241414 NR Description: putative protein; protein id: At5g51270.1
  misc_feature (169)..(754): Homolog of NCBI NO: 30697549 NR Description: protein kinase family [Arabidopsis thaliana]
  misc_feature (169)..(754): Homolog of NCBI NO: 9758471 NR Description: contains similarity to receptor-like protein
  misc_feature (169)..(754): Homolog of NCBI NO: 37536860 NR Description: putative protein kinase [Oryza sativa (japonica group)] >gi|13569983|gb|AAK31267.1| putative protein kinase sativa] >gi|31433514|gb|AAP55019.1| putative protein kinase
  misc_feature (17)..(147): Homolog of NCBI NO: 37536860 NR Description: putative protein kinase [Oryza sativa (japonica group)] >gi|13569983|gb|AAK31267.1| putative protein kinase sativa] >gi|31433514|gb|AAP55019.1| putative protein kinase
  misc_feature (310)..(754): Homolog of NCBI NO: 29367517 NR Description: putative serine/threonine protein kinase [Oryza
  misc_feature (17)..(689): Homolog of NCBI NO: 15224129 NR Description: putative protein kinase; protein id: At2g24370.1
MITSVPTPSKVPTMPLEVLVIESDNVAAAIAEEVTRDSIDRIVIGGSSRSFFSRKADICSVISALMPNFCTVYVVSKGKLSCVRPSDSDGNATIREDGSERTNSSSGSSGPTSEMVCISNSVTPFSLLDSSDVMSSAHDSQSRPLSLPVRRMQHFPAIAGQASVPMETSSVGSDETRCMSLDAEEARDVSSINRSSTDTTSRWTPRRRDYEERKEAMSSSSSNREYGNFGTRFSWSGMGVDTTHSRASQQASNMSDALSEQSYTDNQVNLNFEVEKLRAELRHVQEMYAVAQTETFDASRKLGELNQRRLEEAIKLEELKLKEYEARELAEKEKQNFEKARRDAESMRERAEREIAQRREAERKSARDTKEKEKLEGTLGSPQLQYQHFAWEEIMAATSSFSEELKIGMGAYGAVYKCNLHHTTAVVKVLQSAENQLSKQFQQELEILSKIRHPHLVLLLGACPEQGALVYEYMENGSLEDRLFQVNNSPPLPWFERFRIAWEVAAALVFLHKSKPKPIIHRDLKPANILLDHNFVSKVGDVGLSTMVQVDPLSTKFTIYKQTSPVGTLCYIDPEYQRTGRISSKSDIYSFGMILLQLLTAKPAIALTHFVESAMDSNDEFLKILDQKAGNWPIEETRELAALALCCTELRGKDRPDLKDQILPALENLKKVAEKARNSFSGVSTQPPTHFICPLLKDVMNEPCVAADGYTYDRHAIEEWLKEHNTSPMTDSPLHSKNLLPNYTLYTAIMEWRSTR

SEQ ID NO: 69595 - protein, 743 aa, Arabidopsis thaliana
  peptide (1)..(743): Ceres Seq. ID no. 1819552
  misc_feature (1)..(63): Pfam Name: Universal stress protein family Pfam Description: Universal stress protein family
  misc_feature (3)..(743): Homolog of NCBI NO: 15240280 NR Description: putative protein; protein id: At5g61550.1
  misc_feature (1)..(21): Homolog of NCBI NO: 15240280 NR Description: putative protein; protein id: At5g61550.1
  misc_feature (260)..(741): Homolog of NCBI NO: 15241414 NR Description: putative protein; protein id: At5g51270.1
  misc_feature (1)..(30): Homolog of NCBI NO: 15241414 NR Description: putative protein; protein id: At5g51270.1
  misc_feature (156)..(741): Homolog of NCBI NO: 30697549 NR Description: protein kinase family [Arabidopsis thaliana]
  misc_feature (156)..(741): Homolog of NCBI NO: 9758471 NR Description: contains similarity to receptor-like protein
  misc_feature (156)..(741): Homolog of NCBI NO: 37536860 NR Description: putative protein kinase [Oryza sativa (japonica group)] >gi|13569983|gb|AAK31267.1| putative protein kinase sativa] >gi|31433514|gb|AAP55019.1| putative protein kinase
  misc_feature (4)..(134): Homolog of NCBI NO: 37536860 NR Description: putative protein kinase [Oryza sativa (japonica group)] >gi|13569983|gb|AAK31267.1| putative protein kinase sativa] >gi|31433514|gb|AAP55019.1| putative protein kinase
  misc_feature (297)..(741): Homolog of NCBI NO: 29367517 NR Description: putative serine/threonine protein kinase [Oryza
  misc_feature (4)..(676): Homolog of NCBI NO: 15224129 NR Description: putative protein kinase; protein id: At2g24370.1
MPLEVLVIESDNVAAAIAEEVTRDSIDRIVIGGSSRSFFSRKADICSVISALMPNFCTVYVVSKGKLSCVRPSDSDGNATIREDGSERTNSSSGSSGPTSEMVCISNSVTPFSLLDSSDVMSSAHDSQSRPLSLPVRRMQHFPAIAGQASVPMETSSVGSDETRCMSLDAEEARDVSSINRSSTDTTSRWTPRRRDYEERKEAMSSSSSNREYGNFGTRFSWSGMGVDTTHSRASQQASNMSDALSEQSYTDNQVNLNFEVEKLRAELRHVQEMYAVAQTETFDASRKLGELNQRRLEEAIKLEELKLKEYEARELAEKEKQNFEKARRDAESMRERAEREIAQRREAERKSARDTKEKEKLEGTLGSPQLQYQHFAWEEIMAATSSFSEELKIGMGAYGAVYKCNLHHTTAVVKVLQSAENQLSKQFQQELEILSKIRHPHLVLLLGACPEQGALVYEYMENGSLEDRLFQVNNSPPLPWFERFRIAWEVAAALVFLHKSKPKPIIHRDLKPANILLDHNFVSKVGDVGLSTMVQVDPLSTKFTIYKQTSPVGTLCYIDPEYQRTGRISSKSDIYSFGMILLQLLTAKPAIALTHFVESAMDSNDEFLKILDQKAGNWPIEETRELAALALCCTELRGKDRPDLKDQILPALENLKKVAEKARNSFSGVSTQPPTHFICPLLKDVMNEPCVAADGYTYDRHAIEEWLKEHNTSPMTDSPLHSKNLLPNYTLYTAIMEWRSTR

SEQ ID NO: 69596 - DNA, 2592 bp, Arabidopsis thaliana
  misc_feature (1)..(2592): Ceres Seq. ID no. 1819565
  misc_feature: MA Experiment ID: 20000185 Result: Up-regulated in Transcription
  misc_feature: MA Experiment 20000185 PARAMETER Experiment Name: At_Roots__P Parameter: Age (day) Value: 7 vs. 21
  misc_feature: MA Experiment 20000185 PARAMETER Experiment Name: At_Roots__P Parameter: Organism Value: A. thaliana
  misc_feature: MA Experiment 20000185 PARAMETER Experiment Name: At_Roots__P Parameter: Tissue Value: Roots vs. Whole Plant
  misc_feature: MA Experiment ID: 20000437 Result: Down-regulated in Transcription
  misc_feature: MA Experiment 20000437 PARAMETER Experiment Name: At_Drought_P Parameter: Age (day) Value: 8
  misc_feature: MA Experiment 20000437 PARAMETER Experiment Name: At_Drought_P Parameter: Organism Value: A. thaliana
  misc_feature: MA Experiment 20000437 PARAMETER Experiment Name: At_Drought_P Parameter: Plant Line Value: WS
  misc_feature: MA Experiment 20000437 PARAMETER Experiment Name: At_Drought_P Parameter: Timepoint (hr) Value: 24
  misc_feature: MA Experiment 20000437 PARAMETER Experiment Name: At_Drought_P Parameter: Tissue Value: Whole Plant
  misc_feature: MA Experiment 20000437 PARAMETER Experiment Name: At_Drought_P Parameter: Treatment Value: Drought vs. No Drought
  misc_feature: MA Experiment ID: 20000439 Result: Up-regulated in Transcription
  misc_feature: MA Experiment 20000439 PARAMETER Experiment Name: At_Roots__P Parameter: Age (day) Value: 14 vs. 21
  misc_feature: MA Experiment 20000439 PARAMETER Experiment Name: At_Roots__P Parameter: Organism Value: A. thaliana
  misc_feature: MA Experiment 20000439 PARAMETER Experiment Name: At_Roots__P Parameter: Tissue Value: Roots vs. Whole Plant
  misc_feature: MA Experiment ID: 20000460 Result: Down-regulated in Transcription
  misc_feature: MA Experiment 20000460 PARAMETER Experiment Name: At_10percent_PEG_P Parameter: Age (day) Value: 12
  misc_feature: MA Experiment 20000460 PARAMETER Experiment Name: At_10percent_PEG_P Parameter: Organism Value: A. thaliana
  misc_feature: MA Experiment 20000460 PARAMETER Experiment Name: At_10percent_PEG_P Parameter: Plant Line Value: WS
  misc_feature: MA Experiment 20000460 PARAMETER Experiment Name: At_10percent_PEG_P Parameter: Timepoint (day) Value: 12
  misc_feature: MA Experiment 20000460 PARAMETER Experiment Name: At_10percent_PEG_P Parameter: Tissue Value: Whole Plant
  misc_feature: MA Experiment 20000460 PARAMETER Experiment Name: At_10percent_PEG_P Parameter: Treatment Value: 10percent PEG vs. No Treatment
  misc_feature: MA Experiment ID: 20001451 Result: Up-regulated in Transcription
  misc_feature: MA Experiment 20001451 PARAMETER Experiment Name: At_Far-red-induction_P Parameter: Age (day) Value: 7
  misc_feature: MA Experiment 20001451 PARAMETER Experiment Name: At_Far-red-induction_P Parameter: Light Value: Far-red vs. White
  misc_feature: MA Experiment 20001451 PARAMETER Experiment Name: At_Far-red-induction_P Parameter: Organism Value: A. thaliana
  misc_feature: MA Experiment 20001451 PARAMETER Experiment Name: At_Far-red-induction_P Parameter: Plant Line Value: Columbia
  misc_feature: MA Experiment 20001451 PARAMETER Experiment Name: At_Far-red-induction_P Parameter: Timepoint (hr) Value: 24
  misc_feature: MA Experiment 20001451 PARAMETER Experiment Name: At_Far-red-induction_P Parameter: Tissue Value: Whole Plant
atgcagagagtgagctttgaagtaaaggacacagaggcggagaagagcagcagcgagatactgagcggatctttgccgtcgacctaccgaaatccggcgatggaaaacgttggaaacgcggtggatgatggatcgagcgtgaagaacaatccgaaacttgatatgcagaaacagaacggtttggtgaagtggttcaagaagtgcttgacaatggtatctggagagagtaaggcacctcgattggaccggtcgaagtcaacggccggtcaggccttgaaagggctcaagatcatcagtaagaccgacggtaacgctgcctggaccgtcgtggagaagcggtacttgaagatcacggccaatactgatggattgctgcttcggtcgaaattcggtgaatgcatagggatgaactcaaaagaatttgccttggaattgtttgacgccttagctagaaaaagtcacttgaaaggggatgtgattactgagaccgagttgaagaaattttgggaacaaataaatgataaaagctttgattcaaggcttatcacgttctttgacttgatggataaagactcggatggtagacttacggaagacgaagttagagagatcatcaagcttagttcttctgccaatcatctgtcatgcatccaaaacaaggcagatgaatatgcagcaatgataatggaagagcttgaccctgatcatatgggatacatcatgatggagagtctaaagaaattgcttctgcaagcggaaacaaaatctgtaagcacagatattaatagtgaagaaagaaaggagctgagcgacatgctaactgagagtctcaagcctacacgtgaccctaaccatttgaggagatggtattgtcaactaagattctttgtattggatagttggcaaagagtttgggtgatagcgttatggctcacgattatggccatcctcttcgcgtacaagtatattcaatacaagaatagagcagtgtatgaagtgttggggccttgtgtgtgcttggctaaaggtgcagcagagacgctgaagctaaacatggccctaattctgttacctgtttgcagaaataccatcacatggcttagaaataagactaggttgggtgtttttgttccttttgatgacaacctcaattttcacaaggttatagcggtgggaattgcgataggagtagccatacactctgtgtcccacttggcgtgtgattttccactgctaatcgcggcaactccagcggaatacatgcctctcggaaaattcttcggagaggagcaaccaaagagatacttgcattttgtgaagtcaacagaaggaataacagggcttgtaatggttttcttgatggttattgcttttacactggctatgccttggtttagacgggggaagctagagaaaaagctaccagggccactaaagaaacttgcgagcttcaatgccttctggtacactcaccatttgttcgttatagtctacattctccttgtccttcacggatactacatatatctcaacaaggaatggtacaagaaaacgacgtggatgtacttggcagtaccagtagctctttatgcatacgagagattgatacgagcattcaggtccagcatcaggacagtaaaagtccttaagatggcagcttatcctggaaaagtattgactttgcagatgtcaaagcctacaaacttcaaatacatgagcggccaatacatgtttgtaaattgtccagcagtttcaccgtttgagtggcatccattttcaataacttctacaccacaagacgactatctgagcgttcatataaaagcattgggagattggacagaggctatccaaggagttttctcagagagtcgggaaaagatagttgagaagcatcatgttatatttcaggtgtctaagccacctccggtcggagacatgttgaatggtgcaaatagtccccgtttccccaaaattatgattgatggtccgtacggcgcaccagctcaagactacaagaagtacgaggtggtcctgctgataggtcttggcattggagccaccccgatgatcagcattatcaaggacattattaacaatacggagaccaaggaacaactcagccaaatggagaagggatcgccacaagagcaacaaggtaataaagaaactttcaagactcgaagggcttacttctactgggtaacaaaggagcagggcacatttgattggttcaagaacatcatgaacgagatcgcagaacgggacaaaagtaaagtcatagaactacacaatcattgcactagtgtctacgaagaaggagacgttcgttccgcgctcatacggatgcttcagtctcttaattatgccaagaatggtttagacattgttgctgggacaagggtcatgtcccatttcgcccgacctaattggaaaaacgtctacaaacagatagccatggatcaccctggcgctaatgttggagtgttctattgtggagcaccggtattgacgaaggagttaaggcaattagctttggaattcacacacaagaccagtactagattctctttccacaaagagaacttctaa

SEQ ID NO: 69597 - protein, 863 aa, Arabidopsis thaliana
  peptide (1)..(863): Ceres Seq. ID no. 1819566
  misc_feature (334)..(862): Pfam Name: Ferric reductase like transmembrane component Pfam Description: Ferric reductase like transmembrane component
  misc_feature (80)..(863): Homolog of NCBI NO: 28268680 NR Description: respiratory burst oxidase homolog [Nicotiana
  misc_feature (80)..(863): Homolog of NCBI NO: 20805911 NR Description: NADPH oxidase [Nicotiana tabacum]
  misc_feature (80)..(863): Homolog of NCBI NO: 8131846 NR Description: whitefly-induced gp91-phox [Lycopersicon
  misc_feature (80)..(863): Homolog of NCBI NO: 19715905 NR Description: NADPH oxidase [Nicotiana tabacum]
  misc_feature (80)..(863): Homolog of NCBI NO: 15240778 NR Description: respiratory burst oxidase protein A; protein id: [Arabidopsis thaliana] >gi|11282606|pir||T49878 respiratory burst
  misc_feature (80)..(863): Homolog of NCBI NO: 3242781 NR Description: respiratory burst oxidase protein A [Arabidopsis
  misc_feature (45)..(863): Homolog of NCBI NO: 11358758 NR Description: respiratory burst oxidase protein D [imported] - thaliana >gi|3242789|gb|AAC39479.1| respiratory burst oxidase
  misc_feature (45)..(863): Homolog of NCBI NO: 15238842 NR Description: respiratory burst oxidase protein; protein id: supported by cDNA: gi_15983500, supported by cDNA: gi_3242788 thaliana] >gi|10177927|dbj|BAB11338.1| respiratory burst oxidase
  misc_feature (45)..(863): Homolog of NCBI NO: 16549089 NR Description: respiratory burst oxidase homolog [Solanum
  misc_feature (70)..(863): Homolog of NCBI NO: 30680952 NR Description: respiratory burst oxidase protein B (NADPH (RbohB) [Arabidopsis thaliana] >gi|3242783|gb|AAC39476.1|
MQRVSFEVKDTEAEKSSSEILSGSLPSTYRNPAMENVGNAVDDGSSVKNNPKLDMQKQNGLVKWFKKCLTMVSGESKAPRLDRSKSTAGQALKGLKIISKTDGNAAWTVVEKRYLKITANTDGLLLRSKFGECIGMNSKEFALELFDALARKSHLKGDVITETELKKFWEQINDKSFDSRLITFFDLMDKDSDGRLTEDEVREIIKLSSSANHLSCIQNKADEYAAMIMEELDPDHMGYIMMESLKKLLLQAETKSVSTDINSEERKELSDMLTESLKPTRDPNHLRRWYCQLRFFVLDSWQRVWVIALWLTIMAILFAYKYIQYKNRAVYEVLGPCVCLAKGAAETLKLNMALILLPVCRNTITWLRNKTRLGVFVPFDDNLNFHKVIAVGIAIGVAIHSVSHLACDFPLLIAATPAEYMPLGKFFGEEQPKRYLHFVKSTEGITGLVMVFLMVIAFTLAMPWFRRGKLEKKLPGPLKKLASFNAFWYTHHLFVIVYILLVLHGYYIYLNKEWYKKTTWMYLAVPVALYAYERLIRAFRSSIRTVKVLKMAAYPGKVLTLQMSKPTNFKYMSGQYMFVNCPAVSPFEWHPFSITSTPQDDYLSVHIKALGDWTEAIQGVFSESREKIVEKHHVIFQVSKPPPVGDMLNGANSPRFPKIMIDGPYGAPAQDYKKYEVVLLIGLGIGATPMISIIKDIINNTETKEQLSQMEKGSPQEQQGNKETFKTRRAYFYWVTKEQGTFDWFKNIMNEIAERDKSKVIELHNHCTSVYEEGDVRSALIRMLQSLNYAKNGLDIVAGTRVMSHFARPNWKNVYKQIAMDHPGANVGVFYCGAPVLTKELRQLALEFTHKTSTRFSFHKENF

SEQ ID NO: 69598 - protein, 830 aa, Arabidopsis thaliana
  peptide (1)..(830): Ceres Seq. ID no. 1819567
  misc_feature (301)..(829): Pfam Name: Ferric reductase like transmembrane component Pfam Description: Ferric reductase like transmembrane component
  misc_feature (47)..(830): Homolog of NCBI NO: 28268680 NR Description: respiratory burst oxidase homolog [Nicotiana
  misc_feature (47)..(830): Homolog of NCBI NO: 20805911 NR Description: NADPH oxidase [Nicotiana tabacum]
  misc_feature (47)..(830): Homolog of NCBI NO: 8131846 NR Description: whitefly-induced gp91-phox [Lycopersicon
  misc_feature (47)..(830): Homolog of NCBI NO: 19715905 NR Description: NADPH oxidase [Nicotiana tabacum]
  misc_feature (47)..(830): Homolog of NCBI NO: 15240778 NR Description: respiratory burst oxidase protein A; protein id: [Arabidopsis thaliana] >gi|11282606|pir||T49878 respiratory burst
  misc_feature (47)..(830): Homolog of NCBI NO: 3242781 NR Description: respiratory burst oxidase protein A [Arabidopsis
  misc_feature (12)..(830): Homolog of NCBI NO: 11358758 NR Description: respiratory burst oxidase protein D [imported] - thaliana >gi|3242789|gb|AAC39479.1| respiratory burst oxidase
  misc_feature (12)..(830): Homolog of NCBI NO: 15238842 NR Description: respiratory burst oxidase protein; protein id: supported by cDNA: gi_15983500, supported by cDNA: gi_3242788 thaliana] >gi|10177927|dbj|BAB11338.1| respiratory burst oxidase
  misc_feature (12)..(830): Homolog of NCBI NO: 16549089 NR Description: respiratory burst oxidase homolog [Solanum
  misc_feature (37)..(830): Homolog of NCBI NO: 30680952 NR Description: respiratory burst oxidase protein B (NADPH (RbohB) [Arabidopsis thaliana] >gi|3242783|gb|AAC39476.1|
MENVGNAVDDGSSVKNNPKLDMQKQNGLVKWFKKCLTMVSGESKAPRLDRSKSTAGQALKGLKIISKTDGNAAWTVVEKRYLKITANTDGLLLRSKFGECIGMNSKEFALELFDALARKSHLKGDVITETELKKFWEQINDKSFDSRLITFFDLMDKDSDGRLTEDEVREIIKLSSSANHLSCIQNKADEYAAMIMEELDPDHMGYIMMESLKKLLLQAETKSVSTDINSEERKELSDMLTESLKPTRDPNHLRRWYCQLRFFVLDSWQRVWVIALWLTIMAILFAYKYIQYKNRAVYEVLGPCVCLAKGAAETLKLNMALILLPVCRNTITWLRNKTRLGVFVPFDDNLNFHKVIAVGIAIGVAIHSVSHLACDFPLLIAATPAEYMPLGKFFGEEQPKRYLHFVKSTEGITGLVMVFLMVIAFTLAMPWFRRGKLEKKLPGPLKKLASFNAFWYTHHLFVIVYILLVLHGYYIYLNKEWYKKTTWMYLAVPVALYAYERLIRAFRSSIRTVKVLKMAAYPGKVLTLQMSKPTNFKYMSGQYMFVNCPAVSPFEWHPFSITSTPQDDYLSVHIKALGDWTEAIQGVFSESREKIVEKHHVIFQVSKPPPVGDMLNGANSPRFPKIMIDGPYGAPAQDYKKYEVVLLIGLGIGATPMISIIKDIINNTETKEQLSQMEKGSPQEQQGNKETFKTRRAYFYWVTKEQGTFDWFKNIMNEIAERDKSKVIELHNHCTSVYEEGDVRSALIRMLQSLNYAKNGLDIVAGTRVMSHFARPNWKNVYKQIAMDHPGANVGVFYCGAPVLTKELRQLALEFTHKTSTRFSFHKENF

SEQ ID NO: 69599 - protein, 809 aa, Arabidopsis thaliana
  peptide (1)..(809): Ceres Seq. ID no. 1819568
  misc_feature (280)..(808): Pfam Name: Ferric reductase like transmembrane component Pfam Description: Ferric reductase like transmembrane component
  misc_feature (26)..(809): Homolog of NCBI NO: 28268680 NR Description: respiratory burst oxidase homolog [Nicotiana
  misc_feature (26)..(809): Homolog of NCBI NO: 20805911 NR Description: NADPH oxidase [Nicotiana tabacum]
  misc_feature (26)..(809): Homolog of NCBI NO: 8131846 NR Description: whitefly-induced gp91-phox [Lycopersicon
  misc_feature (26)..(809): Homolog of NCBI NO: 19715905 NR Description: NADPH oxidase [Nicotiana tabacum]
  misc_feature (26)..(809): Homolog of NCBI NO: 15240778 NR Description: respiratory burst oxidase protein A; protein id: [Arabidopsis thaliana] >gi|11282606|pir||T49878 respiratory burst
  misc_feature (26)..(809): Homolog of NCBI NO: 3242781 NR Description: respiratory burst oxidase protein A [Arabidopsis
  misc_feature (1)..(809): Homolog of NCBI NO: 11358758 NR Description: respiratory burst oxidase protein D [imported] - thaliana >gi|3242789|gb|AAC39479.1| respiratory burst oxidase
  misc_feature (1)..(809): Homolog of NCBI NO: 15238842 NR Description: respiratory burst oxidase protein; protein id: supported by cDNA: gi_15983500, supported by cDNA: gi_3242788 thaliana] >gi|10177927|dbj|BAB11338.1| respiratory burst oxidase
  misc_feature (1)..(809): Homolog of NCBI NO: 16549089 NR Description: respiratory burst oxidase homolog [Solanum
  misc_feature (16)..(809): Homolog of NCBI NO: 30680952 NR Description: respiratory burst oxidase protein B (NADPH (RbohB) [Arabidopsis thaliana] >gi|3242783|gb|AAC39476.1|
MQKQNGLVKWFKKCLTMVSGESKAPRLDRSKSTAGQALKGLKIISKTDGNAAWTVVEKRYLKITANTDGLLLRSKFGECIGMNSKEFALELFDALARKSHLKGDVITETELKKFWEQINDKSFDSRLITFFDLMDKDSDGRLTEDEVREIIKLSSSANHLSCIQNKADEYAAMIMEELDPDHMGYIMMESLKKLLLQAETKSVSTDINSEERKELSDMLTESLKPTRDPNHLRRWYCQLRFFVLDSWQRVWVIALWLTIMAILFAYKYIQYKNRAVYEVLGPCVCLAKGAAETLKLNMALILLPVCRNTITWLRNKTRLGVFVPFDDNLNFHKVIAVGIAIGVAIHSVSHLACDFPLLIAATPAEYMPLGKFFGEEQPKRYLHFVKSTEGITGLVMVFLMVIAFTLAMPWFRRGKLEKKLPGPLKKLASFNAFWYTHHLFVIVYILLVLHGYYIYLNKEWYKKTTWMYLAVPVALYAYERLIRAFRSSIRTVKVLKMAAYPGKVLTLQMSKPTNFKYMSGQYMFVNCPAVSPFEWHPFSITSTPQDDYLSVHIKALGDWTEAIQGVFSESREKIVEKHHVIFQVSKPPPVGDMLNGANSPRFPKIMIDGPYGAPAQDYKKYEVVLLIGLGIGATPMISIIKDIINNTETKEQLSQMEKGSPQEQQGNKETFKTRRAYFYWVTKEQGTFDWFKNIMNEIAERDKSKVIELHNHCTSVYEEGDVRSALIRMLQSLNYAKNGLDIVAGTRVMSHFARPNWKNVYKQIAMDHPGANVGVFYCGAPVLTKELRQLALEFTHKTSTRFSFHKENF

SEQ ID NO: 69600 - DNA, 1161 bp, Arabidopsis thaliana
  misc_feature (1)..(1161): Ceres Seq. ID no. 1819837
  misc_feature: MA Experiment ID: 20000307 Result: Down-regulated in Transcription
  misc_feature: MA Experiment 20000307 PARAMETER Experiment Name: At_Germinating_Seeds_Sub_P Parameter: Age (hr) Value: 24 vs. 0
  misc_feature: MA Experiment 20000307 PARAMETER Experiment Name: At_Germinating_Seeds_Sub_P Parameter: Organism Value: A. thaliana
  misc_feature: MA Experiment 20000307 PARAMETER Experiment Name: At_Germinating_Seeds_Sub_P Parameter: Plant Line Value: WS
  misc_feature: MA Experiment 20000307 PARAMETER Experiment Name: At_Germinating_Seeds_Sub_P Parameter: Tissue Value: Germinating Seeds
  misc_feature: MA Experiment ID: 20000355 Result: Up-regulated in Transcription
  misc_feature: MA Experiment 20000355 PARAMETER Experiment Name: At_Siliques_Sub_P Parameter: Age (day) Value: 21
  misc_feature: MA Experiment 20000355 PARAMETER Experiment Name: At_Siliques_Sub_P Parameter: Organism Value: A. thaliana
  misc_feature: MA Experiment 20000355 PARAMETER Experiment Name: At_Siliques_Sub_P Parameter: Plant Line Value: WS
  misc_feature: MA Experiment 20000355 PARAMETER Experiment Name: At_Siliques_Sub_P Parameter: Tissue Value: Less Than 5mm Siliques vs. Whole Plant
atggcttccttcaaccactttgtgttactgcttctgttaataatcactcttattctatccgctgaagcaactaaggaacgccgagcaataccatcaaaggcagaaaggaatgaaatgaagagacaactcaaagctatcaacaagcctgcaatcaagagtttcaagactgaacatggtgatatattcgattgtatcgatattcacaaacaactagcatttgatcatcacctactaaaaaaccactctgttcagctaaggccaacaacagtacctgaatatatcactggaaacaacatttcagagagttttagtcttttgcaagaaggtataagctgtccagatggcacagtaattgtaaaaaggactacaatgcaagatcttatgcatgcacaacgtttgaaatccatgggattcgagggcccgagaccttttctcacagagacaaacaacatgaattttaatggaaaattctacgatgcaagagctgattatggaccgaacccttttgctggagttgcaggaaacattaacatatggaaaccaaaaatcttgcaagatcaagttagtattggatacatggcagttagtggggggcctattgaagaagatttcgccagcatttcagttggatggattttacatggaagcagtactggcggctgctacggcatgtcatgtcctggatttgtgcaagttagcaagactataccagttggtgccgttcttcaaccattttccatctataatggtcgacaatatgaattgcgtttaggcttgtttcaggatagtggcacgggaaattggtggtttgtatttaaagaggagattattggatactggccagcatcattgttcaagtcctggatggaatctaacagcgcaaattatgcatcttggggagggcaagtgtatagccctatcagagagaagagtccacctatgggaagtggtcattggcctagtgagggctttcataaagctgcttttattagtggcctcaaactcttcgatggtcacgggaaagtttataatccaggacgcgggacagtgaaggtacatgagagcagaccaatctgttacaaagccagatatgttcatgatgttgataaaccttggttaaaatctgtttactttggaggtcctggagggtgcatagggtaa

SEQ ID NO: 69601 - protein, 386 aa, Arabidopsis thaliana
  peptide (1)..(386): Ceres Seq. ID no. 1819838
  misc_feature (169)..(344): Pfam Name: Arabidopsis proteins of unknown function Pfam Description: Arabidopsis proteins of unknown function
  misc_feature (1)..(386): Homolog of NCBI NO: 15236474 NR Description: putative protein; protein id: At4g23350.1
  misc_feature (1)..(386): Homolog of NCBI NO: 15236476 NR Description: putative protein; protein id: At4g23360.1
  misc_feature (160)..(386): Homolog of NCBI NO: 15236476 NR Description: putative protein; protein id: At4g23360.1
  misc_feature (1)..(96): Homolog of NCBI NO: 15236476 NR Description: putative protein; protein id: At4g23360.1
  misc_feature (160)..(385): Homolog of NCBI NO: 15236478 NR Description: putative protein; protein id: At4g23370.1
  misc_feature (1)..(111): Homolog of NCBI NO: 15236478 NR Description: putative protein; protein id: At4g23370.1
  misc_feature (8)..(385): Homolog of NCBI NO: 30686176 NR Description: expressed protein [Arabidopsis thaliana] unknown protein [Arabidopsis thaliana]
  misc_feature (2)..(384): Homolog of NCBI NO: 15236480 NR Description: putative protein; protein id: At4g23380.1
  misc_feature (1)..(384): Homolog of NCBI NO: 15225313 NR Description: hypothetical protein; protein id: At2g20170.1
  misc_feature (39)..(385): Homolog of NCBI NO: 7485564 NR Description: hypothetical protein F16G20.90 - Arabidopsis >gi|3451064|emb|CAA20460.1| putative protein [Arabidopsis >gi|7269187|emb|CAB79294.1| putative protein [Arabidopsis
MASFNHFVLLLLLIITLILSAEATKERRAIPSKAERNEMKRQLKAINKPAIKSFKTEHGDIFDCIDIHKQLAFDHHLLKNHSVQLRPTTVPEYITGNNISESFSLLQEGISCPDGTVIVKRTTMQDLMHAQRLKSMGFEGPRPFLTETNNMNFNGKFYDARADYGPNPFAGVAGNINIWKPKILQDQVSIGYMAVSGGPIEEDFASISVGWILHGSSTGGCYGMSCPGFVQVSKTIPVGAVLQPFSIYNGRQYELRLGLFQDSGTGNWWFVFKEEIIGYWPASLFKSWMESNSANYASWGGQVYSPIREKSPPMGSGHWPSEGFHKAAFISGLKLFDGHGKVYNPGRGTVKVHESRPICYKARYVHDVDKPWLKSVYFGGPGGCIG

SEQ ID NO: 69602 - protein, 348 aa, Arabidopsis thaliana
  peptide (1)..(348): Ceres Seq. ID no. 1819839
  misc_feature (131)..(306): Pfam Name: Arabidopsis proteins of unknown function Pfam Description: Arabidopsis proteins of unknown function
  misc_feature (1)..(348): Homolog of NCBI NO: 15236474 NR Description: putative protein; protein id: At4g23350.1
  misc_feature (1)..(348): Homolog of NCBI NO: 15236476 NR Description: putative protein; protein id: At4g23360.1
  misc_feature (122)..(348): Homolog of NCBI NO: 15236476 NR Description: putative protein; protein id: At4g23360.1
  misc_feature (1)..(58): Homolog of NCBI NO: 15236476 NR Description: putative protein; protein id: At4g23360.1
  misc_feature (122)..(347): Homolog of NCBI NO: 15236478 NR Description: putative protein; protein id: At4g23370.1
  misc_feature (1)..(73): Homolog of NCBI NO: 15236478 NR Description: putative protein; protein id: At4g23370.1
  misc_feature (1)..(347): Homolog of NCBI NO: 30686176 NR Description: expressed protein [Arabidopsis thaliana] unknown protein [Arabidopsis thaliana]
  misc_feature (1)..(346): Homolog of NCBI NO: 15236480 NR Description: putative protein; protein id: At4g23380.1
  misc_feature (1)..(346): Homolog of NCBI NO: 15225313 NR Description: hypothetical protein; protein id: At2g20170.1
  misc_feature (1)..(347): Homolog of NCBI NO: 7485564 NR Description: hypothetical protein F16G20.90 - Arabidopsis >gi|3451064|emb|CAA20460.1| putative protein [Arabidopsis >gi|7269187|emb|CAB79294.1| putative protein [Arabidopsis
MKRQLKAINKPAIKSFKTEHGDIFDCIDIHKQLAFDHHLLKNHSVQLRPTTVPEYITGNNISESFSLLQEGISCPDGTVIVKRTTMQDLMHAQRLKSMGFEGPRPFLTETNNMNFNGKFYDARADYGPNPFAGVAGNINIWKPKILQDQVSIGYMAVSGGPIEEDFASISVGWILHGSSTGGCYGMSCPGFVQVSKTIPVGAVLQPFSIYNGRQYELRLGLFQDSGTGNWWFVFKEEIIGYWPASLFKSWMESNSANYASWGGQVYSPIREKSPPMGSGHWPSEGFHKAAFISGLKLFDGHGKVYNPGRGTVKVHESRPICYKARYVHDVDKPWLKSVYFGGPGGCIG

SEQ ID NO: 69603 - protein, 263 aa, Arabidopsis thaliana
  peptide (1)..(263): Ceres Seq. ID no. 1819840
  misc_feature (46)..(221): Pfam Name: Arabidopsis proteins of unknown function Pfam Description: Arabidopsis proteins of unknown function
  misc_feature (1)..(263): Homolog of NCBI NO: 15236474 NR Description: putative protein; protein id: At4g23350.1
  misc_feature (1)..(263): Homolog of NCBI NO: 15236476 NR Description: putative protein; protein id: At4g23360.1
  misc_feature (37)..(263): Homolog of NCBI NO: 15236476 NR Description: putative protein; protein id: At4g23360.1
  misc_feature (37)..(262): Homolog of NCBI NO: 15236478 NR Description: putative protein; protein id: At4g23370.1
  misc_feature (1)..(262): Homolog of NCBI NO: 30686176 NR Description: expressed protein [Arabidopsis thaliana] unknown protein [Arabidopsis thaliana]
  misc_feature (1)..(261): Homolog of NCBI NO: 15236480 NR Description: putative protein; protein id: At4g23380.1
  misc_feature (1)..(261): Homolog of NCBI NO: 15225313 NR Description: hypothetical protein; protein id: At2g20170.1
  misc_feature (1)..(262): Homolog of NCBI NO: 7485564 NR Description: hypothetical protein F16G20.90 - Arabidopsis >gi|3451064|emb|CAA20460.1| putative protein [Arabidopsis >gi|7269187|emb|CAB79294.1| putative protein [Arabidopsis
  misc_feature (1)..(88): Homolog of NCBI NO: 30103019 NR Description: unknown protein [Oryza sativa (japonica
  misc_feature (88)..(259): Homolog of NCBI NO: 30103019 NR Description: unknown protein [Oryza sativa (japonica
MQDLMHAQRLKSMGFEGPRPFLTETNNMNFNGKFYDARADYGPNPFAGVAGNINIWKPKILQDQVSIGYMAVSGGPIEEDFASISVGWILHGSSTGGCYGMSCPGFVQVSKTIPVGAVLQPFSIYNGRQYELRLGLFQDSGTGNWWFVFKEEIIGYWPASLFKSWMESNSANYASWGGQVYSPIREKSPPMGSGHWPSEGFHKAAFISGLKLFDGHGKVYNPGRGTVKVHESRPICYKARYVHDVDKPWLKSVYFGGPGGCIG

SEQ ID NO: 69604 - DNA, 1731 bp, Arabidopsis thaliana
  misc_feature (1)..(1731): Ceres Seq. ID no. 1820081
  misc_feature: MA Experiment ID: 20000166 Result: Up-regulated in Transcription
  misc_feature: MA Experiment 20000166 PARAMETER Experiment Name: At_100uM_ABA_P Parameter: Age (day) Value: 14
  misc_feature: MA Experiment 20000166 PARAMETER Experiment Name: At_100uM_ABA_P Parameter: Organism Value: A. thaliana
  misc_feature: MA Experiment 20000166 PARAMETER Experiment Name: At_100uM_ABA_P Parameter: Plant Line Value: WS
  misc_feature: MA Experiment 20000166 PARAMETER Experiment Name: At_100uM_ABA_P Parameter: Timepoint (hr) Value: 1
  misc_feature: MA Experiment 20000166 PARAMETER Experiment Name: At_100uM_ABA_P Parameter: Tissue Value: Aerial
  misc_feature: MA Experiment 20000166 PARAMETER Experiment Name: At_100uM_ABA_P Parameter: Treatment Value: 100uM ABA vs. No Treatment
  misc_feature: MA Experiment ID: 20000169 Result: Up-regulated in Transcription
  misc_feature: MA Experiment 20000169 PARAMETER Experiment Name: At_100uM_ABA_P Parameter: Age (day) Value: 14
  misc_feature: MA Experiment 20000169 PARAMETER Experiment Name: At_100uM_ABA_P Parameter: Organism Value: A. thaliana
  misc_feature: MA Experiment 20000169 PARAMETER Experiment Name: At_100uM_ABA_P Parameter: Plant Line Value: WS
  misc_feature: MA Experiment 20000169 PARAMETER Experiment Name: At_100uM_ABA_P Parameter: Timepoint (hr) Value: 6
  misc_feature: MA Experiment 20000169 PARAMETER Experiment Name: At_100uM_ABA_P Parameter: Tissue Value: Aerial
  misc_feature: MA Experiment 20000169 PARAMETER Experiment Name: At_100uM_ABA_P Parameter: Treatment Value: 100uM ABA vs. No Treatment
  misc_feature: MA Experiment ID: 20000179 Result: Down-regulated in Transcription
  misc_feature: MA Experiment 20000179 PARAMETER Experiment Name: At_Germinating_Seeds_P Parameter: Age (hr) Value: 6 vs. 0
  misc_feature: MA Experiment 20000179 PARAMETER Experiment Name: At_Germinating_Seeds_P Parameter: Tissue Value: Germinating Seeds
  misc_feature: MA Experiment ID: 20000180 Result: Down-regulated in Transcription
  misc_feature: MA Experiment 20000180 PARAMETER Experiment Name: At_Germinating_Seeds_P Parameter: Age (hr) Value: 24 vs. 0
  misc_feature: MA Experiment 20000180 PARAMETER Experiment Name: At_Germinating_Seeds_P Parameter: Tissue Value: Germinating Seeds
  misc_feature: MA Experiment ID: 20000182 Result: Up-regulated in Transcription
  misc_feature: MA Experiment 20000182 PARAMETER Experiment Name: At_2mM_SA_P Parameter: Age (day) Value: 14
  misc_feature: MA Experiment 20000182 PARAMETER Experiment Name: At_2mM_SA_P Parameter: Organism Value: A. thaliana
  misc_feature: MA Experiment 20000182 PARAMETER Experiment Name: At_2mM_SA_P Parameter: Plant Line Value: WS
  misc_feature: MA Experiment 20000182 PARAMETER Experiment Name: At_2mM_SA_P Parameter: Timepoint (hr) Value: 6
  misc_feature: MA Experiment 20000182 PARAMETER Experiment Name: At_2mM_SA_P Parameter: Tissue Value: Aerial
  misc_feature: MA Experiment 20000182 PARAMETER Experiment Name: At_2mM_SA_P Parameter: Treatment Value: 2mM SA vs. No Treatment
  misc_feature: MA Experiment ID: 20000211 Result: Up-regulated in Transcription
  misc_feature: MA Experiment 20000211 PARAMETER Experiment Name: At_0.001percent_MeJA__P Parameter: Age (day) Value: 14
  misc_feature: MA Experiment 20000211 PARAMETER Experiment Name: At_0.001percent_MeJA__P Parameter: Organism Value: A. thaliana
  misc_feature: MA Experiment 20000211 PARAMETER Experiment Name: At_0.001percent_MeJA__P Parameter: Plant Line Value: WS
  misc_feature: MA Experiment 20000211 PARAMETER Experiment Name: At_0.001percent_MeJA__P Parameter: Timepoint (hr) Value: 1
  misc_feature: MA Experiment 20000211 PARAMETER Experiment Name: At_0.001percent_MeJA__P Parameter: Tissue Value: Aerial
  misc_feature: MA Experiment 20000211 PARAMETER Experiment Name: At_0.001percent_MeJA__P Parameter: Treatment Value: 0.001percent MeJA vs. No Treatment
  misc_feature: MA Experiment ID: 20000308 Result: Up-regulated in Transcription
  misc_feature: MA Experiment 20000308 PARAMETER Experiment Name: At_100mM_NaCl__P Parameter: Age (day) Value: 17
  misc_feature: MA Experiment 20000308 PARAMETER Experiment Name: At_100mM_NaCl__P Parameter: Organism Value: A. thaliana
  misc_feature: MA Experiment 20000308 PARAMETER Experiment Name: At_100mM_NaCl__P Parameter: Plant Line Value: WS
  misc_feature: MA Experiment 20000308 PARAMETER Experiment Name: At_100mM_NaCl__P Parameter: Timepoint (hr) Value: 72
  misc_feature: MA Experiment 20000308 PARAMETER Experiment Name: At_100mM_NaCl__P Parameter: Tissue Value: Whole Plant
  misc_feature: MA Experiment 20000308 PARAMETER Experiment Name: At_100mM_NaCl__P Parameter: Treatment Value: 100mM NaCl vs. No Treatment
  misc_feature: MA Experiment ID: 20000436 Result: Up-regulated in Transcription
  misc_feature: MA Experiment 20000436 PARAMETER Experiment Name: At_Drought_P Parameter: Age (day) Value: 7
  misc_feature: MA Experiment 20000436 PARAMETER Experiment Name: At_Drought_P Parameter: Organism Value: A. thaliana
  misc_feature: MA Experiment 20000436 PARAMETER Experiment Name: At_Drought_P Parameter: Plant Line Value: WS
  misc_feature: MA Experiment 20000436 PARAMETER Experiment Name: At_Drought_P Parameter: Timepoint (hr) Value: 12
  misc_feature: MA Experiment 20000436 PARAMETER Experiment Name: At_Drought_P Parameter: Tissue Value: Whole Plant
  misc_feature: MA Experiment 20000436 PARAMETER Experiment Name: At_Drought_P Parameter: Treatment Value: Drought vs. No Drought
  misc_feature: MA Experiment ID: 20000437 Result: Up-regulated in Transcription
  misc_feature: MA Experiment 20000437 PARAMETER Experiment Name: At_Drought_P Parameter: Age (day) Value: 8
  misc_feature: MA Experiment 20000437 PARAMETER Experiment Name: At_Drought_P Parameter: Organism Value: A. thaliana
  misc_feature: MA Experiment 20000437 PARAMETER Experiment Name: At_Drought_P Parameter: Plant Line Value: WS
  misc_feature: MA Experiment 20000437 PARAMETER Experiment Name: At_Drought_P Parameter: Timepoint (hr) Value: 24
  misc_feature: MA Experiment 20000437 PARAMETER Experiment Name: At_Drought_P Parameter: Tissue Value: Whole Plant
  misc_feature: MA Experiment 20000437 PARAMETER Experiment Name: At_Drought_P Parameter: Treatment Value: Drought vs. No Drought
  misc_feature: MA Experiment ID: 20000453 Result: Up-regulated in Transcription
  misc_feature: MA Experiment 20000453 PARAMETER Experiment Name: At_100uM_ABA_P Parameter: Age (day) Value: 15
  misc_feature: MA Experiment 20000453 PARAMETER Experiment Name: At_100uM_ABA_P Parameter: Organism Value: A. thaliana
  misc_feature: MA Experiment 20000453 PARAMETER Experiment Name: At_100uM_ABA_P Parameter: Plant Line Value: WS
  misc_feature: MA Experiment 20000453 PARAMETER Experiment Name: At_100uM_ABA_P Parameter: Timepoint (hr) Value: 24
  misc_feature: MA Experiment 20000453 PARAMETER Experiment Name: At_100uM_ABA_P Parameter: Tissue Value: Aerial
  misc_feature: MA Experiment 20000453 PARAMETER Experiment Name: At_100uM_ABA_P Parameter: Treatment Value: 100uM ABA vs. No Treatment
  misc_feature: MA Experiment ID: 20000460 Result: Up-regulated in Transcription
  misc_feature: MA Experiment 20000460 PARAMETER Experiment Name: At_10percent_PEG_P Parameter: Age (day) Value: 12
  misc_feature: MA Experiment 20000460 PARAMETER Experiment Name: At_10percent_PEG_P Parameter: Organism Value: A. thaliana
  misc_feature: MA Experiment 20000460 PARAMETER Experiment Name: At_10percent_PEG_P Parameter: Plant Line Value: WS
  misc_feature: MA Experiment 20000460 PARAMETER Experiment Name: At_10percent_PEG_P Parameter: Timepoint (day) Value: 12
  misc_feature: MA Experiment 20000460 PARAMETER Experiment Name: At_10percent_PEG_P Parameter: Tissue Value: Whole Plant
  misc_feature: MA Experiment 20000460 PARAMETER Experiment Name: At_10percent_PEG_P Parameter: Treatment Value: 10percent PEG vs. No Treatment
  misc_feature: MA Experiment ID: 20000527 Result: Down-regulated in Transcription
  misc_feature: MA Experiment 20000527 PARAMETER Experiment Name: At_10percent_PEG_P Parameter: Age (day) Value: 20
  misc_feature: MA Experiment 20000527 PARAMETER Experiment Name: At_10percent_PEG_P Parameter: Organism Value: A. thaliana
  misc_feature: MA Experiment 20000527 PARAMETER Experiment Name: At_10percent_PEG_P Parameter: Plant Line Value: WS
  misc_feature: MA Experiment 20000527 PARAMETER Experiment Name: At_10percent_PEG_P Parameter: Timepoint (day) Value: 20
  misc_feature: MA Experiment 20000527 PARAMETER Experiment Name: At_10percent_PEG_P Parameter: Tissue Value: Whole Plant
  misc_feature: MA Experiment 20000527 PARAMETER Experiment Name: At_10percent_PEG_P Parameter: Treatment Value: 10percent PEG vs. No Treatment
  misc_feature: MA Experiment ID: 20000573 Result: Up-regulated in Transcription
  misc_feature: MA Experiment 20000573 PARAMETER Experiment Name: At_100uM_ABA_Mutants__P Parameter: Organism Value: A. thaliana
  misc_feature: MA Experiment 20000573 PARAMETER Experiment Name: At_100uM_ABA_Mutants__P Parameter: Plant Line Value: CS22 vs. Ler wt
  misc_feature: MA Experiment 20000573 PARAMETER Experiment Name: At_100uM_ABA_Mutants__P Parameter: Timepoint (hr) Value: N/A
  misc_feature: MA Experiment 20000573 PARAMETER Experiment Name: At_100uM_ABA_Mutants__P Parameter: Tissue Value: Whole Plant
  misc_feature: MA Experiment 20000573 PARAMETER Experiment Name: At_100uM_ABA_Mutants__P Parameter: Treatment Value: None
  misc_feature: MA Experiment ID: 20000574 Result: Up-regulated in Transcription
  misc_feature: MA Experiment 20000574 PARAMETER Experiment Name: At_100uM_ABA_Mutants__P Parameter: Organism Value: A. thaliana
  misc_feature: MA Experiment 20000574 PARAMETER Experiment Name: At_100uM_ABA_Mutants__P Parameter: Plant Line Value: CS23 vs. Ler wt
  misc_feature: MA Experiment 20000574 PARAMETER Experiment Name: At_100uM_ABA_Mutants__P Parameter: Timepoint (hr) Value: N/A
  misc_feature: MA Experiment 20000574 PARAMETER Experiment Name: At_100uM_ABA_Mutants__P Parameter: Tissue Value: Whole Plant
  misc_feature: MA Experiment 20000574 PARAMETER Experiment Name: At_100uM_ABA_Mutants__P Parameter: Treatment Value: None
  misc_feature: MA Experiment ID: 20000576 Result: Down-regulated in Transcription
  misc_feature: MA Experiment 20000576 PARAMETER Experiment Name: At_100uM_ABA_Mutants__P Parameter: Organism Value: A. thaliana
  misc_feature: MA Experiment 20000576 PARAMETER Experiment Name: At_100uM_ABA_Mutants__P Parameter: Plant Line Value: CS23
  misc_feature: MA Experiment 20000576 PARAMETER Experiment Name: At_100uM_ABA_Mutants__P Parameter: Timepoint (hr) Value: 6
  misc_feature: MA Experiment 20000576 PARAMETER Experiment Name: At_100uM_ABA_Mutants__P Parameter: Tissue Value: Whole Plant
  misc_feature: MA Experiment 20000576 PARAMETER Experiment Name: At_100uM_ABA_Mutants__P Parameter: Treatment Value: 1uM ABA vs. No Treatment
  misc_feature: MA Experiment ID: 20000709 Result: Up-regulated in Transcription
  misc_feature: MA Experiment 20000709 PARAMETER Experiment Name: At_15mM_NH4NO3_L-to-H_P Parameter: Age (hr) Value: 14
  misc_feature: MA Experiment 20000709 PARAMETER Experiment Name: At_15mM_NH4NO3_L-to-H_P Parameter: Organism Value: A. thaliana
  misc_feature: MA Experiment 20000709 PARAMETER Experiment Name: At_15mM_NH4NO3_L-to-H_P Parameter: Plant Line Value: WS
  misc_feature: MA Experiment 20000709 PARAMETER Experiment Name: At_15mM_NH4NO3_L-to-H_P Parameter: Timepoint (hr) Value: 4
  misc_feature: MA Experiment 20000709 PARAMETER Experiment Name: At_15mM_NH4NO3_L-to-H_P Parameter: Tissue Value: Aerial
  misc_feature: MA Experiment 20000709 PARAMETER Experiment Name: At_15mM_NH4NO3_L-to-H_P Parameter: Treatment Value: 15mM NH4NO3 vs. 30mM Mannitol
  misc_feature: MA Experiment ID: 20001450 Result: Down-regulated in Transcription
  misc_feature: MA Experiment 20001450 PARAMETER Experiment Name: At_Far-red-induction_P Parameter: Age (day) Value: 7
  misc_feature: MA Experiment 20001450 PARAMETER Experiment Name: At_Far-red-induction_P Parameter: Light Value: Far-red vs. White
  misc_feature: MA Experiment 20001450 PARAMETER Experiment Name: At_Far-red-induction_P Parameter: Organism Value: A. thaliana
  misc_feature: MA Experiment 20001450 PARAMETER Experiment Name: At_Far-red-induction_P Parameter: Plant Line Value: Columbia
  misc_feature: MA Experiment 20001450 PARAMETER Experiment Name: At_Far-red-induction_P Parameter: Timepoint (hr) Value: 8
  misc_feature: MA Experiment 20001450 PARAMETER Experiment Name: At_Far-red-induction_P Parameter: Tissue Value: Whole Plant
  misc_feature: MA Experiment ID: 20001451 Result: Down-regulated in Transcription
  misc_feature: MA Experiment 20001451 PARAMETER Experiment Name: At_Far-red-induction_P Parameter: Age (day) Value: 7
  misc_feature: MA Experiment 20001451 PARAMETER Experiment Name: At_Far-red-induction_P Parameter: Light Value: Far-red vs. White
  misc_feature: MA Experiment 20001451 PARAMETER Experiment Name: At_Far-red-induction_P Parameter: Organism Value: A. thaliana
  misc_feature: MA Experiment 20001451 PARAMETER Experiment Name: At_Far-red-induction_P Parameter: Plant Line Value: Columbia
  misc_feature: MA Experiment 20001451 PARAMETER Experiment Name: At_Far-red-induction_P Parameter: Timepoint (hr) Value: 24
  misc_feature: MA Experiment 20001451 PARAMETER Experiment Name: At_Far-red-induction_P Parameter: Tissue Value: Whole Plant
  misc_feature: MA Experiment ID: 20001557 Result: Up-regulated in Transcription
  misc_feature: MA Experiment 20001557 PARAMETER Experiment Name: At_Drought_Soil_Dry_P Parameter: Age (day) Value: 27
  misc_feature: MA Experiment 20001557 PARAMETER Experiment Name: At_Drought_Soil_Dry_P Parameter: Organism Value: A. thaliana
  misc_feature: MA Experiment 20001557 PARAMETER Experiment Name: At_Drought_Soil_Dry_P Parameter: Plant Line Value: WS
  misc_feature: MA Experiment 20001557 PARAMETER Experiment Name: At_Drought_Soil_Dry_P Parameter: Post Timepoint (hr) Value: 3
  misc_feature: MA Experiment 20001557 PARAMETER Experiment Name: At_Drought_Soil_Dry_P Parameter: Post-Treatment Value: Re-Water vs. No Drought
  misc_feature: MA Experiment 20001557 PARAMETER Experiment Name: At_Drought_Soil_Dry_P Parameter: Timepoint (day) Value: 13
  misc_feature: MA Experiment 20001557 PARAMETER Experiment Name: At_Drought_Soil_Dry_P Parameter: Treatment Value: Drought vs. No Drought
  misc_feature: MA Experiment ID: 20001558 Result: Up-regulated in Transcription
  misc_feature: MA Experiment 20001558 PARAMETER Experiment Name: At_Drought_Soil_Dry_P Parameter: Age (day) Value: 27
  misc_feature: MA Experiment 20001558 PARAMETER Experiment Name: At_Drought_Soil_Dry_P Parameter: Organism Value: A. thaliana
  misc_feature: MA Experiment 20001558 PARAMETER Experiment Name: At_Drought_Soil_Dry_P Parameter: Plant Line Value: WS
  misc_feature: MA Experiment 20001558 PARAMETER Experiment Name: At_Drought_Soil_Dry_P Parameter: Post Timepoint (hr) Value: 6
  misc_feature: MA Experiment 20001558 PARAMETER Experiment Name: At_Drought_Soil_Dry_P Parameter: Post-Treatment Value: Re-Water vs. No Drought
  misc_feature: MA Experiment 20001558 PARAMETER Experiment Name: At_Drought_Soil_Dry_P Parameter: Timepoint (day) Value: 13
  misc_feature: MA Experiment 20001558 PARAMETER Experiment Name: At_Drought_Soil_Dry_P Parameter: Treatment Value: Drought vs. No Drought
  misc_feature: MA Experiment ID: 20001560 Result: Up-regulated in Transcription
  misc_feature: MA Experiment 20001560 PARAMETER Experiment Name: At_Drought_Soil_Dry_P Parameter: Age (day) Value: 28
  misc_feature: MA Experiment 20001560 PARAMETER Experiment Name: At_Drought_Soil_Dry_P Parameter: Organism Value: A. thaliana
  misc_feature: MA Experiment 20001560 PARAMETER Experiment Name: At_Drought_Soil_Dry_P Parameter: Plant Line Value: WS
  misc_feature: MA Experiment 20001560 PARAMETER Experiment Name: At_Drought_Soil_Dry_P Parameter: Post Timepoint (hr) Value: None
  misc_feature: MA Experiment 20001560 PARAMETER Experiment Name: At_Drought_Soil_Dry_P Parameter: Post-Treatment Value: None
  misc_feature: MA Experiment 20001560 PARAMETER Experiment Name: At_Drought_Soil_Dry_P Parameter: Timepoint (day) Value: 14
  misc_feature: MA Experiment 20001560 PARAMETER Experiment Name: At_Drought_Soil_Dry_P Parameter: Treatment Value: Drought vs. No Drought
  misc_feature: MA Experiment ID: 20001910 Result: Up-regulated in Transcription
  misc_feature: MA Experiment 20001910 PARAMETER Experiment Name: At_Drought_Reproduction_P Parameter: Age (day) Value: 37
  misc_feature: MA Experiment 20001910 PARAMETER Experiment Name: At_Drought_Reproduction_P Parameter: Organism Value: A. thaliana
  misc_feature: MA Experiment 20001910 PARAMETER Experiment Name: At_Drought_Reproduction_P Parameter: Plant Line Value: WS
  misc_feature: MA Experiment 20001910 PARAMETER Experiment Name: At_Drought_Reproduction_P Parameter: Timepoint (day) Value: 7
  misc_feature: MA Experiment 20001910 PARAMETER Experiment Name: At_Drought_Reproduction_P Parameter: Tissue Value: Flowers
  misc_feature: MA Experiment 20001910 PARAMETER Experiment Name: At_Drought_Reproduction_P Parameter: Treatment Value: Drought vs. No Drought
atggatcaaaaagttagacagtttgaggtttgcactcaagacggtagcgttgatcgtcacggcaatccagctatccgagctaataccggcaaatggctcactgctattctcattctaggagtgaatttggttctgtttctgactcgagtgatgggacaagacaatgcagaagcggctaataatgttagtaaatggacaggaactgtctatatcttctctttgcttggtgctttcctcagtgactcttattggggacgttacaagacttgtgctatctttcaagcaagtttcgttgcagggttgatgatgttatctttatctactggtgcgttattgcttgaaccaagtggttgtggagttgaagattcgccgtgtaagcctcattcgacgtttaagacggttctgttttatctgtcggtgtatctaatcgcgttagggtatggtggttatcagccgaacatagctacttttggagctgatcagtttgatgcggaggattccgttgaaggacactcgaaaatcgcgtttttcagttacttttacttggctctgaatcttggatcgctcttctcaaatactgtcttgggttactttgaggatcaaggggaatggccgcttggattttgggcgtctgctggctctgcttttgcggggttagtgcttttcttgattggcacgccaaagtaccgacactttacgcctagagagagtccttggtctagattctgccaagtgttggttgctgcaacaagaaaggctaagattgatgtgcaccatgaagagttgaatctctatgattctgagactcaatacactggagataagaagattcttcataccaaaggcttcagattcttggatagagctgctattgttacacctgatgatgaggctgagaaagtagagagcggatcgaaatacgatccatggaggctctgctcggtgactcaagtcgaagaagtgaaatgtgtattaagactcttaccaatctggctctgcaccatcctctactctgtggttttcacccaaatggcttcactgttcgttgtgcaaggagcagcgatgaagacaaacatcaaaaacttccggattccagcttcaagcatgtctagtttcgacattctcagtgtcgccttcttcatcttcgcatacaggcggtttcttgatccactctttgcaagacttaacaaaacagaacgcaacaaaggtctcactgagcttcagaggatggggattgggcttgtgattgcgataatggcgatgatttccgcaggaatcgtagagatacacagactgaaaaataaggaaccggaaagtgctacttcgatctcaagctccagcactttgagcattttttggcaagtacctcagtacatgttgataggtgcatcagaagtgttcatgtacgttggtcaactcgagttcttcaacagccaagcaccaaccgggctaaagagctttgcaagcgcgctatgtatggcttcaatatctcttgggaactatgtaagcagtttgttagtttccattgtcatgaagatctctacaacagatgatgtgcatggctggattcctgaaaatctcaacaaaggacacttggagagattctacttccttttagctggtctaaccgctgctgatttcgtggtttacttgatttgtgccaaatggtacaagtatattaaatctgaagcaagtttctctgagtccgtaactgaagaggaggaagtctga

SEQ ID NO: 69605 - protein, 576 aa, Arabidopsis thaliana
  peptide (1)..(576): Ceres Seq. ID no. 1820082
  misc_feature (87)..(496): Pfam Name: POT family Pfam Description: POT family
  misc_feature (9)..(562): Homolog of NCBI NO: 15232435 NR Description: peptide transport - like protein; protein id: supported by cDNA: 117581., supported by cDNA: gi_13430485,
  misc_feature (9)..(562): Homolog of NCBI NO: 7489404 NR Description: peptide transport protein - barley
  misc_feature (9)..(565): Homolog of NCBI NO: 34895718 NR Description: putative peptide transport protein [Oryza sativa
  misc_feature (1)..(576): Homolog of NCBI NO: 30685529 NR Description: peptide transporter - like protein [Arabidopsis
  misc_feature (4)..(563): Homolog of NCBI NO: 25513683 NR Description: F5D14.23 protein - Arabidopsis thaliana Contains similarity to a peptide transport protein homolog gi|7488004 from Arabidopsis thaliana BAC F17L22 gb|AL035527. It
  misc_feature (4)..(563): Homolog of NCBI NO: 30692706 NR Description: peptide transporter PTR2-B -related [Arabidopsis
  misc_feature (1)..(576): Homolog of NCBI NO: 26451333 NR Description: putative peptide transporter [Arabidopsis
  misc_feature (1)..(576): Homolog of NCBI NO: 7488004 NR Description: peptide transport protein homolog F17L22.140 -
  misc_feature (12)..(562): Homolog of NCBI NO: 15076661 NR Description: peptide transporter [Oryza sativa (japonica >gi|15076663|dbj|BAB62327.1| peptide transporter [Oryza sativa
  misc_feature (9)..(558): Homolog of NCBI NO: 34394155 NR Description: putative peptide transport protein [Oryza sativa
MDQKVRQFEVCTQDGSVDRHGNPAIRANTGKWLTAILILGVNLVLFLTRVMGQDNAEAANNVSKWTGTVYIFSLLGAFLSDSYWGRYKTCAIFQASFVAGLMMLSLSTGALLLEPSGCGVEDSPCKPHSTFKTVLFYLSVYLIALGYGGYQPNIATFGADQFDAEDSVEGHSKIAFFSYFYLALNLGSLFSNTVLGYFEDQGEWPLGFWASAGSAFAGLVLFLIGTPKYRHFTPRESPWSRFCQVLVAATRKAKIDVHHEELNLYDSETQYTGDKKILHTKGFRFLDRAAIVTPDDEAEKVESGSKYDPWRLCSVTQVEEVKCVLRLLPIWLCTILYSVVFTQMASLFVVQGAAMKTNIKNFRIPASSMSSFDILSVAFFIFAYRRFLDPLFARLNKTERNKGLTELQRMGIGLVIAIMAMISAGIVEIHRLKNKEPESATSISSSSTLSIFWQVPQYMLIGASEVFMYVGQLEFFNSQAPTGLKSFASALCMASISLGNYVSSLLVSIVMKISTTDDVHGWIPENLNKGHLERFYFLLAGLTAADFVVYLICAKWYKYIKSEASFSESVTEEEEV

SEQ ID NO: 69606 - protein, 526 aa, Arabidopsis thaliana
  peptide (1)..(526): Ceres Seq. ID no. 1820083
  misc_feature (37)..(446): Pfam Name: POT family Pfam Description: POT family
  misc_feature (1)..(526): Homolog of NCBI NO: 7488004 NR Description: peptide transport protein homolog F17L22.140 -
  misc_feature (1)..(526): Homolog of NCBI NO: 30685529 NR Description: peptide transporter - like protein [Arabidopsis
  misc_feature (1)..(526): Homolog of NCBI NO: 26451333 NR Description: putative peptide transporter [Arabidopsis
  misc_feature (1)..(513): Homolog of NCBI NO: 25513683 NR Description: F5D14.23 protein - Arabidopsis thaliana Contains similarity to a peptide transport protein homolog gi|7488004 from Arabidopsis thaliana BAC F17L22 gb|AL035527. It
  misc_feature (1)..(513): Homolog of NCBI NO: 30692706 NR Description: peptide transporter PTR2-B -related [Arabidopsis
  misc_feature (1)..(512): Homolog of NCBI NO: 15232435 NR Description: peptide transport - like protein; protein id: supported by cDNA: 117581., supported by cDNA: gi_13430485,
  misc_feature (1)..(512): Homolog of NCBI NO: 7489404 NR Description: peptide transport protein - barley
  misc_feature (1)..(515): Homolog of NCBI NO: 34895718 NR Description: putative peptide transport protein [Oryza sativa
  misc_feature (1)..(512): Homolog of NCBI NO: 15076661 NR Description: peptide transporter [Oryza sativa (japonica >gi|15076663|dbj|BAB62327.1| peptide transporter [Oryza sativa
  misc_feature (1)..(508): Homolog of NCBI NO: 34394155 NR Description: putative peptide transport protein [Oryza sativa
MGQDNAEAANNVSKWTGTVYIFSLLGAFLSDSYWGRYKTCAIFQASFVAGLMMLSLSTGALLLEPSGCGVEDSPCKPHSTFKTVLFYLSVYLIALGYGGYQPNIATFGADQFDAEDSVEGHSKIAFFSYFYLALNLGSLFSNTVLGYFEDQGEWPLGFWASAGSAFAGLVLFLIGTPKYRHFTPRESPWSRFCQVLVAATRKAKIDVHHEELNLYDSETQYTGDKKILHTKGFRFLDRAAIVTPDDEAEKVESGSKYDPWRLCSVTQVEEVKCVLRLLPIWLCTILYSVVFTQMASLFVVQGAAMKTNIKNFRIPASSMSSFDILSVAFFIFAYRRFLDPLFARLNKTERNKGLTELQRMGIGLVIAIMAMISAGIVEIHRLKNKEPESATSISSSSTLSIFWQVPQYMLIGASEVFMYVGQLEFFNSQAPTGLKSFASALCMASISLGNYVSSLLVSIVMKISTTDDVHGWIPENLNKGHLERFYFLLAGLTAADFVVYLICAKWYKYIKSEASFSESVTEEEEV

SEQ ID NO: 69607 - protein, 475 aa, Arabidopsis thaliana
  peptide (1)..(475): Ceres Seq. ID no. 1820084
  misc_feature (1)..(395): Pfam Name: POT family Pfam Description: POT family
  misc_feature (1)..(475): Homolog of NCBI NO: 7488004 NR Description: peptide transport protein homolog F17L22.140 -
  misc_feature (1)..(475): Homolog of NCBI NO: 30685529 NR Description: peptide transporter - like protein [Arabidopsis
  misc_feature (1)..(475): Homolog of NCBI NO: 26451333 NR Description: putative peptide transporter [Arabidopsis
  misc_feature (1)..(462): Homolog of NCBI NO: 25513683 NR Description: F5D14.23 protein - Arabidopsis thaliana Contains similarity to a peptide transport protein homolog gi|7488004 from Arabidopsis thaliana BAC F17L22 gb|AL035527. It
  misc_feature (1)..(462): Homolog of NCBI NO: 30692706 NR Description: peptide transporter PTR2-B -related [Arabidopsis
  misc_feature (1)..(461): Homolog of NCBI NO: 15232435 NR Description: peptide transport - like protein; protein id: supported by cDNA: 117581., supported by cDNA: gi_13430485,
  misc_feature (1)..(461): Homolog of NCBI NO: 7489404 NR Description: peptide transport protein - barley
  misc_feature (1)..(464): Homolog of NCBI NO: 34895718 NR Description: putative peptide transport protein [Oryza sativa
  misc_feature (1)..(461): Homolog of NCBI NO: 15076661 NR Description: peptide transporter [Oryza sativa (japonica >gi|15076663|dbj|BAB62327.1| peptide transporter [Oryza sativa
  misc_feature (1)..(457): Homolog of NCBI NO: 34394155 NR Description: putative peptide transport protein [Oryza sativa
MMLSLSTGALLLEPSGCGVEDSPCKPHSTFKTVLFYLSVYLIALGYGGYQPNIATFGADQFDAEDSVEGHSKIAFFSYFYLALNLGSLFSNTVLGYFEDQGEWPLGFWASAGSAFAGLVLFLIGTPKYRHFTPRESPWSRFCQVLVAATRKAKIDVHHEELNLYDSETQYTGDKKILHTKGFRFLDRAAIVTPDDEAEKVESGSKYDPWRLCSVTQVEEVKCVLRLLPIWLCTILYSVVFTQMASLFVVQGAAMKTNIKNFRIPASSMSSFDILSVAFFIFAYRRFLDPLFARLNKTERNKGLTELQRMGIGLVIAIMAMISAGIVEIHRLKNKEPESATSISSSSTLSIFWQVPQYMLIGASEVFMYVGQLEFFNSQAPTGLKSFASALCMASISLGNYVSSLLVSIVMKISTTDDVHGWIPENLNKGHLERFYFLLAGLTAADFVVYLICAKWYKYIKSEASFSESVTEEEEV

SEQ ID NO: 69608 - DNA, 3723 bp, Arabidopsis thaliana
  misc_feature (1)..(3723): Ceres Seq. ID no. 1820394
  misc_feature: MA Experiment ID: 20000182 Result: Up-regulated in Transcription
  misc_feature: MA Experiment 20000182 PARAMETER Experiment Name: At_2mM_SA_P Parameter: Age (day) Value: 14
  misc_feature: MA Experiment 20000182 PARAMETER Experiment Name: At_2mM_SA_P Parameter: Organism Value: A. thaliana
  misc_feature: MA Experiment 20000182 PARAMETER Experiment Name: At_2mM_SA_P Parameter: Plant Line Value: WS
  misc_feature: MA Experiment 20000182 PARAMETER Experiment Name: At_2mM_SA_P Parameter: Timepoint (hr) Value: 6
  misc_feature: MA Experiment 20000182 PARAMETER Experiment Name: At_2mM_SA_P Parameter: Tissue Value: Aerial
  misc_feature: MA Experiment 20000182 PARAMETER Experiment Name: At_2mM_SA_P Parameter: Treatment Value: 2mM SA vs. No Treatment
  misc_feature: MA Experiment ID: 20000184 Result: Down-regulated in Transcription
  misc_feature: MA Experiment 20000184 PARAMETER Experiment Name: At_Shoots__P Parameter: Age (day) Value: 7
  misc_feature: MA Experiment 20000184 PARAMETER Experiment Name: At_Shoots__P Parameter: Tissue Value: Shoots vs. Whole Plant
  misc_feature: MA Experiment ID: 20000214 Result: Down-regulated in Transcription
  misc_feature: MA Experiment 20000214 PARAMETER Experiment Name: At_4deg_Cold_P Parameter: Timepoint (hr) Value: 6
  misc_feature: MA Experiment ID: 20000234 Result: Down-regulated in Transcription
  misc_feature: MA Experiment 20000234 PARAMETER Experiment Name: At_Siliques_P Parameter: Age (day) Value: 21
  misc_feature: MA Experiment 20000234 PARAMETER Experiment Name: At_Siliques_P Parameter: Organism Value: A. thaliana
  misc_feature: MA Experiment 20000234 PARAMETER Experiment Name: At_Siliques_P Parameter: Plant Line Value: WS
  misc_feature: MA Experiment 20000234 PARAMETER Experiment Name: At_Siliques_P Parameter: Tissue Value: Less Than 5mm Siliques vs. Whole Plant
  misc_feature: MA Experiment ID: 20001450 Result: Up-regulated in Transcription
  misc_feature: MA Experiment 20001450 PARAMETER Experiment Name: At_Far-red-induction_P Parameter: Age (day) Value: 7
  misc_feature: MA Experiment 20001450 PARAMETER Experiment Name: At_Far-red-induction_P Parameter: Light Value: Far-red vs. White
  misc_feature: MA Experiment 20001450 PARAMETER Experiment Name: At_Far-red-induction_P Parameter: Organism Value: A. thaliana
  misc_feature: MA Experiment 20001450 PARAMETER Experiment Name: At_Far-red-induction_P Parameter: Plant Line Value: Columbia
  misc_feature: MA Experiment 20001450 PARAMETER Experiment Name: At_Far-red-induction_P Parameter: Timepoint (hr) Value: 8
  misc_feature: MA Experiment 20001450 PARAMETER Experiment Name: At_Far-red-induction_P Parameter: Tissue Value: Whole Plant
atggcttctcaaatgccctttacaacaatatcaagaaagatatcatgtatgaagttgttgcctctttgccctcttcagttgtcaacaacgcaaacacctacaacaattcccatgtctctttccttctataagaatgaactttctgatgatacaccttgtcaaagtgggtacactgattacatatcttttcaagtccccgatgagaccttcccagagatttcaaactgtattggcatagctaagggttataagcagaattccaacaatgagaaaaatggttatacttctctggaagccgttttgttatctgtacctaatggctacacttgtgttgatttgtctctctacaaggataaagaactggttttattattgaataagacaaatacagattccgaaggctcgggagaagcatgcatgatggttgtacaaactggtgacctcgcattcatttccatttcaggatctagttctctaaaccagtgggagctagaggatttgaaggtattgctaatttcaagcattaacatcgacggctcgattgtgaacctggaaatggagaatgaaaaggttcgcaaagtaccacattctgtcattgctcctctagcagtaagcgcttcaagaggagtggcttgtgtttttgctgaaagaagacgagctttggtgtacatattggaagaagatgaagatgaagaaatctctgatgaaaactcaactaaggaagcaagacgaaattctctctctttctctaagctctacgccaccgtcacggaggttgtcttgttttgtctcatggagaatgatcaattcatgtgtccgactgatataatcaccggcatagtgtttattgatggtgaattggctatgttgactttgactgccgacggggagttacggtggacagagtatggactccggcagtatttgtcgatgaagaaggatgttcttggtttcatcgtcgaaggtaagcagattagagtaaaagccgtggttgagaaagaggcaggaggaatctgctgcggacaatttggtggagacttcgtgaggaaagatttcgtctttgagcctctcatcgatcaaaatggatggtgctataagcttcgtcaataccttgattctctcggtcggccaaagagattgcttgtgtttgtgaacccgtttggcgggaagaaatcggcgagagagatttttgttaaggaagtgaagcctttgtttgaagatgctgatgttcaacttgagattcaagaaactaagtatcagttgcatgcaaaggaatttgttaagtccatggatgtgtcaaaatatgatggtattgtttgtgtcagcggcgacggtatccttgttgaggttgtaaatggactgctcgaaagagcagactggagaaatgccttaaaattgcctattggaatggtccctgcaggaactggtaatggcatgataaagtcattgttggacacagttgggcttcgatgctgtgcaaatagtgctaccatttctattatccgaggtcataaacgttctgtagatgttgctacaattgcacaagggaataccaaattcttcagtgtcttgatgcttgcttggggtttaatagctgatatagacatcgagtcagagaagttcagatggatgggaagtgctcgtattgacttttatgtatgtttagttgacaaatttgacaattattgcattgcagttgttaaattgctggctcttcagaggataatatgtttaagacgatacaatggacgaattttatttctaccggctcctgggtttgaaggctatggacagccagccagttgcagtctataccaagagccacatgttagtgataaagaggtcgggtaccaaggacctgaaactaaatttgaagatctagaatggagggaaatgaaaggcccatttgttacgatatggcttcacaatgttccctggggttctgagaacactttgactgctcctgctgcaaagttttctgatggctacctggacttgattgtcttgaaaaactgccctaagcttgtcctgctctcacttatgagacagacgagtagtggaacacatgttgagtcaccatatatagtgtatataaagcttactgtcgaaaaggtgaaggcatttgtgctggagccgggtgcacttgtagacgaaccagacaaggaaggaatcatagattcagatggagaggttttggcaagaggaaaaagaacatataaatgtgatcaaaaggccttgatgtcttacgacaagcttcaagtaacagttgatcaagaaagattgttctgtaaattttgtataagccagagggagctagtacttgctaagctctcaccaacgacgaaactcgtctccctccatcttgctatggatcgtcagccggagagggagaatgatgaactaccatctccggcgataatttccgaccgagttctggtaaatggtgttgtcacgccgttaacgttgaccgccgagggagagctacgatcgacggaatctggacggcggaaatcgacgttggcaaaagaaatcctgagtttcgtcgtggaaggtaacaaggttagagtaaagaccttggttgagaaaggaggaggaatttgctgtagaggaagtgctggagattatgcgaggaacgatttcgttttcgagcctctctctgatgaatctagaaagctttggtccgataagttccatcaacacctcgtctctctcggtcggccaaagaaattgcttgtgtttgtgaatccgtttggcgggaagaaaacagcgagaaagatatttcaagaggaagtaaagccattgtttgaagatgcaaatattcaacttgagattcaagaaaccaagtatcagttgcatgcaaaggaaattgttaggtccatggatgtatcaaaatacgatggtattgtttgtgttagcggtgacggtatccttgttgaggttgtaaatggactgcttgaaagagaagactggaagactgccataaaattgccgatcggaatggtccctgcaggtcgtacacgttctctagatgtagcaactatctcacaagggactaccaaattcttcagtgtcttgatgcttgcttggggtttagtggctgatatagacatcgagtcagagaaattcagatggatgggtagtgctcgctttgatatctatgtatgtttagttgaacatttgaaaattttctgcaatgcatgttttaatatgcgttactcaactaagttactggtggaggttgaacaaaaaaaaaaaaaaaaagagattggtcttcagaggataatatgcttaagacaataccatggacgaattctatttgtgccagctcctgggttcgaaagctatgggcaacgagccagttgcagtatagataaagagccatctggtagtgataagacactcgtataccaaggacctgatagtaaacttgaaaatctggattggagagaaatgaaaggcccatttgtttcagtatggcttcataatgttccctggggtgctgagaacactttggctgctcctgacgctaaggtgaaggcattcgtactggagccaggtgcacgcatagacgaaccagacaaggaaggaatcatagattcagatggagaagttttggcaagaggaagaaaatcgtacaaatgtgatcaaaaggctttgatgtcttacgacaagcttcaaataagtgttgatcaaggtttagccactctcttctctcctgaataa

SEQ ID NO: 69609 - protein, 1240 aa, Arabidopsis thaliana
  peptide (1)..(1240): Ceres Seq. ID no. 1820395
  misc_feature (379)..(515): Pfam Name: Diacylglycerol kinase catalytic domain (presumed) Pfam Description: Diacylglycerol kinase catalytic domain
  misc_feature (790)..(1177): Homolog of NCBI NO: 22136030 NR Description: putative protein [Arabidopsis thaliana]
  misc_feature (266)..(552): Homolog of NCBI NO: 22136030 NR Description: putative protein [Arabidopsis thaliana]
  misc_feature (475)..(758): Homolog of NCBI NO: 34898712 NR Description: putative sphingosine kinase [Oryza sativa
  misc_feature (281)..(473): Homolog of NCBI NO: 34898712 NR Description: putative sphingosine kinase [Oryza sativa
  misc_feature (807)..(1056): Homolog of NCBI NO: 34898712 NR Description: putative sphingosine kinase [Oryza sativa
  misc_feature (1091)..(1177): Homolog of NCBI NO: 34898712 NR Description: putative sphingosine kinase [Oryza sativa
  misc_feature (1177)..(1239): Homolog of NCBI NO: 34898712 NR Description: putative sphingosine kinase [Oryza sativa
  misc_feature (333)..(758): Homolog of NCBI NO: 22136030 NR Description: putative protein [Arabidopsis thaliana]
  misc_feature (978)..(1181): Homolog of NCBI NO: 34910090 NR Description: B1100D10.20 [Oryza sativa (japonica
  misc_feature (296)..(450): Homolog of NCBI NO: 34910090 NR Description: B1100D10.20 [Oryza sativa (japonica
MASQMPFTTISRKISCMKLLPLCPLQLSTTQTPTTIPMSLSFYKNELSDDTPCQSGYTDYISFQVPDETFPEISNCIGIAKGYKQNSNNEKNGYTSLEAVLLSVPNGYTCVDLSLYKDKELVLLLNKTNTDSEGSGEACMMVVQTGDLAFISISGSSSLNQWELEDLKVLLISSINIDGSIVNLEMENEKVRKVPHSVIAPLAVSASRGVACVFAERRRALVYILEEDEDEEISDENSTKEARRNSLSFSKLYATVTEVVLFCLMENDQFMCPTDIITGIVFIDGELAMLTLTADGELRWTEYGLRQYLSMKKDVLGFIVEGKQIRVKAVVEKEAGGICCGQFGGDFVRKDFVFEPLIDQNGWCYKLRQYLDSLGRPKRLLVFVNPFGGKKSAREIFVKEVKPLFEDADVQLEIQETKYQLHAKEFVKSMDVSKYDGIVCVSGDGILVEVVNGLLERADWRNALKLPIGMVPAGTGNGMIKSLLDTVGLRCCANSATISIIRGHKRSVDVATIAQGNTKFFSVLMLAWGLIADIDIESEKFRWMGSARIDFYVCLVDKFDNYCIAVVKLLALQRIICLRRYNGRILFLPAPGFEGYGQPASCSLYQEPHVSDKEVGYQGPETKFEDLEWREMKGPFVTIWLHNVPWGSENTLTAPAAKFSDGYLDLIVLKNCPKLVLLSLMRQTSSGTHVESPYIVYIKLTVEKVKAFVLEPGALVDEPDKEGIIDSDGEVLARGKRTYKCDQKALMSYDKLQVTVDQERLFCKFCISQRELVLAKLSPTTKLVSLHLAMDRQPERENDELPSPAIISDRVLVNGVVTPLTLTAEGELRSTESGRRKSTLAKEILSFVVEGNKVRVKTLVEKGGGICCRGSAGDYARNDFVFEPLSDESRKLWSDKFHQHLVSLGRPKKLLVFVNPFGGKKTARKIFQEEVKPLFEDANIQLEIQETKYQLHAKEIVRSMDVSKYDGIVCVSGDGILVEVVNGLLEREDWKTAIKLPIGMVPAGRTRSLDVATISQGTTKFFSVLMLAWGLVADIDIESEKFRWMGSARFDIYVCLVEHLKIFCNACFNMRYSTKLLVEVEQKKKKKEIGLQRIICLRQYHGRILFVPAPGFESYGQRASCSIDKEPSGSDKTLVYQGPDSKLENLDWREMKGPFVSVWLHNVPWGAENTLAAPDAKVKAFVLEPGARIDEPDKEGIIDSDGEVLARGRKSYKCDQKALMSYDKLQISVDQGLATLFSPE

SEQ ID NO: 69610 - protein, 1236 aa, Arabidopsis thaliana
  peptide (1)..(1236): Ceres Seq. ID no. 1820396
  misc_feature (375)..(511): Pfam Name: Diacylglycerol kinase catalytic domain (presumed) Pfam Description: Diacylglycerol kinase catalytic domain
  misc_feature (786)..(1173): Homolog of NCBI NO: 22136030 NR Description: putative protein [Arabidopsis thaliana]
  misc_feature (262)..(548): Homolog of NCBI NO: 22136030 NR Description: putative protein [Arabidopsis thaliana]
  misc_feature (471)..(754): Homolog of NCBI NO: 34898712 NR Description: putative sphingosine kinase [Oryza sativa
  misc_feature (277)..(469): Homolog of NCBI NO: 34898712 NR Description: putative sphingosine kinase [Oryza sativa
  misc_feature (803)..(1052): Homolog of NCBI NO: 34898712 NR Description: putative sphingosine kinase [Oryza sativa
  misc_feature (1087)..(1173): Homolog of NCBI NO: 34898712 NR Description: putative sphingosine kinase [Oryza sativa
  misc_feature (1173)..(1235): Homolog of NCBI NO: 34898712 NR Description: putative sphingosine kinase [Oryza sativa
  misc_feature (329)..(754): Homolog of NCBI NO: 22136030 NR Description: putative protein [Arabidopsis thaliana]
  misc_feature (974)..(1177): Homolog of NCBI NO: 34910090 NR Description: B1100D10.20 [Oryza sativa (japonica
  misc_feature (292)..(446): Homolog of NCBI NO: 34910090 NR Description: B1100D10.20 [Oryza sativa (japonica
MPFTTISRKISCMKLLPLCPLQLSTTQTPTTIPMSLSFYKNELSDDTPCQSGYTDYISFQVPDETFPEISNCIGIAKGYKQNSNNEKNGYTSLEAVLLSVPNGYTCVDLSLYKDKELVLLLNKTNTDSEGSGEACMMVVQTGDLAFISISGSSSLNQWELEDLKVLLISSINIDGSIVNLEMENEKVRKVPHSVIAPLAVSASRGVACVFAERRRALVYILEEDEDEEISDENSTKEARRNSLSFSKLYATVTEVVLFCLMENDQFMCPTDIITGIVFIDGELAMLTLTADGELRWTEYGLRQYLSMKKDVLGFIVEGKQIRVKAVVEKEAGGICCGQFGGDFVRKDFVFEPLIDQNGWCYKLRQYLDSLGRPKRLLVFVNPFGGKKSAREIFVKEVKPLFEDADVQLEIQETKYQLHAKEFVKSMDVSKYDGIVCVSGDGILVEVVNGLLERADWRNALKLPIGMVPAGTGNGMIKSLLDTVGLRCCANSATISIIRGHKRSVDVATIAQGNTKFFSVLMLAWGLIADIDIESEKFRWMGSARIDFYVCLVDKFDNYCIAVVKLLALQRIICLRRYNGRILFLPAPGFEGYGQPASCSLYQEPHVSDKEVGYQGPETKFEDLEWREMKGPFVTIWLHNVPWGSENTLTAPAAKFSDGYLDLIVLKNCPKLVLLSLMRQTSSGTHVESPYIVYIKLTVEKVKAFVLEPGALVDEPDKEGIIDSDGEVLARGKRTYKCDQKALMSYDKLQVTVDQERLFCKFCISQRELVLAKLSPTTKLVSLHLAMDRQPERENDELPSPAIISDRVLVNGVVTPLTLTAEGELRSTESGRRKSTLAKEILSFVVEGNKVRVKTLVEKGGGICCRGSAGDYARNDFVFEPLSDESRKLWSDKFHQHLVSLGRPKKLLVFVNPFGGKKTARKIFQEEVKPLFEDANIQLEIQETKYQLHAKEIVRSMDVSKYDGIVCVSGDGILVEVVNGLLEREDWKTAIKLPIGMVPAGRTRSLDVATISQGTTKFFSVLMLAWGLVADIDIESEKFRWMGSARFDIYVCLVEHLKIFCNACFNMRYSTKLLVEVEQKKKKKEIGLQRIICLRQYHGRILFVPAPGFESYGQRASCSIDKEPSGSDKTLVYQGPDSKLENLDWREMKGPFVSVWLHNVPWGAENTLAAPDAKVKAFVLEPGARIDEPDKEGIIDSDGEVLARGRKSYKCDQKALMSYDKLQISVDQGLATLFSPE

SEQ ID NO: 69611 - protein, 1224 aa, Arabidopsis thaliana
  peptide (1)..(1224): Ceres Seq. ID no. 1820397
  misc_feature (363)..(499): Pfam Name: Diacylglycerol kinase catalytic domain (presumed) Pfam Description: Diacylglycerol kinase catalytic domain
  misc_feature (774)..(1161): Homolog of NCBI NO: 22136030 NR Description: putative protein [Arabidopsis thaliana]
  misc_feature (250)..(536): Homolog of NCBI NO: 22136030 NR Description: putative protein [Arabidopsis thaliana]
  misc_feature (459)..(742): Homolog of NCBI NO: 34898712 NR Description: putative sphingosine kinase [Oryza sativa
  misc_feature (265)..(457): Homolog of NCBI NO: 34898712 NR Description: putative sphingosine kinase [Oryza sativa
  misc_feature (791)..(1040): Homolog of NCBI NO: 34898712 NR Description: putative sphingosine kinase [Oryza sativa
  misc_feature (1075)..(1161): Homolog of NCBI NO: 34898712 NR Description: putative sphingosine kinase [Oryza sativa
  misc_feature (1161)..(1223): Homolog of NCBI NO: 34898712 NR Description: putative sphingosine kinase [Oryza sativa
  misc_feature (317)..(742): Homolog of NCBI NO: 22136030 NR Description: putative protein [Arabidopsis thaliana]
  misc_feature (962)..(1165): Homolog of NCBI NO: 34910090 NR Description: B1100D10.20 [Oryza sativa (japonica
  misc_feature (280)..(434): Homolog of NCBI NO: 34910090 NR Description: B1100D10.20 [Oryza sativa (japonica
MKLLPLCPLQLSTTQTPTTIPMSLSFYKNELSDDTPCQSGYTDYISFQVPDETFPEISNCIGIAKGYKQNSNNEKNGYTSLEAVLLSVPNGYTCVDLSLYKDKELVLLLNKTNTDSEGSGEACMMVVQTGDLAFISISGSSSLNQWELEDLKVLLISSINIDGSIVNLEMENEKVRKVPHSVIAPLAVSASRGVACVFAERRRALVYILEEDEDEEISDENSTKEARRNSLSFSKLYATVTEVVLFCLMENDQFMCPTDIITGIVFIDGELAMLTLTADGELRWTEYGLRQYLSMKKDVLGFIVEGKQIRVKAVVEKEAGGICCGQFGGDFVRKDFVFEPLIDQNGWCYKLRQYLDSLGRPKRLLVFVNPFGGKKSAREIFVKEVKPLFEDADVQLEIQETKYQLHAKEFVKSMDVSKYDGIVCVSGDGILVEVVNGLLERADWRNALKLPIGMVPAGTGNGMIKSLLDTVGLRCCANSATISIIRGHKRSVDVATIAQGNTKFFSVLMLAWGLIADIDIESEKFRWMGSARIDFYVCLVDKFDNYCIAVVKLLALQRIICLRRYNGRILFLPAPGFEGYGQPASCSLYQEPHVSDKEVGYQGPETKFEDLEWREMKGPFVTIWLHNVPWGSENTLTAPAAKFSDGYLDLIVLKNCPKLVLLSLMRQTSSGTHVESPYIVYIKLTVEKVKAFVLEPGALVDEPDKEGIIDSDGEVLARGKRTYKCDQKALMSYDKLQVTVDQERLFCKFCISQRELVLAKLSPTTKLVSLHLAMDRQPERENDELPSPAIISDRVLVNGVVTPLTLTAEGELRSTESGRRKSTLAKEILSFVVEGNKVRVKTLVEKGGGICCRGSAGDYARNDFVFEPLSDESRKLWSDKFHQHLVSLGRPKKLLVFVNPFGGKKTARKIFQEEVKPLFEDANIQLEIQETKYQLHAKEIVRSMDVSKYDGIVCVSGDGILVEVVNGLLEREDWKTAIKLPIGMVPAGRTRSLDVATISQGTTKFFSVLMLAWGLVADIDIESEKFRWMGSARFDIYVCLVEHLKIFCNACFNMRYSTKLLVEVEQKKKKKEIGLQRIICLRQYHGRILFVPAPGFESYGQRASCSIDKEPSGSDKTLVYQGPDSKLENLDWREMKGPFVSVWLHNVPWGAENTLAAPDAKVKAFVLEPGARIDEPDKEGIIDSDGEVLARGRKSYKCDQKALMSYDKLQISVDQGLATLFSPE

SEQ ID NO: 69612 - DNA, 648 bp, Arabidopsis thaliana
  misc_feature (1)..(648): Ceres Seq. ID no. 1820406
  misc_feature: MA Experiment ID: 20000182 Result: Up-regulated in Transcription
  misc_feature: MA Experiment 20000182 PARAMETER Experiment Name: At_2mM_SA_P Parameter: Age (day) Value: 14
  misc_feature: MA Experiment 20000182 PARAMETER Experiment Name: At_2mM_SA_P Parameter: Organism Value: A. thaliana
  misc_feature: MA Experiment 20000182 PARAMETER Experiment Name: At_2mM_SA_P Parameter: Plant Line Value: WS
  misc_feature: MA Experiment 20000182 PARAMETER Experiment Name: At_2mM_SA_P Parameter: Timepoint (hr) Value: 6
  misc_feature: MA Experiment 20000182 PARAMETER Experiment Name: At_2mM_SA_P Parameter: Tissue Value: Aerial
  misc_feature: MA Experiment 20000182 PARAMETER Experiment Name: At_2mM_SA_P Parameter: Treatment Value: 2mM SA vs. No Treatment
  misc_feature: MA Experiment ID: 20000185 Result: Down-regulated in Transcription
  misc_feature: MA Experiment 20000185 PARAMETER Experiment Name: At_Roots__P Parameter: Age (day) Value: 7 vs. 21
  misc_feature: MA Experiment 20000185 PARAMETER Experiment Name: At_Roots__P Parameter: Organism Value: A. thaliana
  misc_feature: MA Experiment 20000185 PARAMETER Experiment Name: At_Roots__P Parameter: Tissue Value: Roots vs. Whole Plant
  misc_feature: MA Experiment ID: 20000234 Result: Up-regulated in Transcription
  misc_feature: MA Experiment 20000234 PARAMETER Experiment Name: At_Siliques_P Parameter: Age (day) Value: 21
  misc_feature: MA Experiment 20000234 PARAMETER Experiment Name: At_Siliques_P Parameter: Organism Value: A. thaliana
  misc_feature: MA Experiment 20000234 PARAMETER Experiment Name: At_Siliques_P Parameter: Plant Line Value: WS
  misc_feature: MA Experiment 20000234 PARAMETER Experiment Name: At_Siliques_P Parameter: Tissue Value: Less Than 5mm Siliques vs. Whole Plant
  misc_feature: MA Experiment ID: 20000439 Result: Down-regulated in Transcription
  misc_feature: MA Experiment 20000439 PARAMETER Experiment Name: At_Roots__P Parameter: Age (day) Value: 14 vs. 21
  misc_feature: MA Experiment 20000439 PARAMETER Experiment Name: At_Roots__P Parameter: Organism Value: A. thaliana
  misc_feature: MA Experiment 20000439 PARAMETER Experiment Name: At_Roots__P Parameter: Tissue Value: Roots vs. Whole Plant
  misc_feature: MA Experiment ID: 20000452 Result: Down-regulated in Transcription
  misc_feature: MA Experiment 20000452 PARAMETER Experiment Name: At_CS6879_Shoots-Roots_P Parameter: Age (day) Value: 14
  misc_feature: MA Experiment 20000452 PARAMETER Experiment Name: At_CS6879_Shoots-Roots_P Parameter: Organism Value: A. thaliana
  misc_feature: MA Experiment 20000452 PARAMETER Experiment Name: At_CS6879_Shoots-Roots_P Parameter: Plant Line Value: CS6879 vs. WS
  misc_feature: MA Experiment 20000452 PARAMETER Experiment Name: At_CS6879_Shoots-Roots_P Parameter: Tissue Value: Shoots
  misc_feature: MA Experiment ID: 20001248 Result: Up-regulated in Transcription
  misc_feature: MA Experiment 20001248 PARAMETER Experiment Name: At_Far-red-induction_P Parameter: Age (day) Value: 7
  misc_feature: MA Experiment 20001248 PARAMETER Experiment Name: At_Far-red-induction_P Parameter: Light Value: Far-red vs. White
  misc_feature: MA Experiment 20001248 PARAMETER Experiment Name: At_Far-red-induction_P Parameter: Organism Value: A. thaliana
  misc_feature: MA Experiment 20001248 PARAMETER Experiment Name: At_Far-red-induction_P Parameter: Plant Line Value: Columbia
  misc_feature: MA Experiment 20001248 PARAMETER Experiment Name: At_Far-red-induction_P Parameter: Timepoint (hr) Value: 4
  misc_feature: MA Experiment 20001248 PARAMETER Experiment Name: At_Far-red-induction_P Parameter: Tissue Value: Whole Plant
  misc_feature: MA Experiment ID: 20001450 Result: Up-regulated in Transcription
  misc_feature: MA Experiment 20001450 PARAMETER Experiment Name: At_Far-red-induction_P Parameter: Age (day) Value: 7
  misc_feature: MA Experiment 20001450 PARAMETER Experiment Name: At_Far-red-induction_P Parameter: Light Value: Far-red vs. White
  misc_feature: MA Experiment 20001450 PARAMETER Experiment Name: At_Far-red-induction_P Parameter: Organism Value: A. thaliana
  misc_feature: MA Experiment 20001450 PARAMETER Experiment Name: At_Far-red-induction_P Parameter: Plant Line Value: Columbia
  misc_feature: MA Experiment 20001450 PARAMETER Experiment Name: At_Far-red-induction_P Parameter: Timepoint (hr) Value: 8
  misc_feature: MA Experiment 20001450 PARAMETER Experiment Name: At_Far-red-induction_P Parameter: Tissue Value: Whole Plant
  misc_feature: MA Experiment ID: 20001451 Result: Up-regulated in Transcription
  misc_feature: MA Experiment 20001451 PARAMETER Experiment Name: At_Far-red-induction_P Parameter: Age (day) Value: 7
  misc_feature: MA Experiment 20001451 PARAMETER Experiment Name: At_Far-red-induction_P Parameter: Light Value: Far-red vs. White
  misc_feature: MA Experiment 20001451 PARAMETER Experiment Name: At_Far-red-induction_P Parameter: Organism Value: A. thaliana
  misc_feature: MA Experiment 20001451 PARAMETER Experiment Name: At_Far-red-induction_P Parameter: Plant Line Value: Columbia
  misc_feature: MA Experiment 20001451 PARAMETER Experiment Name: At_Far-red-induction_P Parameter: Timepoint (hr) Value: 24
  misc_feature: MA Experiment 20001451 PARAMETER Experiment Name: At_Far-red-induction_P Parameter: Tissue Value: Whole Plant
  misc_feature: MA Experiment ID: 20001905 Result: Up-regulated in Transcription
  misc_feature: MA Experiment 20001905 PARAMETER Experiment Name: At_Drought_Reproduction_P Parameter: Age (day) Value: 40
  misc_feature: MA Experiment 20001905 PARAMETER Experiment Name: At_Drought_Reproduction_P Parameter: Organism Value: A. thaliana
  misc_feature: MA Experiment 20001905 PARAMETER Experiment Name: At_Drought_Reproduction_P Parameter: Plant Line Value: WS
  misc_feature: MA Experiment 20001905 PARAMETER Experiment Name: At_Drought_Reproduction_P Parameter: Timepoint (day) Value: 10
  misc_feature: MA Experiment 20001905 PARAMETER Experiment Name: At_Drought_Reproduction_P Parameter: Tissue Value: Rosettes
  misc_feature: MA Experiment 20001905 PARAMETER Experiment Name: At_Drought_Reproduction_P Parameter: Treatment Value: Drought vs. No Drought
  misc_feature: MA Experiment ID: 20001906 Result: Down-regulated in Transcription
  misc_feature: MA Experiment 20001906 PARAMETER Experiment Name: At_Drought_Reproduction_P Parameter: Age (day) Value: 35
  misc_feature: MA Experiment 20001906 PARAMETER Experiment Name: At_Drought_Reproduction_P Parameter: Organism Value: A. thaliana
  misc_feature: MA Experiment 20001906 PARAMETER Experiment Name: At_Drought_Reproduction_P Parameter: Plant Line Value: WS
  misc_feature: MA Experiment 20001906 PARAMETER Experiment Name: At_Drought_Reproduction_P Parameter: Timepoint (day) Value: 5
  misc_feature: MA Experiment 20001906 PARAMETER Experiment Name: At_Drought_Reproduction_P Parameter: Tissue Value: Siliques
  misc_feature: MA Experiment 20001906 PARAMETER Experiment Name: At_Drought_Reproduction_P Parameter: Treatment Value: Drought vs. No Drought
  misc_feature: MA Experiment ID: 20001911 Result: Down-regulated in Transcription
  misc_feature: MA Experiment 20001911 PARAMETER Experiment Name: At_Drought_Reproduction_P Parameter: Age (day) Value: 40
  misc_feature: MA Experiment 20001911 PARAMETER Experiment Name: At_Drought_Reproduction_P Parameter: Organism Value: A. thaliana
  misc_feature: MA Experiment 20001911 PARAMETER Experiment Name: At_Drought_Reproduction_P Parameter: Plant Line Value: WS
  misc_feature: MA Experiment 20001911 PARAMETER Experiment Name: At_Drought_Reproduction_P Parameter: Timepoint (day) Value: 10
  misc_feature: MA Experiment 20001911 PARAMETER Experiment Name: At_Drought_Reproduction_P Parameter: Tissue Value: Flowers
  misc_feature: MA Experiment 20001911 PARAMETER Experiment Name: At_Drought_Reproduction_P Parameter: Treatment Value: Drought vs. No Drought
atggaagaagaaactctacaagtcttcttcttctctcatcctctcttctccattttcataactctctacagtctaatcctcatctatttccccaatgatttgcttcgaatctttctctcccctgttcttctcatctccggagctctccttctctctcttctccgtctcggatcgacccgagaacctaacacccaacccgataaaagctacgaggagtctgaagaacctaaggtttttctggttcgtgaatccgatttgatgggtggttttgtggaatggaacttgagagcaccattggaagtgattcacgaagcttacgaagatgaagaagaggaagaagaagaagaagatccgacccggtttagaaaaatggagagattcccatcgttgtcactctgttacccagaatcagattcggaatcggattctgcttcctcgtcagaattcaatttcccggaaatcggtgactggaactcgccggaaaatatgggattcagatgggaagaagacgagggtggaataggatgtgaaggtttgattgagataaagctcgatcattatagccataataggaagatgatgagtaaaacagagattgattttcatgcagaggaagatggtttgatcgagatcgatctttttccatga

SEQ ID NO: 69613 - protein, 215 aa, Arabidopsis thaliana
  peptide (1)..(215): Ceres Seq. ID no. 1820407
  misc_feature (1)..(215): Homolog of NCBI NO: 15234492 NR Description: hypothetical protein; protein id: At4g21500.1
MEEETLQVFFFSHPLFSIFITLYSLILIYFPNDLLRIFLSPVLLISGALLLSLLRLGSTREPNTQPDKSYEESEEPKVFLVRESDLMGGFVEWNLRAPLEVIHEAYEDEEEEEEEEDPTRFRKMERFPSLSLCYPESDSESDSASSSEFNFPEIGDWNSPENMGFRWEEDEGGIGCEGLIEIKLDHYSHNRKMMSKTEIDFHAEEDGLIEIDLFP

SEQ ID NO: 69614 - protein, 129 aa, Arabidopsis thaliana
  peptide (1)..(129): Ceres Seq. ID no. 1820408
  misc_feature (1)..(129): Homolog of NCBI NO: 15234492 NR Description: hypothetical protein; protein id: At4g21500.1
MGGFVEWNLRAPLEVIHEAYEDEEEEEEEEDPTRFRKMERFPSLSLCYPESDSESDSASSSEFNFPEIGDWNSPENMGFRWEEDEGGIGCEGLIEIKLDHYSHNRKMMSKTEIDFHAEEDGLIEIDLFP

SEQ ID NO: 69615 - DNA, 2148 bp, Arabidopsis thaliana
  misc_feature (1)..(2148): Ceres Seq. ID no. 1820476
  misc_feature: MA Experiment ID: 20000269 Result: Up-regulated in Transcription
  misc_feature: MA Experiment 20000269 PARAMETER Experiment Name: At_1mM_KNO3_L-vs-H_Roots_P Parameter: Age (day) Value: 7,10,12
  misc_feature: MA Experiment 20000269 PARAMETER Experiment Name: At_1mM_KNO3_L-vs-H_Roots_P Parameter: Organism Value: A. thaliana
  misc_feature: MA Experiment 20000269 PARAMETER Experiment Name: At_1mM_KNO3_L-vs-H_Roots_P Parameter: Plant Line Value: WS
  misc_feature: MA Experiment 20000269 PARAMETER Experiment Name: At_1mM_KNO3_L-vs-H_Roots_P Parameter: Timepoint (day) Value: 7,10,12
  misc_feature: MA Experiment 20000269 PARAMETER Experiment Name: At_1mM_KNO3_L-vs-H_Roots_P Parameter: Tissue Value: Roots
  misc_feature: MA Experiment 20000269 PARAMETER Experiment Name: At_1mM_KNO3_L-vs-H_Roots_P Parameter: Treatment Value: 1mM KNO3 vs. 50mM KNO3
  misc_feature: MA Experiment ID: 20000439 Result: Up-regulated in Transcription
  misc_feature: MA Experiment 20000439 PARAMETER Experiment Name: At_Roots__P Parameter: Age (day) Value: 14 vs. 21
  misc_feature: MA Experiment 20000439 PARAMETER Experiment Name: At_Roots__P Parameter: Organism Value: A. thaliana
  misc_feature: MA Experiment 20000439 PARAMETER Experiment Name: At_Roots__P Parameter: Tissue Value: Roots vs. Whole Plant
  misc_feature: MA Experiment ID: 20000527 Result: Down-regulated in Transcription
  misc_feature: MA Experiment 20000527 PARAMETER Experiment Name: At_10percent_PEG_P Parameter: Age (day) Value: 20
  misc_feature: MA Experiment 20000527 PARAMETER Experiment Name: At_10percent_PEG_P Parameter: Organism Value: A. thaliana
  misc_feature: MA Experiment 20000527 PARAMETER Experiment Name: At_10percent_PEG_P Parameter: Plant Line Value: WS
  misc_feature: MA Experiment 20000527 PARAMETER Experiment Name: At_10percent_PEG_P Parameter: Timepoint (day) Value: 20
  misc_feature: MA Experiment 20000527 PARAMETER Experiment Name: At_10percent_PEG_P Parameter: Tissue Value: Whole Plant
  misc_feature: MA Experiment 20000527 PARAMETER Experiment Name: At_10percent_PEG_P Parameter: Treatment Value: 10percent PEG vs. No Treatment
atgaagagcacgaacgacgaatctccttccttgggatacgacttcgccggagttagcatcaaggacggaaaatctaagccgccggcgccggtaatatgttacgatggcttgttcggagggagagacgtgattagaatcgtgctattggtcacgaccgtgacactttcttgtctattattctacaaatctgcaaacaatccactcaatatggtgttttctccatggaagaccgattgttatgcttccaaacttacaaacgagtcttcctcaaaaacggaaccaaagaaggagccggtttcagaactagagagagtattgatgaatgcggctatggaagataacacggtgatcataacggcgttaaaccaagcatgggccgaaccaaactctacattcgatgtgtttcgagagagttttaaagtcggaatagaaacggagaggttattgaagcatgtgatcgcggtttgcttggatatcaaggcatatgatcagtgcctaaaggttcatcctcattgctatttgatcaacgccacagattcagaccaactctcaggtccgaatcggtttatgacgcctggttacttgaaacttatttggcggcgaatggatcttcttaggcaagttattggtttagggtacaacttcatattcacggatgcagatatattatggcttcgagacccatttcctcgtttttttccggatgctgattttcaaataacatgcgatgattacaatggaagaccatcggacaaaaagaatcacgtgaactccggatttacatacgtcaaggcaaacaacaaaacttcaaaattttacaaatattggattagatcgagtcggaaatttcctggaaaacacgatcaagatgtgttcaacttcataaaaaacgatcttcacgtcgagaaacttgggataaagatgaggtttttcgataccgtttactttggagggttttgtcagccgagccgagacatcaatgtggtcaacacaatgcatgctaattgttgtattggcttggacaacaaagtgaataatcttaaggcagctctcgaagattggaaacgatatgtgtcactaaacacgaccgtgtccgagactaaatggaatattccgcctagttttcttgattatggatctgcgatcggacaaaaagaagtaaagaaaatcctggttttggttctaggtttagctgcttgtcttcttctttacaaaacagcttatcctcttcatcaagagctcgatgttaacaatctcagctctcgtcctttgctcgatcacacctcttcgtcttctccactaacaagatcaaaatcgatcagttttagggaagttctggagaatgcatcaacagagaatcgaacagttattgtaacaacgttgaaccaagcatgggcagagccaaactctctgttcgatctatttcttgagagttttcgtatcggacaaggaacaaagaagttacttcaacatgtggttgtggtttgcttggattccaaggcatttgctcgctgctcacaacttcaccctaattgctactatttgaaaaccacagggactgatttctccggcgagaaactctttgctactcctgattacctcaaaatgatgtggcgaagaatcgagcttctcacacaagtgctagaaatgggatacaacttcatcttcacggatgcggatataatgtggcttcgagatccatttcctcggctgtatcctgatggagattttcaaatggcatgtgatcgattcttcggtgatcctcatgactcagacaattgggtaaacggaggattcacttacgtgaaatcaaaccacagaagcatcgagttctacaaattttggtacaattctcgtcttgattatccgaagatgcatgaccaagatgtgttcaaccaaatcaaacacaaggctttagtctcagagattggaatccaaatgagattctttgatacggtttactttggtgggttttgtcaaacgagcagagacataaacttggtgtgtaccatgcatgctaattgttgtgtaggattagcgaagaagcttcatgatcttaatcttgttcttgatgactggagaaactatttgtctttgtctgaaccagttaaaaacacaacttggagtgttcctatgaagtgtacatga

SEQ ID NO: 69616 - protein, 715 aa, Arabidopsis thaliana
  peptide (1)..(715): Ceres Seq. ID no. 1820477
  misc_feature (376)..(714): Homolog of NCBI NO: 21536907 NR Description: regulatory protein [Arabidopsis thaliana]
  misc_feature (33)..(377): Homolog of NCBI NO: 21536907 NR Description: regulatory protein [Arabidopsis thaliana]
  misc_feature (387)..(715): Homolog of NCBI NO: 18395292 NR Description: unknown protein; protein id: At2g02060.1
  misc_feature (437)..(715): Homolog of NCBI NO: 38344278 NR Description: OSJNBa0013K16.10 [Oryza sativa (japonica
  misc_feature (399)..(715): Homolog of NCBI NO: 15223826 NR Description: hypothetical protein common family; protein id:
  misc_feature (444)..(714): Homolog of NCBI NO: 18414558 NR Description: hypothetical protein common family; protein id:
  misc_feature (45)..(372): Homolog of NCBI NO: 15223826 NR Description: hypothetical protein common family; protein id:
  misc_feature (42)..(372): Homolog of NCBI NO: 18395292 NR Description: unknown protein; protein id: At2g02060.1
  misc_feature (101)..(372): Homolog of NCBI NO: 38344278 NR Description: OSJNBa0013K16.10 [Oryza sativa (japonica
  misc_feature (412)..(715): Homolog of NCBI NO: 23306127 NR Description: Putataive InsB from Escherichia coli [Oryza
MKSTNDESPSLGYDFAGVSIKDGKSKPPAPVICYDGLFGGRDVIRIVLLVTTVTLSCLLFYKSANNPLNMVFSPWKTDCYASKLTNESSSKTEPKKEPVSELERVLMNAAMEDNTVIITALNQAWAEPNSTFDVFRESFKVGIETERLLKHVIAVCLDIKAYDQCLKVHPHCYLINATDSDQLSGPNRFMTPGYLKLIWRRMDLLRQVIGLGYNFIFTDADILWLRDPFPRFFPDADFQITCDDYNGRPSDKKNHVNSGFTYVKANNKTSKFYKYWIRSSRKFPGKHDQDVFNFIKNDLHVEKLGIKMRFFDTVYFGGFCQPSRDINVVNTMHANCCIGLDNKVNNLKAALEDWKRYVSLNTTVSETKWNIPPSFLDYGSAIGQKEVKKILVLVLGLAACLLLYKTAYPLHQELDVNNLSSRPLLDHTSSSSPLTRSKSISFREVLENASTENRTVIVTTLNQAWAEPNSLFDLFLESFRIGQGTKKLLQHVVVVCLDSKAFARCSQLHPNCYYLKTTGTDFSGEKLFATPDYLKMMWRRIELLTQVLEMGYNFIFTDADIMWLRDPFPRLYPDGDFQMACDRFFGDPHDSDNWVNGGFTYVKSNHRSIEFYKFWYNSRLDYPKMHDQDVFNQIKHKALVSEIGIQMRFFDTVYFGGFCQTSRDINLVCTMHANCCVGLAKKLHDLNLVLDDWRNYLSLSEPVKNTTWSVPMKCT

SEQ ID NO: 69617 - protein, 646 aa, Arabidopsis thaliana
  peptide (1)..(646): Ceres Seq. ID no. 1820478
  misc_feature (307)..(645): Homolog of NCBI NO: 21536907 NR Description: regulatory protein [Arabidopsis thaliana]
  misc_feature (1)..(308): Homolog of NCBI NO: 21536907 NR Description: regulatory protein [Arabidopsis thaliana]
  misc_feature (318)..(646): Homolog of NCBI NO: 18395292 NR Description: unknown protein; protein id: At2g02060.1
  misc_feature (368)..(646): Homolog of NCBI NO: 38344278 NR Description: OSJNBa0013K16.10 [Oryza sativa (japonica
  misc_feature (330)..(646): Homolog of NCBI NO: 15223826 NR Description: hypothetical protein common family; protein id:
  misc_feature (375)..(645): Homolog of NCBI NO: 18414558 NR Description: hypothetical protein common family; protein id:
  misc_feature (1)..(303): Homolog of NCBI NO: 15223826 NR Description: hypothetical protein common family; protein id:
  misc_feature (1)..(303): Homolog of NCBI NO: 18395292 NR Description: unknown protein; protein id: At2g02060.1
  misc_feature (32)..(303): Homolog of NCBI NO: 38344278 NR Description: OSJNBa0013K16.10 [Oryza sativa (japonica
  misc_feature (343)..(646): Homolog of NCBI NO: 23306127 NR Description: Putataive InsB from Escherichia coli [Oryza
MVFSPWKTDCYASKLTNESSSKTEPKKEPVSELERVLMNAAMEDNTVIITALNQAWAEPNSTFDVFRESFKVGIETERLLKHVIAVCLDIKAYDQCLKVHPHCYLINATDSDQLSGPNRFMTPGYLKLIWRRMDLLRQVIGLGYNFIFTDADILWLRDPFPRFFPDADFQITCDDYNGRPSDKKNHVNSGFTYVKANNKTSKFYKYWIRSSRKFPGKHDQDVFNFIKNDLHVEKLGIKMRFFDTVYFGGFCQPSRDINVVNTMHANCCIGLDNKVNNLKAALEDWKRYVSLNTTVSETKWNIPPSFLDYGSAIGQKEVKKILVLVLGLAACLLLYKTAYPLHQELDVNNLSSRPLLDHTSSSSPLTRSKSISFREVLENASTENRTVIVTTLNQAWAEPNSLFDLFLESFRIGQGTKKLLQHVVVVCLDSKAFARCSQLHPNCYYLKTTGTDFSGEKLFATPDYLKMMWRRIELLTQVLEMGYNFIFTDADIMWLRDPFPRLYPDGDFQMACDRFFGDPHDSDNWVNGGFTYVKSNHRSIEFYKFWYNSRLDYPKMHDQDVFNQIKHKALVSEIGIQMRFFDTVYFGGFCQTSRDINLVCTMHANCCVGLAKKLHDLNLVLDDWRNYLSLSEPVKNTTWSVPMKCT

SEQ ID NO: 69618 - protein, 609 aa, Arabidopsis thaliana
  peptide (1)..(609): Ceres Seq. ID no. 1820479
  misc_feature (270)..(608): Homolog of NCBI NO: 21536907 NR Description: regulatory protein [Arabidopsis thaliana]
  misc_feature (1)..(271): Homolog of NCBI NO: 21536907 NR Description: regulatory protein [Arabidopsis thaliana]
  misc_feature (281)..(609): Homolog of NCBI NO: 18395292 NR Description: unknown protein; protein id: At2g02060.1
  misc_feature (331)..(609): Homolog of NCBI NO: 38344278 NR Description: OSJNBa0013K16.10 [Oryza sativa (japonica
  misc_feature (293)..(609): Homolog of NCBI NO: 15223826 NR Description: hypothetical protein common family; protein id:
  misc_feature (338)..(608): Homolog of NCBI NO: 18414558 NR Description: hypothetical protein common family; protein id:
  misc_feature (1)..(266): Homolog of NCBI NO: 15223826 NR Description: hypothetical protein common family; protein id:
  misc_feature (1)..(266): Homolog of NCBI NO: 18395292 NR Description: unknown protein; protein id: At2g02060.1
  misc_feature (1)..(266): Homolog of NCBI NO: 38344278 NR Description: OSJNBa0013K16.10 [Oryza sativa (japonica
  misc_feature (306)..(609): Homolog of NCBI NO: 23306127 NR Description: Putataive InsB from Escherichia coli [Oryza
MNAAMEDNTVIITALNQAWAEPNSTFDVFRESFKVGIETERLLKHVIAVCLDIKAYDQCLKVHPHCYLINATDSDQLSGPNRFMTPGYLKLIWRRMDLLRQVIGLGYNFIFTDADILWLRDPFPRFFPDADFQITCDDYNGRPSDKKNHVNSGFTYVKANNKTSKFYKYWIRSSRKFPGKHDQDVFNFIKNDLHVEKLGIKMRFFDTVYFGGFCQPSRDINVVNTMHANCCIGLDNKVNNLKAALEDWKRYVSLNTTVSETKWNIPPSFLDYGSAIGQKEVKKILVLVLGLAACLLLYKTAYPLHQELDVNNLSSRPLLDHTSSSSPLTRSKSISFREVLENASTENRTVIVTTLNQAWAEPNSLFDLFLESFRIGQGTKKLLQHVVVVCLDSKAFARCSQLHPNCYYLKTTGTDFSGEKLFATPDYLKMMWRRIELLTQVLEMGYNFIFTDADIMWLRDPFPRLYPDGDFQMACDRFFGDPHDSDNWVNGGFTYVKSNHRSIEFYKFWYNSRLDYPKMHDQDVFNQIKHKALVSEIGIQMRFFDTVYFGGFCQTSRDINLVCTMHANCCVGLAKKLHDLNLVLDDWRNYLSLSEPVKNTTWSVPMKCT

SEQ ID NO: 69619 - DNA, 921 bp, Arabidopsis thaliana
  misc_feature (1)..(921): Ceres Seq. ID no. 1820484
  misc_feature: MA Experiment ID: 20000347 Result: Up-regulated in Transcription
  misc_feature: MA Experiment 20000347 PARAMETER Experiment Name: At_2mM_SA_Sub_P Parameter: Age (day) Value: 14
  misc_feature: MA Experiment 20000347 PARAMETER Experiment Name: At_2mM_SA_Sub_P Parameter: Organism Value: A. thaliana
  misc_feature: MA Experiment 20000347 PARAMETER Experiment Name: At_2mM_SA_Sub_P Parameter: Plant Line Value: WS
  misc_feature: MA Experiment 20000347 PARAMETER Experiment Name: At_2mM_SA_Sub_P Parameter: Timepoint (hr) Value: 6
  misc_feature: MA Experiment 20000347 PARAMETER Experiment Name: At_2mM_SA_Sub_P Parameter: Tissue Value: Aerial
  misc_feature: MA Experiment 20000347 PARAMETER Experiment Name: At_2mM_SA_Sub_P Parameter: Treatment Value: 2mM SA vs. No Treatment
  misc_feature: MA Experiment ID: 20000355 Result: Down-regulated in Transcription
  misc_feature: MA Experiment 20000355 PARAMETER Experiment Name: At_Siliques_Sub_P Parameter: Age (day) Value: 21
  misc_feature: MA Experiment 20000355 PARAMETER Experiment Name: At_Siliques_Sub_P Parameter: Organism Value: A. thaliana
  misc_feature: MA Experiment 20000355 PARAMETER Experiment Name: At_Siliques_Sub_P Parameter: Plant Line Value: WS
  misc_feature: MA Experiment 20000355 PARAMETER Experiment Name: At_Siliques_Sub_P Parameter: Tissue Value: Less Than 5mm Siliques vs. Whole Plant
atggatcttgccccagaggagcttcaatttctcaacaaaagaggaattctacgtgaatcaacatcaatcccacaatattctctaaaaaccttttacctcataaccctaaccctaattttccctctctccttcgcaatcctagcccattctctcttcacacaaccaatcttagctcagatcgatacatacccacaagccgatcaatctcaactccaacatgaatggaccgtcctcctcgttttccaattctgctacatcatcttcctcttcgccttctctcttctctccacagccgccgttgtcttcaccgtcgcttctctttacaccggaaagcctgtttctttctcctccacaatgtcagcgatacctctcgtcctcaaaagattgttcataacattcctctgggtctctcttttgatgcttgcgtacaacaccgtgttcttgatcttcttggtcacgttaatcgtagctgttgatttacagaacgtggttttagctgtgttttcgttggtagtgatctttgttctgtttcttgtagttcatgtttatatgacagctttgtggcatttagctagtgtagtctctgttcttgaaccgatttacggtttggctgcgatgaagaagagttatgagttgcttaaagggaagactcttatggcttgttcgatggttttcatctatcttgttcattgtggattcattgctggagtttttggagcagtggtggttcgtggtggtgatgattacggaattttcgctagaatcgtcgctggtggattcttgagtgtgttttactatgtttgcaagagttttcatcatcaggagattgataaatccgctttgcacgatcatctcggtgggtatctcggtgaatatgtgcctcttaagagcaacattcaaatggagaactttgaagtttga

SEQ ID NO: 69620 - protein, 306 aa, Arabidopsis thaliana
  peptide (1)..(306): Ceres Seq. ID no. 1820485
  misc_feature (1)..(306): Homolog of NCBI NO: 7485737 NR Description: hypothetical protein F18F4.50 - Arabidopsis >gi|2827649|emb|CAA16603.1| putative protein [Arabidopsis >gi|7268790|emb|CAB78995.1| putative protein [Arabidopsis
  misc_feature (1)..(306): Homolog of NCBI NO: 30684945 NR Description: expressed protein [Arabidopsis thaliana]
  misc_feature (1)..(306): Homolog of NCBI NO: 15241607 NR Description: putative protein; protein id: At5g44860.1, by cDNA: 31042. [Arabidopsis thaliana] >gi|2660664|gb|AAC79135.1| protein [Arabidopsis thaliana] >gi|10177476|dbj|BAB10867.1|
  misc_feature (1)..(306): Homolog of NCBI NO: 18397813 NR Description: expressed protein; protein id: At1g31130.1, by cDNA: 151489., supported by cDNA: gi_13272450, supported by gi_19698822 [Arabidopsis thaliana] >gi|25513746|pir||H86436
  misc_feature (1)..(268): Homolog of NCBI NO: 34908936 NR Description: P0691E06.20 [Oryza sativa (japonica
  misc_feature (262)..(305): Homolog of NCBI NO: 34908936 NR Description: P0691E06.20 [Oryza sativa (japonica
  misc_feature (12)..(278): Homolog of NCBI NO: 9295718 NR Description: T24P13.3 [Arabidopsis thaliana]
  misc_feature (11)..(238): Homolog of NCBI NO: 15222319 NR Description: unknown protein; protein id: At1g69430.1 thaliana] >gi|12597781|gb|AAG60093.1|AC073178_4 unknown protein
  misc_feature (1)..(232): Homolog of NCBI NO: 14517480 NR Description: At2g18690/MSF3.7 [Arabidopsis thaliana]
  misc_feature (1)..(232): Homolog of NCBI NO: 18398818 NR Description: expressed protein; protein id: At2g18690.1, by cDNA: gi_14517479 [Arabidopsis thaliana]
MDLAPEELQFLNKRGILRESTSIPQYSLKTFYLITLTLIFPLSFAILAHSLFTQPILAQIDTYPQADQSQLQHEWTVLLVFQFCYIIFLFAFSLLSTAAVVFTVASLYTGKPVSFSSTMSAIPLVLKRLFITFLWVSLLMLAYNTVFLIFLVTLIVAVDLQNVVLAVFSLVVIFVLFLVVHVYMTALWHLASVVSVLEPIYGLAAMKKSYELLKGKTLMACSMVFIYLVHCGFIAGVFGAVVVRGGDDYGIFARIVAGGFLSVFYYVCKSFHHQEIDKSALHDHLGGYLGEYVPLKSNIQMENFEV

SEQ ID NO: 69621 - protein, 188 aa, Arabidopsis thaliana
  peptide (1)..(188): Ceres Seq. ID no. 1820486
  misc_feature (1)..(188): Homolog of NCBI NO: 7485737 NR Description: hypothetical protein F18F4.50 - Arabidopsis >gi|2827649|emb|CAA16603.1| putative protein [Arabidopsis >gi|7268790|emb|CAB78995.1| putative protein [Arabidopsis
  misc_feature (1)..(188): Homolog of NCBI NO: 30684945 NR Description: expressed protein [Arabidopsis thaliana]
  misc_feature (1)..(188): Homolog of NCBI NO: 15241607 NR Description: putative protein; protein id: At5g44860.1, by cDNA: 31042. [Arabidopsis thaliana] >gi|2660664|gb|AAC79135.1| protein [Arabidopsis thaliana] >gi|10177476|dbj|BAB10867.1|
  misc_feature (1)..(188): Homolog of NCBI NO: 18397813 NR Description: expressed protein; protein id: At1g31130.1, by cDNA: 151489., supported by cDNA: gi_13272450, supported by gi_19698822 [Arabidopsis thaliana] >gi|25513746|pir||H86436
  misc_feature (1)..(150): Homolog of NCBI NO: 34908936 NR Description: P0691E06.20 [Oryza sativa (japonica
  misc_feature (144)..(187): Homolog of NCBI NO: 34908936 NR Description: P0691E06.20 [Oryza sativa (japonica
  misc_feature (1)..(160): Homolog of NCBI NO: 9295718 NR Description: T24P13.3 [Arabidopsis thaliana]
  misc_feature (1)..(120): Homolog of NCBI NO: 15222319 NR Description: unknown protein; protein id: At1g69430.1 thaliana] >gi|12597781|gb|AAG60093.1|AC073178_4 unknown protein
  misc_feature (1)..(114): Homolog of NCBI NO: 14517480 NR Description: At2g18690/MSF3.7 [Arabidopsis thaliana]
  misc_feature (1)..(114): Homolog of NCBI NO: 18398818 NR Description: expressed protein; protein id: At2g18690.1, by cDNA: gi_14517479 [Arabidopsis thaliana]
MSAIPLVLKRLFITFLWVSLLMLAYNTVFLIFLVTLIVAVDLQNVVLAVFSLVVIFVLFLVVHVYMTALWHLASVVSVLEPIYGLAAMKKSYELLKGKTLMACSMVFIYLVHCGFIAGVFGAVVVRGGDDYGIFARIVAGGFLSVFYYVCKSFHHQEIDKSALHDHLGGYLGEYVPLKSNIQMENFEV

SEQ ID NO: 69622 - protein, 167 aa, Arabidopsis thaliana
  peptide (1)..(167): Ceres Seq. ID no. 1820487
  misc_feature (1)..(167): Homolog of NCBI NO: 7485737 NR Description: hypothetical protein F18F4.50 - Arabidopsis >gi|2827649|emb|CAA16603.1| putative protein [Arabidopsis >gi|7268790|emb|CAB78995.1| putative protein [Arabidopsis
  misc_feature (1)..(167): Homolog of NCBI NO: 30684945 NR Description: expressed protein [Arabidopsis thaliana]
  misc_feature (1)..(167): Homolog of NCBI NO: 15241607 NR Description: putative protein; protein id: At5g44860.1, by cDNA: 31042. [Arabidopsis thaliana] >gi|2660664|gb|AAC79135.1| protein [Arabidopsis thaliana] >gi|10177476|dbj|BAB10867.1|
  misc_feature (1)..(167): Homolog of NCBI NO: 18397813 NR Description: expressed protein; protein id: At1g31130.1, by cDNA: 151489., supported by cDNA: gi_13272450, supported by gi_19698822 [Arabidopsis thaliana] >gi|25513746|pir||H86436
  misc_feature (1)..(129): Homolog of NCBI NO: 34908936 NR Description: P0691E06.20 [Oryza sativa (japonica
  misc_feature (123)..(166): Homolog of NCBI NO: 34908936 NR Description: P0691E06.20 [Oryza sativa (japonica
  misc_feature (1)..(139): Homolog of NCBI NO: 9295718 NR Description: T24P13.3 [Arabidopsis thaliana]
  misc_feature (1)..(99): Homolog of NCBI NO: 15222319 NR Description: unknown protein; protein id: At1g69430.1 thaliana] >gi|12597781|gb|AAG60093.1|AC073178_4 unknown protein
  misc_feature (1)..(93): Homolog of NCBI NO: 14517480 NR Description: At2g18690/MSF3.7 [Arabidopsis thaliana]
  misc_feature (1)..(93): Homolog of NCBI NO: 18398818 NR Description: expressed protein; protein id: At2g18690.1, by cDNA: gi_14517479 [Arabidopsis thaliana]
MLAYNTVFLIFLVTLIVAVDLQNVVLAVFSLVVIFVLFLVVHVYMTALWHLASVVSVLEPIYGLAAMKKSYELLKGKTLMACSMVFIYLVHCGFIAGVFGAVVVRGGDDYGIFARIVAGGFLSVFYYVCKSFHHQEIDKSALHDHLGGYLGEYVPLKSNIQMENFEV

SEQ ID NO: 69623 - DNA, 2679 bp, Arabidopsis thaliana
  misc_feature (1)..(2679): Ceres Seq. ID no. 1820499
  misc_feature: MA Experiment ID: 20000185 Result: Up-regulated in Transcription
  misc_feature: MA Experiment 20000185 PARAMETER Experiment Name: At_Roots__P Parameter: Age (day) Value: 7 vs. 21
  misc_feature: MA Experiment 20000185 PARAMETER Experiment Name: At_Roots__P Parameter: Organism Value: A. thaliana
  misc_feature: MA Experiment 20000185 PARAMETER Experiment Name: At_Roots__P Parameter: Tissue Value: Roots vs. Whole Plant
  misc_feature: MA Experiment ID: 20000227 Result: Up-regulated in Transcription
  misc_feature: MA Experiment 20000227 PARAMETER Experiment Name: At_Root-Tips-vs-Tops_P Parameter: Tissue Value: Root Tips vs. Root Tops
  misc_feature: MA Experiment ID: 20000439 Result: Up-regulated in Transcription
  misc_feature: MA Experiment 20000439 PARAMETER Experiment Name: At_Roots__P Parameter: Age (day) Value: 14 vs. 21
  misc_feature: MA Experiment 20000439 PARAMETER Experiment Name: At_Roots__P Parameter: Organism Value: A. thaliana
  misc_feature: MA Experiment 20000439 PARAMETER Experiment Name: At_Roots__P Parameter: Tissue Value: Roots vs. Whole Plant
  misc_feature: MA Experiment ID: 20000527 Result: Down-regulated in Transcription
  misc_feature: MA Experiment 20000527 PARAMETER Experiment Name: At_10percent_PEG_P Parameter: Age (day) Value: 20
  misc_feature: MA Experiment 20000527 PARAMETER Experiment Name: At_10percent_PEG_P Parameter: Organism Value: A. thaliana
  misc_feature: MA Experiment 20000527 PARAMETER Experiment Name: At_10percent_PEG_P Parameter: Plant Line Value: WS
  misc_feature: MA Experiment 20000527 PARAMETER Experiment Name: At_10percent_PEG_P Parameter: Timepoint (day) Value: 20
  misc_feature: MA Experiment 20000527 PARAMETER Experiment Name: At_10percent_PEG_P Parameter: Tissue Value: Whole Plant
  misc_feature: MA Experiment 20000527 PARAMETER Experiment Name: At_10percent_PEG_P Parameter: Treatment Value: 10percent PEG vs. No Treatment
  misc_feature: Pfam Name: Pkinase Pfam Description: Protein kinase domain
atggccaaggccaagcaggttcgtttcatcagcatagattgtgggtcaccccctaatattaactatgtagacactgatactggtatcagttacacctgggatgcacctttcatcaacgctggagtaaatctgaacgtctctgaagaatacggttacccgaaaaacccggttttgcctttcccgcttgctgatgtaagatcttttcctcaaggaaacaggaactgttacaccttaaccccctccgatggaaaagggaatctttatctcatcagagcttcgtttatgtatggaaactacgatggtaaaaatgctttacctgagtttgatctctacgtaaacgtgaatttctggacctcggtgaaactcagaaatgcttctgagaacgtcatcaaggagatcctcagctttgcagagtcagatacaatatatgtttgccttgtgaacaaaggtaaaggaactccttttatttcagcgttggagcttcgaccaatgaacagctccatctatggaactgagtttggaagaaatgtctcattggtactctatcaaagatgggatacaggatatttgaatggaacaggacggtaccaaaaggatacatatgatcgtatttggtctccgtactctccagtgtcttggaatacaactatgactactgggtatatcgatatttttcagtctggttataggccaccagatgaagttattaagacagctgcttcgcctaaaagtgacgatgaaccattggaactgtcttggacatcaagcgatccagatactcggttttatgcgtacctttattttgcagaacttgaaaatctcaagaggaatgagagcagagaaatcaagatattctggaatgggtcgcctgtttcaggagcttttaacccctctcctgagtattcaatgacagtgtctaactcacgagctttcactggtaaagatcactggatttctgttcagaagaccgcagagtcaacgcgtccaccaatactcaatgctattgagattttttcagcacaatctctggatgaattttacaccagaattgacgatgttcaagccatagaaagcataaaatcaacgtataaagtgaataagatttggactggtgatccttgctctcccagactcttcccttgggaagttttgctgatgagcttgtttctgtattttgctgcgagaagaaatcttagttcaagtggattacatggaccaatagcgttcgcatttagaaatctctcccttcttgagtcattggatttatcaaacaacaacctcaaaggaattgtgccggaatttttggctgatctaaaatatctgaagtccctgaatttgaaaggaaataacttgactgggtttatcccaagatctcttaggaaaagagcaacggctaatggacttgcactcagtgtcgatgaacaaaacatttgtcactcacgttcatgtcgggacgggaacagaatcatggtgccaatagttgtatccacattagtgattattctcattgccgccttggctatcatatgcatcatgcgaagggaaagcaaaataatgtattcaggagcatattcaggaccacttctgccttcgggaaagagaaggttcacatatagtgaagtctctagtattacaaacaacttcaataaagtgattggtaaaggagggtttggtattgtgtaccttggttcccttgaagatggaactgaaattgctgtaaagatgatcaacgattcttcttttggaaaatctaaaggatcttcatcatcatcatcatcatcccaggtctccaaagaattccaagtcgaggcggagcttcttttgacagtccatcaccggaacttagcttcgtttgttggatactgcgatgatggtcgcagtatggctctcatctacgagtacatggccaatggcaacttgcaagattatctttcaagtgagaatgcagaggatcttagttgggaaaagagactccatatagccatagactctgcacaagggttggagtatcttcatcatggctgcaggccaccaatagtacacagagacgttaaaacagcaaacattcttttaaacgataacttggaagccaagatcgctgatttcgggctttctaaggtcttccctgaggatgatctcagccacgttgtgactgctgtcatgggcactcctggctatgtcgatcctgagtactacaacacgtttaagctaaacgagaagagcgacgtgtacagctttgggatcgtcctccttgaactcataaccggcaagagatccataatgaaaactgacgacggagaaaaaatgaacgttgttcactacgtcgagcctttcctcaaaatgggagacatagatggtgtcgtggatccacggcttcacggcgacttctcctcaaactcggcttggaaatttgtggaagtggcaatgtcttgcgtcagagacagaggaaccaacagaccaaacacaaaccagatcgtgtctgacttgaaacagtgcttagctgccgagctagctcgtgagccaaaaagcaatcatgagaagaaggaagtagtgaaagagaagtacacgaagaccaagtcgacggttcagaattatagcagcaatgaatataatagctcatctggatcggtttcactttcttttggagattactccacgtttggcccaatggcaaggtag

SEQ ID NO: 69624 - protein, 892 aa, Arabidopsis thaliana
  peptide (1)..(892): Ceres Seq. ID no. 1820500
  misc_feature: Pfam Name: Pkinase Pfam Description: Protein kinase domain
  misc_feature (6)..(846): Homolog of NCBI NO: 15233796 NR Description: serine threonine-specific receptor protein kinase protein id: At4g29990.1 [Arabidopsis thaliana]
  misc_feature (6)..(834): Homolog of NCBI NO: 15224738 NR Description: putative receptor-like protein kinase; protein id:
  misc_feature (6)..(839): Homolog of NCBI NO: 25387148 NR Description: probable protein kinase [imported] - Arabidopsis >gi|9802795|gb|AAF99864.1|AC015448_14 Putative protein kinase
  misc_feature (6)..(849): Homolog of NCBI NO: 15232537 NR Description: serine/threonine-specific protein kinase,
  misc_feature (6)..(833): Homolog of NCBI NO: 15224743 NR Description: putative receptor-like protein kinase; protein id:
  misc_feature (9)..(845): Homolog of NCBI NO: 15222042 NR Description: light repressible receptor protein kinase,
  misc_feature (9)..(836): Homolog of NCBI NO: 25387154 NR Description: protein F22G5.6 [imported] - Arabidopsis thaliana
  misc_feature (6)..(666): Homolog of NCBI NO: 25387099 NR Description: hypothetical protein [imported] - Arabidopsis >gi|4836918|gb|AAD30620.1|AC007153_12 Very Similar to light
  misc_feature (590)..(836): Homolog of NCBI NO: 25387099 NR Description: hypothetical protein [imported] - Arabidopsis >gi|4836918|gb|AAD30620.1|AC007153_12 Very Similar to light
  misc_feature (6)..(846): Homolog of NCBI NO: 2129635 NR Description: serine/threonine-specific receptor protein kinase
MAKAKQVRFISIDCGSPPNINYVDTDTGISYTWDAPFINAGVNLNVSEEYGYPKNPVLPFPLADVRSFPQGNRNCYTLTPSDGKGNLYLIRASFMYGNYDGKNALPEFDLYVNVNFWTSVKLRNASENVIKEILSFAESDTIYVCLVNKGKGTPFISALELRPMNSSIYGTEFGRNVSLVLYQRWDTGYLNGTGRYQKDTYDRIWSPYSPVSWNTTMTTGYIDIFQSGYRPPDEVIKTAASPKSDDEPLELSWTSSDPDTRFYAYLYFAELENLKRNESREIKIFWNGSPVSGAFNPSPEYSMTVSNSRAFTGKDHWISVQKTAESTRPPILNAIEIFSAQSLDEFYTRIDDVQAIESIKSTYKVNKIWTGDPCSPRLFPWEVLLMSLFLYFAARRNLSSSGLHGPIAFAFRNLSLLESLDLSNNNLKGIVPEFLADLKYLKSLNLKGNNLTGFIPRSLRKRATANGLALSVDEQNICHSRSCRDGNRIMVPIVVSTLVIILIAALAIICIMRRESKIMYSGAYSGPLLPSGKRRFTYSEVSSITNNFNKVIGKGGFGIVYLGSLEDGTEIAVKMINDSSFGKSKGSSSSSSSSQVSKEFQVEAELLLTVHHRNLASFVGYCDDGRSMALIYEYMANGNLQDYLSSENAEDLSWEKRLHIAIDSAQGLEYLHHGCRPPIVHRDVKTANILLNDNLEAKIADFGLSKVFPEDDLSHVVTAVMGTPGYVDPEYYNTFKLNEKSDVYSFGIVLLELITGKRSIMKTDDGEKMNVVHYVEPFLKMGDIDGVVDPRLHGDFSSNSAWKFVEVAMSCVRDRGTNRPNTNQIVSDLKQCLAAELAREPKSNHEKKEVVKEKYTKTKSTVQNYSSNEYNSSSGSVSLSFGDYSTFGPMAR

SEQ ID NO: 69625 - protein, 798 aa, Arabidopsis thaliana
  peptide (1)..(798): Ceres Seq. ID no. 1820501
  misc_feature: Pfam Name: Pkinase Pfam Description: Protein kinase domain
  misc_feature (1)..(572): Homolog of NCBI NO: 25387099 NR Description: hypothetical protein [imported] - Arabidopsis >gi|4836918|gb|AAD30620.1|AC007153_12 Very Similar to light
  misc_feature (496)..(742): Homolog of NCBI NO: 25387099 NR Description: hypothetical protein [imported] - Arabidopsis >gi|4836918|gb|AAD30620.1|AC007153_12 Very Similar to light
  misc_feature (1)..(752): Homolog of NCBI NO: 2129635 NR Description: serine/threonine-specific receptor protein kinase
  misc_feature (1)..(752): Homolog of NCBI NO: 15233796 NR Description: serine threonine-specific receptor protein kinase protein id: At4g29990.1 [Arabidopsis thaliana]
  misc_feature (1)..(740): Homolog of NCBI NO: 15224738 NR Description: putative receptor-like protein kinase; protein id:
  misc_feature (1)..(745): Homolog of NCBI NO: 25387148 NR Description: probable protein kinase [imported] - Arabidopsis >gi|9802795|gb|AAF99864.1|AC015448_14 Putative protein kinase
  misc_feature (1)..(755): Homolog of NCBI NO: 15232537 NR Description: serine/threonine-specific protein kinase,
  misc_feature (1)..(739): Homolog of NCBI NO: 15224743 NR Description: putative receptor-like protein kinase; protein id:
  misc_feature (1)..(751): Homolog of NCBI NO: 15222042 NR Description: light repressible receptor protein kinase,
  misc_feature (1)..(742): Homolog of NCBI NO: 25387154 NR Description: protein F22G5.6 [imported] - Arabidopsis thaliana
MYGNYDGKNALPEFDLYVNVNFWTSVKLRNASENVIKEILSFAESDTIYVCLVNKGKGTPFISALELRPMNSSIYGTEFGRNVSLVLYQRWDTGYLNGTGRYQKDTYDRIWSPYSPVSWNTTMTTGYIDIFQSGYRPPDEVIKTAASPKSDDEPLELSWTSSDPDTRFYAYLYFAELENLKRNESREIKIFWNGSPVSGAFNPSPEYSMTVSNSRAFTGKDHWISVQKTAESTRPPILNAIEIFSAQSLDEFYTRIDDVQAIESIKSTYKVNKIWTGDPCSPRLFPWEVLLMSLFLYFAARRNLSSSGLHGPIAFAFRNLSLLESLDLSNNNLKGIVPEFLADLKYLKSLNLKGNNLTGFIPRSLRKRATANGLALSVDEQNICHSRSCRDGNRIMVPIVVSTLVIILIAALAIICIMRRESKIMYSGAYSGPLLPSGKRRFTYSEVSSITNNFNKVIGKGGFGIVYLGSLEDGTEIAVKMINDSSFGKSKGSSSSSSSSQVSKEFQVEAELLLTVHHRNLASFVGYCDDGRSMALIYEYMANGNLQDYLSSENAEDLSWEKRLHIAIDSAQGLEYLHHGCRPPIVHRDVKTANILLNDNLEAKIADFGLSKVFPEDDLSHVVTAVMGTPGYVDPEYYNTFKLNEKSDVYSFGIVLLELITGKRSIMKTDDGEKMNVVHYVEPFLKMGDIDGVVDPRLHGDFSSNSAWKFVEVAMSCVRDRGTNRPNTNQIVSDLKQCLAAELAREPKSNHEKKEVVKEKYTKTKSTVQNYSSNEYNSSSGSVSLSFGDYSTFGPMAR

SEQ ID NO: 69626 - protein, 729 aa, Arabidopsis thaliana
  peptide (1)..(729): Ceres Seq. ID no. 1820502
  misc_feature: Pfam Name: Pkinase Pfam Description: Protein kinase domain
  misc_feature (1)..(503): Homolog of NCBI NO: 25387099 NR Description: hypothetical protein [imported] - Arabidopsis >gi|4836918|gb|AAD30620.1|AC007153_12 Very Similar to light
  misc_feature (427)..(673): Homolog of NCBI NO: 25387099 NR Description: hypothetical protein [imported] - Arabidopsis >gi|4836918|gb|AAD30620.1|AC007153_12 Very Similar to light
  misc_feature (1)..(683): Homolog of NCBI NO: 2129635 NR Description: serine/threonine-specific receptor protein kinase
  misc_feature (1)..(683): Homolog of NCBI NO: 15233796 NR Description: serine threonine-specific receptor protein kinase protein id: At4g29990.1 [Arabidopsis thaliana]
  misc_feature (1)..(671): Homolog of NCBI NO: 15224738 NR Description: putative receptor-like protein kinase; protein id:
  misc_feature (1)..(676): Homolog of NCBI NO: 25387148 NR Description: probable protein kinase [imported] - Arabidopsis >gi|9802795|gb|AAF99864.1|AC015448_14 Putative protein kinase
  misc_feature (1)..(686): Homolog of NCBI NO: 15232537 NR Description: serine/threonine-specific protein kinase,
  misc_feature (1)..(670): Homolog of NCBI NO: 15224743 NR Description: putative receptor-like protein kinase; protein id:
  misc_feature (1)..(682): Homolog of NCBI NO: 15222042 NR Description: light repressible receptor protein kinase,
  misc_feature (1)..(673): Homolog of NCBI NO: 25387154 NR Description: protein F22G5.6 [imported] - Arabidopsis thaliana
MNSSIYGTEFGRNVSLVLYQRWDTGYLNGTGRYQKDTYDRIWSPYSPVSWNTTMTTGYIDIFQSGYRPPDEVIKTAASPKSDDEPLELSWTSSDPDTRFYAYLYFAELENLKRNESREIKIFWNGSPVSGAFNPSPEYSMTVSNSRAFTGKDHWISVQKTAESTRPPILNAIEIFSAQSLDEFYTRIDDVQAIESIKSTYKVNKIWTGDPCSPRLFPWEVLLMSLFLYFAARRNLSSSGLHGPIAFAFRNLSLLESLDLSNNNLKGIVPEFLADLKYLKSLNLKGNNLTGFIPRSLRKRATANGLALSVDEQNICHSRSCRDGNRIMVPIVVSTLVIILIAALAIICIMRRESKIMYSGAYSGPLLPSGKRRFTYSEVSSITNNFNKVIGKGGFGIVYLGSLEDGTEIAVKMINDSSFGKSKGSSSSSSSSQVSKEFQVEAELLLTVHHRNLASFVGYCDDGRSMALIYEYMANGNLQDYLSSENAEDLSWEKRLHIAIDSAQGLEYLHHGCRPPIVHRDVKTANILLNDNLEAKIADFGLSKVFPEDDLSHVVTAVMGTPGYVDPEYYNTFKLNEKSDVYSFGIVLLELITGKRSIMKTDDGEKMNVVHYVEPFLKMGDIDGVVDPRLHGDFSSNSAWKFVEVAMSCVRDRGTNRPNTNQIVSDLKQCLAAELAREPKSNHEKKEVVKEKYTKTKSTVQNYSSNEYNSSSGSVSLSFGDYSTFGPMAR

SEQ ID NO: 69627 - DNA, 1116 bp, Arabidopsis thaliana
  misc_feature (1)..(1116): Ceres Seq. ID no. 1820842
  misc_feature: MA Experiment ID: 20000443 Result: Up-regulated in Transcription
  misc_feature: MA Experiment 20000443 PARAMETER Experiment Name: At_1uM_BR-BRZ__P Parameter: Tissue Value: Shoot Apices
  misc_feature: MA Experiment 20000443 PARAMETER Experiment Name: At_1uM_BR-BRZ__P Parameter: Treatment Value: 1uM BRZ vs. No Treatment
  misc_feature: Pfam Name: peroxidase Pfam Description: Peroxidase
atgtctgtctctattccggtcttaatgaagagactttgtctgtataactctctctctctctttctttttcacctctttccctcaccctctctggctctctcattctctgttgagttgaacttactaaaagcacaaatggtttgggcaaatgctaagatgaggctagctttgtctcttgttacggttttcttcggcatctctcttgctaatcttgaagtcggattttactccaatacatgccctcaagccgagtcaatcgttaagagggttgtctcaggggctgctctttccgaccctaacctcccagccatacttctacggctccatttccatgattgctttgttgagggatgtgatggctcgatcctcgtgaacaacggagcaatctctgaaaagaatgcatttggacatgaaggcgttagaggatttgagatagtagaagccgtcaaagccgagcttgaagctgcatgccccggtgttgtctcctgctcagacattgttgccttggctgcacgtgatgccatatctttggcgaatggaccggcgtatgaggtgccaactgggcggagagatggtcgggtttcgaacatgtcattggctaaggacatgccggaggtgagtgactcgattgagatactaaaggctaagttcatgcagaaaggactcaacgccaaagacctcgtgcttctcagtgctgctcacactatcggaacaacggcctgcttcttcatgtccaaacggctctatgatttcttacctggtggccaacctgacccgactatcaatccaacattcctacccgaattaaccactcagtgcccacaaaatggtgacataaacgtccgtttaccaattgaccggttcagcgaacggctattcgacaagcagattctgcaaaacataaaggatggttttgctgtgcttcagaccgacgcaggtctttacgaggatgtaacgaccagacaggtcgtggattcctatcttgggatgctaaatccattctttgggccaacattcgagtctgatttcgttaaggcgatcgtaaagatggggaagattggtgtgaagactggtttcaaaggggagattcgacgggtttgctcggccttcaattga

SEQ ID NO: 69628 - protein, 371 aa, Arabidopsis thaliana
  peptide (1)..(371): Ceres Seq. ID no. 1820843
  misc_feature: Pfam Name: peroxidase Pfam Description: Peroxidase
  misc_feature (1)..(371): Homolog of NCBI NO: 15236089 NR Description: cationic peroxidase, putative; protein id:
  misc_feature (46)..(371): Homolog of NCBI NO: 26397928 NR Description: Peroxidase 43 precursor (Atperox P43)
  misc_feature (59)..(371): Homolog of NCBI NO: 19698450 NR Description: gaiacol peroxidase [Gossypium hirsutum]
MSVSIPVLMKRLCLYNSLSLFLFHLFPSPSLALSFSVELNLLKAQMVWANAKMRLALSLVTVFFGISLANLEVGFYSNTCPQAESIVKRVVSGAALSDPNLPAILLRLHFHDCFVEGCDGSILVNNGAISEKNAFGHEGVRGFEIVEAVKAELEAACPGVVSCSDIVALAARDAISLANGPAYEVPTGRRDGRVSNMSLAKDMPEVSDSIEILKAKFMQKGLNAKDLVLLSAAHTIGTTACFFMSKRLYDFLPGGQPDPTINPTFLPELTTQCPQNGDINVRLPIDRFSERLFDKQILQNIKDGFAVLQTDAGLYEDVTTRQVVDSYLGMLNPFFGPTFESDFVKAIVKMGKIGVKTGFKGEIRRVCSAFN

SEQ ID NO: 69629 - protein, 363 aa, Arabidopsis thaliana
  peptide (1)..(363): Ceres Seq. ID no. 1820844
  misc_feature: Pfam Name: peroxidase Pfam Description: Peroxidase
  misc_feature (1)..(363): Homolog of NCBI NO: 15236089 NR Description: cationic peroxidase, putative; protein id:
  misc_feature (38)..(363): Homolog of NCBI NO: 26397928 NR Description: Peroxidase 43 precursor (Atperox P43)
  misc_feature (51)..(363): Homolog of NCBI NO: 19698450 NR Description: gaiacol peroxidase [Gossypium hirsutum]
MKRLCLYNSLSLFLFHLFPSPSLALSFSVELNLLKAQMVWANAKMRLALSLVTVFFGISLANLEVGFYSNTCPQAESIVKRVVSGAALSDPNLPAILLRLHFHDCFVEGCDGSILVNNGAISEKNAFGHEGVRGFEIVEAVKAELEAACPGVVSCSDIVALAARDAISLANGPAYEVPTGRRDGRVSNMSLAKDMPEVSDSIEILKAKFMQKGLNAKDLVLLSAAHTIGTTACFFMSKRLYDFLPGGQPDPTINPTFLPELTTQCPQNGDINVRLPIDRFSERLFDKQILQNIKDGFAVLQTDAGLYEDVTTRQVVDSYLGMLNPFFGPTFESDFVKAIVKMGKIGVKTGFKGEIRRVCSAFN

SEQ ID NO: 69630 - protein, 326 aa, Arabidopsis thaliana
  peptide (1)..(326): Ceres Seq. ID no. 1820845
  misc_feature: Pfam Name: peroxidase Pfam Description: Peroxidase
  misc_feature (1)..(326): Homolog of NCBI NO: 15236089 NR Description: cationic peroxidase, putative; protein id:
  misc_feature (1)..(326): Homolog of NCBI NO: 26397928 NR Description: Peroxidase 43 precursor (Atperox P43)
  misc_feature (14)..(326): Homolog of NCBI NO: 19698450 NR Description: gaiacol peroxidase [Gossypium hirsutum]
MVWANAKMRLALSLVTVFFGISLANLEVGFYSNTCPQAESIVKRVVSGAALSDPNLPAILLRLHFHDCFVEGCDGSILVNNGAISEKNAFGHEGVRGFEIVEAVKAELEAACPGVVSCSDIVALAARDAISLANGPAYEVPTGRRDGRVSNMSLAKDMPEVSDSIEILKAKFMQKGLNAKDLVLLSAAHTIGTTACFFMSKRLYDFLPGGQPDPTINPTFLPELTTQCPQNGDINVRLPIDRFSERLFDKQILQNIKDGFAVLQTDAGLYEDVTTRQVVDSYLGMLNPFFGPTFESDFVKAIVKMGKIGVKTGFKGEIRRVCSAFN

SEQ ID NO: 69631 - DNA, 1680 bp, Arabidopsis thaliana
  misc_feature (1)..(1680): Ceres Seq. ID no. 1820945
  misc_feature: MA Experiment ID: 20000180 Result: Down-regulated in Transcription
  misc_feature: MA Experiment 20000180 PARAMETER Experiment Name: At_Germinating_Seeds_P Parameter: Age (hr) Value: 24 vs. 0
  misc_feature: MA Experiment 20000180 PARAMETER Experiment Name: At_Germinating_Seeds_P Parameter: Tissue Value: Germinating Seeds
  misc_feature: MA Experiment ID: 20001247 Result: Down-regulated in Transcription
  misc_feature: MA Experiment 20001247 PARAMETER Experiment Name: At_Far-red-induction_P Parameter: Age (day) Value: 7
  misc_feature: MA Experiment 20001247 PARAMETER Experiment Name: At_Far-red-induction_P Parameter: Light Value: Far-red vs. White
  misc_feature: MA Experiment 20001247 PARAMETER Experiment Name: At_Far-red-induction_P Parameter: Organism Value: A. thaliana
  misc_feature: MA Experiment 20001247 PARAMETER Experiment Name: At_Far-red-induction_P Parameter: Plant Line Value: Columbia
  misc_feature: MA Experiment 20001247 PARAMETER Experiment Name: At_Far-red-induction_P Parameter: Timepoint (hr) Value: 1
  misc_feature: MA Experiment 20001247 PARAMETER Experiment Name: At_Far-red-induction_P Parameter: Tissue Value: Whole Plant
  misc_feature: MA Experiment ID: 20001555 Result: Up-regulated in Transcription
  misc_feature: MA Experiment 20001555 PARAMETER Experiment Name: At_Drought_Soil_Dry_P Parameter: Age (day) Value: 24
  misc_feature: MA Experiment 20001555 PARAMETER Experiment Name: At_Drought_Soil_Dry_P Parameter: Organism Value: A. thaliana
  misc_feature: MA Experiment 20001555 PARAMETER Experiment Name: At_Drought_Soil_Dry_P Parameter: Plant Line Value: WS
  misc_feature: MA Experiment 20001555 PARAMETER Experiment Name: At_Drought_Soil_Dry_P Parameter: Post Timepoint (hr) Value: None
  misc_feature: MA Experiment 20001555 PARAMETER Experiment Name: At_Drought_Soil_Dry_P Parameter: Post-Treatment Value: None
  misc_feature: MA Experiment 20001555 PARAMETER Experiment Name: At_Drought_Soil_Dry_P Parameter: Timepoint (day) Value: 10
  misc_feature: MA Experiment 20001555 PARAMETER Experiment Name: At_Drought_Soil_Dry_P Parameter: Treatment Value: Drought vs. No Drought
  misc_feature: MA Experiment ID: 20001556 Result: Up-regulated in Transcription
  misc_feature: MA Experiment 20001556 PARAMETER Experiment Name: At_Drought_Soil_Dry_P Parameter: Age (day) Value: 26
  misc_feature: MA Experiment 20001556 PARAMETER Experiment Name: At_Drought_Soil_Dry_P Parameter: Organism Value: A. thaliana
  misc_feature: MA Experiment 20001556 PARAMETER Experiment Name: At_Drought_Soil_Dry_P Parameter: Plant Line Value: WS
  misc_feature: MA Experiment 20001556 PARAMETER Experiment Name: At_Drought_Soil_Dry_P Parameter: Post Timepoint (hr) Value: None
  misc_feature: MA Experiment 20001556 PARAMETER Experiment Name: At_Drought_Soil_Dry_P Parameter: Post-Treatment Value: None
  misc_feature: MA Experiment 20001556 PARAMETER Experiment Name: At_Drought_Soil_Dry_P Parameter: Timepoint (day) Value: 12
  misc_feature: MA Experiment 20001556 PARAMETER Experiment Name: At_Drought_Soil_Dry_P Parameter: Treatment Value: Drought vs. No Drought
  misc_feature: MA Experiment ID: 20001558 Result: Up-regulated in Transcription
  misc_feature: MA Experiment 20001558 PARAMETER Experiment Name: At_Drought_Soil_Dry_P Parameter: Age (day) Value: 27
  misc_feature: MA Experiment 20001558 PARAMETER Experiment Name: At_Drought_Soil_Dry_P Parameter: Organism Value: A. thaliana
  misc_feature: MA Experiment 20001558 PARAMETER Experiment Name: At_Drought_Soil_Dry_P Parameter: Plant Line Value: WS
  misc_feature: MA Experiment 20001558 PARAMETER Experiment Name: At_Drought_Soil_Dry_P Parameter: Post Timepoint (hr) Value: 6
  misc_feature: MA Experiment 20001558 PARAMETER Experiment Name: At_Drought_Soil_Dry_P Parameter: Post-Treatment Value: Re-Water vs. No Drought
  misc_feature: MA Experiment 20001558 PARAMETER Experiment Name: At_Drought_Soil_Dry_P Parameter: Timepoint (day) Value: 13
  misc_feature: MA Experiment 20001558 PARAMETER Experiment Name: At_Drought_Soil_Dry_P Parameter: Treatment Value: Drought vs. No Drought
atgtatttgccggagaaatcagttcttctggaattgatcagccgatgcagctctcttcgcgttttcaaacagatacagactcaattgattactcgtgatcttcttcgtgatgacttaatcatcaacaaagtcgtgacctttctgggcaaatccgcagattttgcatcttacagctctgtaattctccacagtatccgttctgtgttgagctctttctcatacaacacgcttttatcaagctatgcagtttgtgataaaccaagagtgacgatttttgcttacaaaacatttgtgagtaatgggttttcaccggacatgttcacgtttcctccagtttttaaggcttgtgggaagttttcagggatcagagaagggaaacagattcatggaattgttacgaagatgggtttttacgatgatatctatgtgcaaaactcgcttgttcatttttatggtgtgtgtggagaatcaaggaatgcatgtaaagtgttcggtgaaatgcctgtgagagatgttgtttcgtggactgggattataactggtttcacgaggactgggttgtataaggaagctttggatacgttttcaaagatggatgttgagcctaatttggctacgtatgtttgtgtattggtctcaagtgggcgggtagggtgtttaagtttagggaaaggaatccatgggttgatcttaaaaagggcatctttgatcagcttagagactggtaatgctcttatagatatgtatgtgaaatgtgagcaattgtctgatgcgatgagagtttttggtgagttggaaaagaaagataaagtttcttggaatagtatgattagtgggttggttcactgtgaaagatctaaggaggcgattgacttgttttctctgatgcaaacgtcttctggtataaagccagatgggcatatacttacaagtgttctctctgcgtgtgctagcttaggagctgtggatcacggaagatgggttcatgagtatattttaaccgctggaatcaaatgggatacgcatattggaactgccattgttgatatgtatgcaaaatgtggctacatcgaaacagctttggagattttcaacggaattagaagtaagaatgtgtttacttggaatgctctgttaggtggtttagctatccatgggcatggacttgaatcccttagatactttgaagaaatggttaagctaggttttaagccgaacctggtaacttttctcgcggctctaaatgcttgttgccacacaggtttagtcgatgaagggagaagatatttccataaaatgaaaagcagagaatacaatctatttcctaagctagaacattatggatgcatgattgatttgctttgtagagctggattgttagatgaagcattggaactcgtcaaagcaatgccggttaaaccggatgtacgtatatgtggagctattcttagtgcttgtaagaatagagggacattaatggagcttcctaaagagatattagatagttttttagatattgagtttgaagatagtggtgtttatgtgttgctgtctaatatttttgctgctaatagaagatgggatgatgttgcgagaatcaggaggttgatgaaggtaaaaggtatctcgaaggttccaggatcaagttatatagagaagtttatgactttagaccaatga

SEQ ID NO: 69632 - protein, 559 aa, Arabidopsis thaliana
  peptide (1)..(559): Ceres Seq. ID no. 1820946
  misc_feature (408)..(442): Pfam Name: PPR repeat Pfam Description: PPR repeat
  misc_feature (1)..(559): Homolog of NCBI NO: 15233645 NR Description: putative protein; protein id: At4g38010.1
  misc_feature (3)..(552): Homolog of NCBI NO: 38344239 NR Description: OJ991113_30.16 [Oryza sativa (japonica
  misc_feature (239)..(551): Homolog of NCBI NO: 15229345 NR Description: hypothetical protein; protein id: At3g04750.1 thaliana] >gi|6175175|gb|AAF04901.1|AC011437_16 hypothetical
  misc_feature (10)..(296): Homolog of NCBI NO: 15229345 NR Description: hypothetical protein; protein id: At3g04750.1 thaliana] >gi|6175175|gb|AAF04901.1|AC011437_16 hypothetical
  misc_feature (10)..(552): Homolog of NCBI NO: 15226301 NR Description: hypothetical protein; protein id: At2g34400.1
  misc_feature (8)..(552): Homolog of NCBI NO: 15227623 NR Description: unknown protein; protein id: At2g03380.1
  misc_feature (23)..(552): Homolog of NCBI NO: 15222917 NR Description: hypothetical protein; protein id: At1g50270.1
  misc_feature (4)..(552): Homolog of NCBI NO: 15228257 NR Description: unknown protein; protein id: At3g16610.1
  misc_feature (243)..(552): Homolog of NCBI NO: 15239745 NR Description: selenium-binding protein-like; protein id:
  misc_feature (7)..(198): Homolog of NCBI NO: 15239745 NR Description: selenium-binding protein-like; protein id:
MYLPEKSVLLELISRCSSLRVFKQIQTQLITRDLLRDDLIINKVVTFLGKSADFASYSSVILHSIRSVLSSFSYNTLLSSYAVCDKPRVTIFAYKTFVSNGFSPDMFTFPPVFKACGKFSGIREGKQIHGIVTKMGFYDDIYVQNSLVHFYGVCGESRNACKVFGEMPVRDVVSWTGIITGFTRTGLYKEALDTFSKMDVEPNLATYVCVLVSSGRVGCLSLGKGIHGLILKRASLISLETGNALIDMYVKCEQLSDAMRVFGELEKKDKVSWNSMISGLVHCERSKEAIDLFSLMQTSSGIKPDGHILTSVLSACASLGAVDHGRWVHEYILTAGIKWDTHIGTAIVDMYAKCGYIETALEIFNGIRSKNVFTWNALLGGLAIHGHGLESLRYFEEMVKLGFKPNLVTFLAALNACCHTGLVDEGRRYFHKMKSREYNLFPKLEHYGCMIDLLCRAGLLDEALELVKAMPVKPDVRICGAILSACKNRGTLMELPKEILDSFLDIEFEDSGVYVLLSNIFAANRRWDDVARIRRLMKVKGISKVPGSSYIEKFMTLDQ

SEQ ID NO: 69633 - protein, 454 aa, Arabidopsis thaliana
  peptide (1)..(454): Ceres Seq. ID no. 1820947
  misc_feature (303)..(337): Pfam Name: PPR repeat Pfam Description: PPR repeat
  misc_feature (1)..(454): Homolog of NCBI NO: 15233645 NR Description: putative protein; protein id: At4g38010.1
  misc_feature (1)..(447): Homolog of NCBI NO: 38344239 NR Description: OJ991113_30.16 [Oryza sativa (japonica
  misc_feature (134)..(446): Homolog of NCBI NO: 15229345 NR Description: hypothetical protein; protein id: At3g04750.1 thaliana] >gi|6175175|gb|AAF04901.1|AC011437_16 hypothetical
  misc_feature (1)..(191): Homolog of NCBI NO: 15229345 NR Description: hypothetical protein; protein id: At3g04750.1 thaliana] >gi|6175175|gb|AAF04901.1|AC011437_16 hypothetical
  misc_feature (1)..(447): Homolog of NCBI NO: 15226301 NR Description: hypothetical protein; protein id: At2g34400.1
  misc_feature (1)..(447): Homolog of NCBI NO: 15227623 NR Description: unknown protein; protein id: At2g03380.1
  misc_feature (1)..(447): Homolog of NCBI NO: 15222917 NR Description: hypothetical protein; protein id: At1g50270.1
  misc_feature (1)..(447): Homolog of NCBI NO: 15228257 NR Description: unknown protein; protein id: At3g16610.1
  misc_feature (138)..(447): Homolog of NCBI NO: 15239745 NR Description: selenium-binding protein-like; protein id:
  misc_feature (1)..(93): Homolog of NCBI NO: 15239745 NR Description: selenium-binding protein-like; protein id:
MFTFPPVFKACGKFSGIREGKQIHGIVTKMGFYDDIYVQNSLVHFYGVCGESRNACKVFGEMPVRDVVSWTGIITGFTRTGLYKEALDTFSKMDVEPNLATYVCVLVSSGRVGCLSLGKGIHGLILKRASLISLETGNALIDMYVKCEQLSDAMRVFGELEKKDKVSWNSMISGLVHCERSKEAIDLFSLMQTSSGIKPDGHILTSVLSACASLGAVDHGRWVHEYILTAGIKWDTHIGTAIVDMYAKCGYIETALEIFNGIRSKNVFTWNALLGGLAIHGHGLESLRYFEEMVKLGFKPNLVTFLAALNACCHTGLVDEGRRYFHKMKSREYNLFPKLEHYGCMIDLLCRAGLLDEALELVKAMPVKPDVRICGAILSACKNRGTLMELPKEILDSFLDIEFEDSGVYVLLSNIFAANRRWDDVARIRRLMKVKGISKVPGSSYIEKFMTLDQ

SEQ ID NO: 69634 - protein, 425 aa, Arabidopsis thaliana
  peptide (1)..(425): Ceres Seq. ID no. 1820948
  misc_feature (274)..(308): Pfam Name: PPR repeat Pfam Description: PPR repeat
  misc_feature (1)..(425): Homolog of NCBI NO: 15233645 NR Description: putative protein; protein id: At4g38010.1
  misc_feature (1)..(418): Homolog of NCBI NO: 38344239 NR Description: OJ991113_30.16 [Oryza sativa (japonica
  misc_feature (105)..(417): Homolog of NCBI NO: 15229345 NR Description: hypothetical protein; protein id: At3g04750.1 thaliana] >gi|6175175|gb|AAF04901.1|AC011437_16 hypothetical
  misc_feature (1)..(162): Homolog of NCBI NO: 15229345 NR Description: hypothetical protein; protein id: At3g04750.1 thaliana] >gi|6175175|gb|AAF04901.1|AC011437_16 hypothetical
  misc_feature (1)..(418): Homolog of NCBI NO: 15226301 NR Description: hypothetical protein; protein id: At2g34400.1
  misc_feature (1)..(418): Homolog of NCBI NO: 15227623 NR Description: unknown protein; protein id: At2g03380.1
  misc_feature (1)..(418): Homolog of NCBI NO: 15222917 NR Description: hypothetical protein; protein id: At1g50270.1
  misc_feature (1)..(418): Homolog of NCBI NO: 15228257 NR Description: unknown protein; protein id: At3g16610.1
  misc_feature (109)..(418): Homolog of NCBI NO: 15239745 NR Description: selenium-binding protein-like; protein id:
  misc_feature (1)..(64): Homolog of NCBI NO: 15239745 NR Description: selenium-binding protein-like; protein id:
MGFYDDIYVQNSLVHFYGVCGESRNACKVFGEMPVRDVVSWTGIITGFTRTGLYKEALDTFSKMDVEPNLATYVCVLVSSGRVGCLSLGKGIHGLILKRASLISLETGNALIDMYVKCEQLSDAMRVFGELEKKDKVSWNSMISGLVHCERSKEAIDLFSLMQTSSGIKPDGHILTSVLSACASLGAVDHGRWVHEYILTAGIKWDTHIGTAIVDMYAKCGYIETALEIFNGIRSKNVFTWNALLGGLAIHGHGLESLRYFEEMVKLGFKPNLVTFLAALNACCHTGLVDEGRRYFHKMKSREYNLFPKLEHYGCMIDLLCRAGLLDEALELVKAMPVKPDVRICGAILSACKNRGTLMELPKEILDSFLDIEFEDSGVYVLLSNIFAANRRWDDVARIRRLMKVKGISKVPGSSYIEKFMTLDQ

SEQ ID NO: 69635 - DNA, 1947 bp, Arabidopsis thaliana
  misc_feature (1)..(1947): Ceres Seq. ID no. 1821173
  misc_feature: MA Experiment ID: 20000495 Result: Down-regulated in Transcription
  misc_feature: MA Experiment 20000495 PARAMETER Experiment Name: At_Guard_Cells_P Parameter: Harvest Date Value: 8/2/2002
  misc_feature: MA Experiment 20000495 PARAMETER Experiment Name: At_Guard_Cells_P Parameter: Organism Value: A. thaliana
  misc_feature: MA Experiment 20000495 PARAMETER Experiment Name: At_Guard_Cells_P Parameter: Tissue Value: Guard Cells vs. Leaves
  misc_feature: MA Experiment ID: 20000527 Result: Down-regulated in Transcription
  misc_feature: MA Experiment 20000527 PARAMETER Experiment Name: At_10percent_PEG_P Parameter: Age (day) Value: 20
  misc_feature: MA Experiment 20000527 PARAMETER Experiment Name: At_10percent_PEG_P Parameter: Organism Value: A. thaliana
  misc_feature: MA Experiment 20000527 PARAMETER Experiment Name: At_10percent_PEG_P Parameter: Plant Line Value: WS
  misc_feature: MA Experiment 20000527 PARAMETER Experiment Name: At_10percent_PEG_P Parameter: Timepoint (day) Value: 20
  misc_feature: MA Experiment 20000527 PARAMETER Experiment Name: At_10percent_PEG_P Parameter: Tissue Value: Whole Plant
  misc_feature: MA Experiment 20000527 PARAMETER Experiment Name: At_10percent_PEG_P Parameter: Treatment Value: 10percent PEG vs. No Treatment
  misc_feature: MA Experiment ID: 20000573 Result: Down-regulated in Transcription
  misc_feature: MA Experiment 20000573 PARAMETER Experiment Name: At_100uM_ABA_Mutants__P Parameter: Organism Value: A. thaliana
  misc_feature: MA Experiment 20000573 PARAMETER Experiment Name: At_100uM_ABA_Mutants__P Parameter: Plant Line Value: CS22 vs. Ler wt
  misc_feature: MA Experiment 20000573 PARAMETER Experiment Name: At_100uM_ABA_Mutants__P Parameter: Timepoint (hr) Value: N/A
  misc_feature: MA Experiment 20000573 PARAMETER Experiment Name: At_100uM_ABA_Mutants__P Parameter: Tissue Value: Whole Plant
  misc_feature: MA Experiment 20000573 PARAMETER Experiment Name: At_100uM_ABA_Mutants__P Parameter: Treatment Value: None
  misc_feature: MA Experiment ID: 20000574 Result: Down-regulated in Transcription
  misc_feature: MA Experiment 20000574 PARAMETER Experiment Name: At_100uM_ABA_Mutants__P Parameter: Organism Value: A. thaliana
  misc_feature: MA Experiment 20000574 PARAMETER Experiment Name: At_100uM_ABA_Mutants__P Parameter: Plant Line Value: CS23 vs. Ler wt
  misc_feature: MA Experiment 20000574 PARAMETER Experiment Name: At_100uM_ABA_Mutants__P Parameter: Timepoint (hr) Value: N/A
  misc_feature: MA Experiment 20000574 PARAMETER Experiment Name: At_100uM_ABA_Mutants__P Parameter: Tissue Value: Whole Plant
  misc_feature: MA Experiment 20000574 PARAMETER Experiment Name: At_100uM_ABA_Mutants__P Parameter: Treatment Value: None
  misc_feature: MA Experiment ID: 20000709 Result: Down-regulated in Transcription
  misc_feature: MA Experiment 20000709 PARAMETER Experiment Name: At_15mM_NH4NO3_L-to-H_P Parameter: Age (hr) Value: 14
  misc_feature: MA Experiment 20000709 PARAMETER Experiment Name: At_15mM_NH4NO3_L-to-H_P Parameter: Organism Value: A. thaliana
  misc_feature: MA Experiment 20000709 PARAMETER Experiment Name: At_15mM_NH4NO3_L-to-H_P Parameter: Plant Line Value: WS
  misc_feature: MA Experiment 20000709 PARAMETER Experiment Name: At_15mM_NH4NO3_L-to-H_P Parameter: Timepoint (hr) Value: 4
  misc_feature: MA Experiment 20000709 PARAMETER Experiment Name: At_15mM_NH4NO3_L-to-H_P Parameter: Tissue Value: Aerial
  misc_feature: MA Experiment 20000709 PARAMETER Experiment Name: At_15mM_NH4NO3_L-to-H_P Parameter: Treatment Value: 15mM NH4NO3 vs. 30mM Mannitol
  misc_feature: MA Experiment ID: 20001451 Result: Down-regulated in Transcription
  misc_feature: MA Experiment 20001451 PARAMETER Experiment Name: At_Far-red-induction_P Parameter: Age (day) Value: 7
  misc_feature: MA Experiment 20001451 PARAMETER Experiment Name: At_Far-red-induction_P Parameter: Light Value: Far-red vs. White
  misc_feature: MA Experiment 20001451 PARAMETER Experiment Name: At_Far-red-induction_P Parameter: Organism Value: A. thaliana
  misc_feature: MA Experiment 20001451 PARAMETER Experiment Name: At_Far-red-induction_P Parameter: Plant Line Value: Columbia
  misc_feature: MA Experiment 20001451 PARAMETER Experiment Name: At_Far-red-induction_P Parameter: Timepoint (hr) Value: 24
  misc_feature: MA Experiment 20001451 PARAMETER Experiment Name: At_Far-red-induction_P Parameter: Tissue Value: Whole Plant
atgcctttactattcctctggtttttcctcacgagcactagtcttgtctctgcacttcaaactcttccatgcataaacacaacctactttatacctaattcgacttacgacacaaaccgtcgcgttattctctcattgcttccttctaatgtcacatcacactttggcttcttcaacggttcaataggtcaagctcctaacagagtatatgccgtaggcatgtgtcttccaggtactgaagaagagagttgcataggttgtctcttgtctgcttccaatacattattagaaacctgcctcaccgaagaaaatgctcttatctggatcgcaaacagaactatttgtatgatccgatactccgatacttcctttgttggttcgttcgagttagagccgcatcgtgaattcctcagtattcatggttacaaaacgaatgaaacagaattcaatacagtatggagtagattaactcaacgtatggtacaagaagcttcctcaagcacagatgcaacatggtctggtgctaagtactatacagctgatgtagccgccttgcctgattcgcagactctctatgcaatgatgcaatgcactcctgatttgtctccggctgagtgtaatctctgtttaacagaaagcgttgttaactatcagagttgttgccttggacgtcaaggcggctctatcgttaggctaagttgcgctttccgggcagagttatatccatttggtggagcttttactgttatgacagcaagacctttgtcacaacctccaccgtcattaatcaagaaaggtgaattctttgcaaaatttatgagtaattcacaagaacctcggaaagttttcaacggaaactattgctgcaattgttgttcccattatagtggtcgctatcatcttcttgctggtattacgactctacacttccaacaactcgattttaagacaattgaagttgcaactgaaaattttgcaaagactaacaagctaggtcaaggtggatttggagaagtttacaagggcacgttagttaatggaacagaagttgcagtgaagaggctatcgaaaacatccgaacaaggtgcacaagagttcaagaacgaggttgttcttgtcgccaaacttcagcataggaatcttgttaagcttcttgggtactgtctggaaccagaggagaaaatacttgtttacgagtttgtccccaacaagagcctagactacttcctttttgatcctacaaagcaagggcagttagactggacaaaacgatacaacattatcggaggaatcactcgaggaattctatatcttcatcaagattcacgactaacaatcatacaccgtgatctcaaagccagcaacattcttctagatgccgatatgatcccgaaaatcgctgattttggaatggcgaggatatctggaatagaccaaagtgtagctaacacaaaaaggatagctggaactttcggttacatgcctccagaatacgtgatccatggccagttctcgatgaaatctgatgtctatagcttcggtgttttgattcttgagattatatgtggcaagaagaatagaagcttttaccaagcagatactaaagctgaaaatttggtcacctatgtttggaggttgtggacaaacggatcaccattagagctcgtggatctaaccatatcagagaattgtcaaacagaagaagttataagatgcatccacatcgcactcctatgtgttcaagaagatcctaaagatcgtcccaacttgtcaacaatcatgatgatgctcactaacagttccctcattttatctgttcctcaaccacctggattctttgttccgcaaaacaaagaacgtgatagctttttgtcgagccaatttacaatgggatgtacttctcagactaaaaatgatgtaaccattacaaatctagatcctcgttga

SEQ ID NO: 69636 - protein, 648 aa, Arabidopsis thaliana
  peptide (1)..(648): Ceres Seq. ID no. 1821174
  misc_feature (325)..(603): Pfam Name: Protein kinase domain Pfam Description: Protein kinase domain
  misc_feature (305)..(648): Homolog of NCBI NO: 7488201 NR Description: probable serine/threonine-specific protein kinase
  misc_feature (305)..(648): Homolog of NCBI NO: 15233396 NR Description: serine/threonine kinase-like protein (fragment);
  misc_feature (5)..(263): Homolog of NCBI NO: 7488201 NR Description: probable serine/threonine-specific protein kinase
  misc_feature (5)..(263): Homolog of NCBI NO: 15233396 NR Description: serine/threonine kinase-like protein (fragment);
  misc_feature (4)..(262): Homolog of NCBI NO: 15233396 NR Description: serine/threonine kinase-like protein (fragment);
  misc_feature (305)..(645): Homolog of NCBI NO: 15233387 NR Description: serine/threonine kinase-like protein; protein id:
  misc_feature (3)..(267): Homolog of NCBI NO: 15233387 NR Description: serine/threonine kinase-like protein; protein id:
  misc_feature (312)..(648): Homolog of NCBI NO: 4008012 NR Description: receptor-like protein kinase [Arabidopsis
  misc_feature (3)..(260): Homolog of NCBI NO: 4008012 NR Description: receptor-like protein kinase [Arabidopsis
  misc_feature (305)..(619): Homolog of NCBI NO: 30686091 NR Description: serine/threonine kinase - like protein
MPLLFLWFFLTSTSLVSALQTLPCINTTYFIPNSTYDTNRRVILSLLPSNVTSHFGFFNGSIGQAPNRVYAVGMCLPGTEEESCIGCLLSASNTLLETCLTEENALIWIANRTICMIRYSDTSFVGSFELEPHREFLSIHGYKTNETEFNTVWSRLTQRMVQEASSSTDATWSGAKYYTADVAALPDSQTLYAMMQCTPDLSPAECNLCLTESVVNYQSCCLGRQGGSIVRLSCAFRAELYPFGGAFTVMTARPLSQPPPSLIKKGEFFAKFMSNSQEPRKVFNGNYCCNCCSHYSGRYHLLAGITTLHFQQLDFKTIEVATENFAKTNKLGQGGFGEVYKGTLVNGTEVAVKRLSKTSEQGAQEFKNEVVLVAKLQHRNLVKLLGYCLEPEEKILVYEFVPNKSLDYFLFDPTKQGQLDWTKRYNIIGGITRGILYLHQDSRLTIIHRDLKASNILLDADMIPKIADFGMARISGIDQSVANTKRIAGTFGYMPPEYVIHGQFSMKSDVYSFGVLILEIICGKKNRSFYQADTKAENLVTYVWRLWTNGSPLELVDLTISENCQTEEVIRCIHIALLCVQEDPKDRPNLSTIMMMLTNSSLILSVPQPPGFFVPQNKERDSFLSSQFTMGCTSQTKNDVTITNLDPR

SEQ ID NO: 69637 - protein, 575 aa, Arabidopsis thaliana
  peptide (1)..(575): Ceres Seq. ID no. 1821175
  misc_feature (252)..(530): Pfam Name: Protein kinase domain Pfam Description: Protein kinase domain
  misc_feature (232)..(575): Homolog of NCBI NO: 7488201 NR Description: probable serine/threonine-specific protein kinase
  misc_feature (232)..(575): Homolog of NCBI NO: 15233396 NR Description: serine/threonine kinase-like protein (fragment);
  misc_feature (1)..(190): Homolog of NCBI NO: 7488201 NR Description: probable serine/threonine-specific protein kinase
  misc_feature (1)..(190): Homolog of NCBI NO: 15233396 NR Description: serine/threonine kinase-like protein (fragment);
  misc_feature (1)..(189): Homolog of NCBI NO: 15233396 NR Description: serine/threonine kinase-like protein (fragment);
  misc_feature (232)..(572): Homolog of NCBI NO: 15233387 NR Description: serine/threonine kinase-like protein; protein id:
  misc_feature (1)..(194): Homolog of NCBI NO: 15233387 NR Description: serine/threonine kinase-like protein; protein id:
  misc_feature (239)..(575): Homolog of NCBI NO: 4008012 NR Description: receptor-like protein kinase [Arabidopsis
  misc_feature (1)..(187): Homolog of NCBI NO: 4008012 NR Description: receptor-like protein kinase [Arabidopsis
  misc_feature (232)..(546): Homolog of NCBI NO: 30686091 NR Description: serine/threonine kinase - like protein
MCLPGTEEESCIGCLLSASNTLLETCLTEENALIWIANRTICMIRYSDTSFVGSFELEPHREFLSIHGYKTNETEFNTVWSRLTQRMVQEASSSTDATWSGAKYYTADVAALPDSQTLYAMMQCTPDLSPAECNLCLTESVVNYQSCCLGRQGGSIVRLSCAFRAELYPFGGAFTVMTARPLSQPPPSLIKKGEFFAKFMSNSQEPRKVFNGNYCCNCCSHYSGRYHLLAGITTLHFQQLDFKTIEVATENFAKTNKLGQGGFGEVYKGTLVNGTEVAVKRLSKTSEQGAQEFKNEVVLVAKLQHRNLVKLLGYCLEPEEKILVYEFVPNKSLDYFLFDPTKQGQLDWTKRYNIIGGITRGILYLHQDSRLTIIHRDLKASNILLDADMIPKIADFGMARISGIDQSVANTKRIAGTFGYMPPEYVIHGQFSMKSDVYSFGVLILEIICGKKNRSFYQADTKAENLVTYVWRLWTNGSPLELVDLTISENCQTEEVIRCIHIALLCVQEDPKDRPNLSTIMMMLTNSSLILSVPQPPGFFVPQNKERDSFLSSQFTMGCTSQTKNDVTITNLDPR

SEQ ID NO: 69638 - protein, 533 aa, Arabidopsis thaliana
  peptide (1)..(533): Ceres Seq. ID no. 1821176
  misc_feature (210)..(488): Pfam Name: Protein kinase domain Pfam Description: Protein kinase domain
  misc_feature (190)..(533): Homolog of NCBI NO: 7488201 NR Description: probable serine/threonine-specific protein kinase
  misc_feature (190)..(533): Homolog of NCBI NO: 15233396 NR Description: serine/threonine kinase-like protein (fragment);
  misc_feature (1)..(148): Homolog of NCBI NO: 7488201 NR Description: probable serine/threonine-specific protein kinase
  misc_feature (1)..(148): Homolog of NCBI NO: 15233396 NR Description: serine/threonine kinase-like protein (fragment);
  misc_feature (1)..(147): Homolog of NCBI NO: 15233396 NR Description: serine/threonine kinase-like protein (fragment);
  misc_feature (190)..(530): Homolog of NCBI NO: 15233387 NR Description: serine/threonine kinase-like protein; protein id:
  misc_feature (1)..(152): Homolog of NCBI NO: 15233387 NR Description: serine/threonine kinase-like protein; protein id:
  misc_feature (197)..(533): Homolog of NCBI NO: 4008012 NR Description: receptor-like protein kinase [Arabidopsis
  misc_feature (1)..(145): Homolog of NCBI NO: 4008012 NR Description: receptor-like protein kinase [Arabidopsis
  misc_feature (190)..(504): Homolog of NCBI NO: 30686091 NR Description: serine/threonine kinase - like protein
MIRYSDTSFVGSFELEPHREFLSIHGYKTNETEFNTVWSRLTQRMVQEASSSTDATWSGAKYYTADVAALPDSQTLYAMMQCTPDLSPAECNLCLTESVVNYQSCCLGRQGGSIVRLSCAFRAELYPFGGAFTVMTARPLSQPPPSLIKKGEFFAKFMSNSQEPRKVFNGNYCCNCCSHYSGRYHLLAGITTLHFQQLDFKTIEVATENFAKTNKLGQGGFGEVYKGTLVNGTEVAVKRLSKTSEQGAQEFKNEVVLVAKLQHRNLVKLLGYCLEPEEKILVYEFVPNKSLDYFLFDPTKQGQLDWTKRYNIIGGITRGILYLHQDSRLTIIHRDLKASNILLDADMIPKIADFGMARISGIDQSVANTKRIAGTFGYMPPEYVIHGQFSMKSDVYSFGVLILEIICGKKNRSFYQADTKAENLVTYVWRLWTNGSPLELVDLTISENCQTEEVIRCIHIALLCVQEDPKDRPNLSTIMMMLTNSSLILSVPQPPGFFVPQNKERDSFLSSQFTMGCTSQTKNDVTITNLDPR

SEQ ID NO: 69639 - DNA, 3723 bp, Arabidopsis thaliana
  misc_feature (1)..(3723): Ceres Seq. ID no. 1821185
  misc_feature: MA Experiment ID: 20000314 Result: Down-regulated in Transcription
  misc_feature: MA Experiment 20000314 PARAMETER Experiment Name: At_14day_Shoots-Roots_Sub_P Parameter: Age (day) Value: 14
  misc_feature: MA Experiment 20000314 PARAMETER Experiment Name: At_14day_Shoots-Roots_Sub_P Parameter: Organism Value: A. thaliana
  misc_feature: MA Experiment 20000314 PARAMETER Experiment Name: At_14day_Shoots-Roots_Sub_P Parameter: Plant Line Value: WS
  misc_feature: MA Experiment 20000314 PARAMETER Experiment Name: At_14day_Shoots-Roots_Sub_P Parameter: Tissue Value: Roots vs. Whole Plant
  misc_feature: MA Experiment ID: 20000315 Result: Down-regulated in Transcription
  misc_feature: MA Experiment 20000315 PARAMETER Experiment Name: At_14day_Shoots-Roots_Sub_P Parameter: Age (day) Value: 14
  misc_feature: MA Experiment 20000315 PARAMETER Experiment Name: At_14day_Shoots-Roots_Sub_P Parameter: Organism Value: A. thaliana
  misc_feature: MA Experiment 20000315 PARAMETER Experiment Name: At_14day_Shoots-Roots_Sub_P Parameter: Plant Line Value: WS
  misc_feature: MA Experiment 20000315 PARAMETER Experiment Name: At_14day_Shoots-Roots_Sub_P Parameter: Tissue Value: Shoots vs. Whole Plant
  misc_feature: MA Experiment ID: 20000328 Result: Down-regulated in Transcription
  misc_feature: MA Experiment 20000328 PARAMETER Experiment Name: At_42deg_Heat_Sub_P Parameter: Age (day) Value: 14
  misc_feature: MA Experiment 20000328 PARAMETER Experiment Name: At_42deg_Heat_Sub_P Parameter: Organism Value: A. thaliana
  misc_feature: MA Experiment 20000328 PARAMETER Experiment Name: At_42deg_Heat_Sub_P Parameter: Plant Line Value: WS
  misc_feature: MA Experiment 20000328 PARAMETER Experiment Name: At_42deg_Heat_Sub_P Parameter: Temperature (deg C) Value: 42 vs. 22
  misc_feature: MA Experiment 20000328 PARAMETER Experiment Name: At_42deg_Heat_Sub_P Parameter: Timepoint (hr) Value: 6
  misc_feature: MA Experiment 20000328 PARAMETER Experiment Name: At_42deg_Heat_Sub_P Parameter: Tissue Value: Aerial
  misc_feature: MA Experiment ID: 20000347 Result: Up-regulated in Transcription
  misc_feature: MA Experiment 20000347 PARAMETER Experiment Name: At_2mM_SA_Sub_P Parameter: Age (day) Value: 14
  misc_feature: MA Experiment 20000347 PARAMETER Experiment Name: At_2mM_SA_Sub_P Parameter: Organism Value: A. thaliana
  misc_feature: MA Experiment 20000347 PARAMETER Experiment Name: At_2mM_SA_Sub_P Parameter: Plant Line Value: WS
  misc_feature: MA Experiment 20000347 PARAMETER Experiment Name: At_2mM_SA_Sub_P Parameter: Timepoint (hr) Value: 6
  misc_feature: MA Experiment 20000347 PARAMETER Experiment Name: At_2mM_SA_Sub_P Parameter: Tissue Value: Aerial
  misc_feature: MA Experiment 20000347 PARAMETER Experiment Name: At_2mM_SA_Sub_P Parameter: Treatment Value: 2mM SA vs. No Treatment
  misc_feature: MA Experiment ID: 20000355 Result: Down-regulated in Transcription
  misc_feature: MA Experiment 20000355 PARAMETER Experiment Name: At_Siliques_Sub_P Parameter: Age (day) Value: 21
  misc_feature: MA Experiment 20000355 PARAMETER Experiment Name: At_Siliques_Sub_P Parameter: Organism Value: A. thaliana
  misc_feature: MA Experiment 20000355 PARAMETER Experiment Name: At_Siliques_Sub_P Parameter: Plant Line Value: WS
  misc_feature: MA Experiment 20000355 PARAMETER Experiment Name: At_Siliques_Sub_P Parameter: Tissue Value: Less Than 5mm Siliques vs. Whole Plant
  misc_feature: MA Experiment ID: 20000440 Result: Down-regulated in Transcription
  misc_feature: MA Experiment 20000440 PARAMETER Experiment Name: At_Closed-Flower__Sub_P Parameter: Tissue Value: Closed Flower vs. Whole Plant
  misc_feature: Pfam Name: RVT_2 Pfam Description: Reverse transcriptase (RNA-dependent DNA polymerase)
atggtatctgatgcagatgcttccacatcttcatcttccattgatattatgccttctgctaatattcaaaatgatgtccctgaaccttctgttcacacatcgcataggagaacacgaaagcctgcttatcttcaagattactactgtcattcagtagcttctttaaccattcatgatatttcccagtttctctcttatgaaaaagtttctccactttaccattctttcttggtttgtattgccaaagctaaagaaccctcaacctacaatgaagcgaaagaatttcttgtgtggtgtggtgctatggatgatgaaattggtgcaatggagactactcacacttgggaaatctgtactctacctcccaataagaagcctattggttgcaaatgggtgtataagataaaatacaactcggatggcaccattgaacgttataaggcacggttggttgccaagggttacacacagcaggaaggtatcgattttattgagactttctctccagtctgcaaactcacatctgtcaagctcattcttgcgatctctgccatctataattttactcttcatcaactggacatttccaatgcgttccttaatggtgatttggatgaagagatctatatgaagcttcctcctggatatgctgctagacagggggactctctccctcccaatgctgtgtgttacctcaagaagtccatttatgggcttaaacaagcctccagacaatggtttttaaagttttctgttacactcattggttttggttttgtgcagtcccattctgaccatacctacttcttgaagatcactgctacacttttcttatgtgtcttagtgtatgttgacgacatcatcatttgcagtaacaatgatgcagctgttgatgagttgaagtcccagctgaaaagttgttttaaactcagggatcttggccctttgaaatactttcttggcttagaaattgctagatccgctgctggcattaacatttgtcaaagaaagtatgcattggatcttttggatgaaacaggtctcttgggttgtaagccgtctagtgttcctatggatcccagcgtcactttctctgctcattcaggtggtgactttgtggatgctaaagcttacagacgtctcattggtcgcctcatgtatcttcagattactcgtcttgacatcagctttgcagtcaacaagctcagtcaattctctgaagctcctcgccttgcacatcaacaggctgtcatgaagattctgcattacattaaaggcactgttggtcaaggtctgttttattcttctcaagctgaaatgcaacttcaagttttctctgatgcttcatttcagtcatgcaaggacactagacgctctacaaatggttattgtatgtttttgggaacttctctcatttcctggaaatccaagaagcagcaggtggtctccaagtcttctgctgaagctgagtatcgtgctctctcttttgctacagatgagatgatgtggttagctcaattcttcagggaactccagcttcctctctccaagcctacacttctcttctgtgacaacactgcagcaattcacatcgccaccaatgcagttttccacgagcgcaccaaacacatcgaaagtgactgccacagcgttcgtgagagatccgtttaccaagccactctatcctactcctttcaagcttatgatgagcaagatgggtttacagagtatctttctcccatcttgagggggactattatgtatatagtttcaatgtttggtttagctggtttagaggctctgatctgtttcattttccttttccttttctcattcctcactagcttcaaagcttctgctcaaaatcctttttacctaaatcatgattgtccaaataggacaacttactcaagtaacagcacttactccaccaatctcaaaacccttttgtcctcttttgcttcccgcaacgcctcttactccaccggattccaaaacatcagggcgggacaaacccccgacagggtcaccggacttttcctttgtcgcggagacctatccccggaagtttgcagtaactgcgttgccttctccgttaacgaatcgttaactcggtgtccaaatcagagagaagctgtgttctattacgaagagtgcatactcagatactctcacaagaattttctatcgacagttacatacgaaggagaacttatcatgaggaaccccaataatatttcttctattcaaaatcaaagagaccagtttatagatttggttcaatctaatatgaaccaagctgccaatgaagcagccaacagttctagaaaattctctacgataaagaccgaattgacctcactccagactttgtatgggcttgttcaatgcactcctgatctcgcaagacaagattgctttagctgtctgacaagttccatcaatagaatgatgccactttttagaattggagcaagacagttttggccaagttgtaattcaaggtacgagctttacgcgttctacaacgaaaccgccattggaacaccatcaccaccaccactgtttccggggtctacgcctccgttgacatccccttcaatacctgctttagttggttattgtttccttgcacagagaacaaagaagacttttgacacagcatctgcatcggaggtaggagatgatatggcaaccgcagactcactacagctcgactatagaacaatccaaactgcaacaaatgattttgcagagagtaataagattggtcgaggtggttttggtgaggtttacaagggtacattttcaaatgggaaagaagttgcggtgaagagattgtcgaaaaattcaagacaaggcgaagcggagttcaagaccgaggttgttgtagttgccaagcttcaacacagaaatttggttaggcttcttggattttcattacaaggagaggaaagaattttggtctacgagtatatgcctaacaaaagccttgattgcttactatttgaccctacaaagcaaactcagctggactggatgcagcgatacaatatcattggaggaattgctcgggggattctatatcttcatcaagattcacggctcacaatcatacaccgtgaccttaaagcaagtaacattctcctagatgcggatataaatccgaaaattgcagattttggaatggctaggatcttcggattggaccaaacccaggataacacaagccgaatagttggtacctacggttacatggctcccgagtatgcgatgcatggccaattctcaatgaaatctgatgtctatagcttcggagtgttagttcttgagattataagtggtaggaagaatagtagcttcgacgagtcagacggcgcacaagacttgctcacacatacttggaggctttggactaacagaacagcattagacctcgtggatccacttatagcaaataactgccagaatagcgaagtggttcgatgcatccatatcggtcttttatgtgttcaagaagatcctgcaaagcgtccgacaatatcaaccgttttcatgatgctcactagtaatactgtgaccttaccagtgcctcggcaaccagggtttttcattcaaagtagtcccgtaaaggacccgactgattcagatcagtctaccacgaccaagtctactccagcatctattgacgatgaattgatcactgatttatatccgcgctaa

SEQ ID NO: 69640 - protein, 1240 aa, Arabidopsis thaliana
  peptide (1)..(1240): Ceres Seq. ID no. 1821186
  misc_feature: Pfam Name: RVT_2 Pfam Description: Reverse transcriptase (RNA-dependent DNA polymerase)
  misc_feature (870)..(1240): Homolog of NCBI NO: 18416076 NR Description: serine threonine kinase - like protein; protein At4g23140.1, supported by cDNA: gi_13506746 [Arabidopsis
  misc_feature (598)..(873): Homolog of NCBI NO: 18416076 NR Description: serine threonine kinase - like protein; protein At4g23140.1, supported by cDNA: gi_13506746 [Arabidopsis
  misc_feature (870)..(1240): Homolog of NCBI NO: 30686066 NR Description: serine threonine kinase - like protein
  misc_feature (598)..(873): Homolog of NCBI NO: 30686066 NR Description: serine threonine kinase - like protein
  misc_feature (598)..(1240): Homolog of NCBI NO: 7488193 NR Description: probable serine/threonine-specific protein kinase
  misc_feature (598)..(1240): Homolog of NCBI NO: 30686073 NR Description: serine/threonine kinase - like protein thaliana] >gi|22136670|gb|AAM91654.1| putative serine/threonine
  misc_feature (871)..(1240): Homolog of NCBI NO: 30686087 NR Description: serine/threonine kinase -related protein
  misc_feature (604)..(866): Homolog of NCBI NO: 30686087 NR Description: serine/threonine kinase -related protein
  misc_feature (871)..(1240): Homolog of NCBI NO: 24417476 NR Description: unknown [Arabidopsis thaliana]
  misc_feature (604)..(866): Homolog of NCBI NO: 24417476 NR Description: unknown [Arabidopsis thaliana]
MVSDADASTSSSSIDIMPSANIQNDVPEPSVHTSHRRTRKPAYLQDYYCHSVASLTIHDISQFLSYEKVSPLYHSFLVCIAKAKEPSTYNEAKEFLVWCGAMDDEIGAMETTHTWEICTLPPNKKPIGCKWVYKIKYNSDGTIERYKARLVAKGYTQQEGIDFIETFSPVCKLTSVKLILAISAIYNFTLHQLDISNAFLNGDLDEEIYMKLPPGYAARQGDSLPPNAVCYLKKSIYGLKQASRQWFLKFSVTLIGFGFVQSHSDHTYFLKITATLFLCVLVYVDDIIICSNNDAAVDELKSQLKSCFKLRDLGPLKYFLGLEIARSAAGINICQRKYALDLLDETGLLGCKPSSVPMDPSVTFSAHSGGDFVDAKAYRRLIGRLMYLQITRLDISFAVNKLSQFSEAPRLAHQQAVMKILHYIKGTVGQGLFYSSQAEMQLQVFSDASFQSCKDTRRSTNGYCMFLGTSLISWKSKKQQVVSKSSAEAEYRALSFATDEMMWLAQFFRELQLPLSKPTLLFCDNTAAIHIATNAVFHERTKHIESDCHSVRERSVYQATLSYSFQAYDEQDGFTEYLSPILRGTIMYIVSMFGLAGLEALICFIFLFLFSFLTSFKASAQNPFYLNHDCPNRTTYSSNSTYSTNLKTLLSSFASRNASYSTGFQNIRAGQTPDRVTGLFLCRGDLSPEVCSNCVAFSVNESLTRCPNQREAVFYYEECILRYSHKNFLSTVTYEGELIMRNPNNISSIQNQRDQFIDLVQSNMNQAANEAANSSRKFSTIKTELTSLQTLYGLVQCTPDLARQDCFSCLTSSINRMMPLFRIGARQFWPSCNSRYELYAFYNETAIGTPSPPPLFPGSTPPLTSPSIPALVGYCFLAQRTKKTFDTASASEVGDDMATADSLQLDYRTIQTATNDFAESNKIGRGGFGEVYKGTFSNGKEVAVKRLSKNSRQGEAEFKTEVVVVAKLQHRNLVRLLGFSLQGEERILVYEYMPNKSLDCLLFDPTKQTQLDWMQRYNIIGGIARGILYLHQDSRLTIIHRDLKASNILLDADINPKIADFGMARIFGLDQTQDNTSRIVGTYGYMAPEYAMHGQFSMKSDVYSFGVLVLEIISGRKNSSFDESDGAQDLLTHTWRLWTNRTALDLVDPLIANNCQNSEVVRCIHIGLLCVQEDPAKRPTISTVFMMLTSNTVTLPVPRQPGFFIQSSPVKDPTDSDQSTTTKSTPASIDDELITDLYPR

SEQ ID NO: 69641 - protein, 1224 aa, Arabidopsis thaliana
  peptide (1)..(1224): Ceres Seq. ID no. 1821187
  misc_feature: Pfam Name: RVT_2 Pfam Description: Reverse transcriptase (RNA-dependent DNA polymerase)
  misc_feature (854)..(1224): Homolog of NCBI NO: 18416076 NR Description: serine threonine kinase - like protein; protein At4g23140.1, supported by cDNA: gi_13506746 [Arabidopsis
  misc_feature (582)..(857): Homolog of NCBI NO: 18416076 NR Description: serine threonine kinase - like protein; protein At4g23140.1, supported by cDNA: gi_13506746 [Arabidopsis
  misc_feature (854)..(1224): Homolog of NCBI NO: 30686066 NR Description: serine threonine kinase - like protein
  misc_feature (582)..(857): Homolog of NCBI NO: 30686066 NR Description: serine threonine kinase - like protein
  misc_feature (582)..(1224): Homolog of NCBI NO: 7488193 NR Description: probable serine/threonine-specific protein kinase
  misc_feature (582)..(1224): Homolog of NCBI NO: 30686073 NR Description: serine/threonine kinase - like protein thaliana] >gi|22136670|gb|AAM91654.1| putative serine/threonine
  misc_feature (855)..(1224): Homolog of NCBI NO: 30686087 NR Description: serine/threonine kinase -related protein
  misc_feature (588)..(850): Homolog of NCBI NO: 30686087 NR Description: serine/threonine kinase -related protein
  misc_feature (855)..(1224): Homolog of NCBI NO: 24417476 NR Description: unknown [Arabidopsis thaliana]
  misc_feature (588)..(850): Homolog of NCBI NO: 24417476 NR Description: unknown [Arabidopsis thaliana]
MPSANIQNDVPEPSVHTSHRRTRKPAYLQDYYCHSVASLTIHDISQFLSYEKVSPLYHSFLVCIAKAKEPSTYNEAKEFLVWCGAMDDEIGAMETTHTWEICTLPPNKKPIGCKWVYKIKYNSDGTIERYKARLVAKGYTQQEGIDFIETFSPVCKLTSVKLILAISAIYNFTLHQLDISNAFLNGDLDEEIYMKLPPGYAARQGDSLPPNAVCYLKKSIYGLKQASRQWFLKFSVTLIGFGFVQSHSDHTYFLKITATLFLCVLVYVDDIIICSNNDAAVDELKSQLKSCFKLRDLGPLKYFLGLEIARSAAGINICQRKYALDLLDETGLLGCKPSSVPMDPSVTFSAHSGGDFVDAKAYRRLIGRLMYLQITRLDISFAVNKLSQFSEAPRLAHQQAVMKILHYIKGTVGQGLFYSSQAEMQLQVFSDASFQSCKDTRRSTNGYCMFLGTSLISWKSKKQQVVSKSSAEAEYRALSFATDEMMWLAQFFRELQLPLSKPTLLFCDNTAAIHIATNAVFHERTKHIESDCHSVRERSVYQATLSYSFQAYDEQDGFTEYLSPILRGTIMYIVSMFGLAGLEALICFIFLFLFSFLTSFKASAQNPFYLNHDCPNRTTYSSNSTYSTNLKTLLSSFASRNASYSTGFQNIRAGQTPDRVTGLFLCRGDLSPEVCSNCVAFSVNESLTRCPNQREAVFYYEECILRYSHKNFLSTVTYEGELIMRNPNNISSIQNQRDQFIDLVQSNMNQAANEAANSSRKFSTIKTELTSLQTLYGLVQCTPDLARQDCFSCLTSSINRMMPLFRIGARQFWPSCNSRYELYAFYNETAIGTPSPPPLFPGSTPPLTSPSIPALVGYCFLAQRTKKTFDTASASEVGDDMATADSLQLDYRTIQTATNDFAESNKIGRGGFGEVYKGTFSNGKEVAVKRLSKNSRQGEAEFKTEVVVVAKLQHRNLVRLLGFSLQGEERILVYEYMPNKSLDCLLFDPTKQTQLDWMQRYNIIGGIARGILYLHQDSRLTIIHRDLKASNILLDADINPKIADFGMARIFGLDQTQDNTSRIVGTYGYMAPEYAMHGQFSMKSDVYSFGVLVLEIISGRKNSSFDESDGAQDLLTHTWRLWTNRTALDLVDPLIANNCQNSEVVRCIHIGLLCVQEDPAKRPTISTVFMMLTSNTVTLPVPRQPGFFIQSSPVKDPTDSDQSTTTKSTPASIDDELITDLYPR

SEQ ID NO: 69642 - protein, 1139 aa, Arabidopsis thaliana
  peptide (1)..(1139): Ceres Seq. ID no. 1821188
  misc_feature: Pfam Name: RVT_2 Pfam Description: Reverse transcriptase (RNA-dependent DNA polymerase)
  misc_feature (769)..(1139): Homolog of NCBI NO: 30686066 NR Description: serine threonine kinase - like protein
  misc_feature (497)..(772): Homolog of NCBI NO: 30686066 NR Description: serine threonine kinase - like protein
  misc_feature (497)..(1139): Homolog of NCBI NO: 7488193 NR Description: probable serine/threonine-specific protein kinase
  misc_feature (497)..(1139): Homolog of NCBI NO: 30686073 NR Description: serine/threonine kinase - like protein thaliana] >gi|22136670|gb|AAM91654.1| putative serine/threonine
  misc_feature (770)..(1139): Homolog of NCBI NO: 30686087 NR Description: serine/threonine kinase -related protein
  misc_feature (503)..(765): Homolog of NCBI NO: 30686087 NR Description: serine/threonine kinase -related protein
  misc_feature (770)..(1139): Homolog of NCBI NO: 24417476 NR Description: unknown [Arabidopsis thaliana]
  misc_feature (503)..(765): Homolog of NCBI NO: 24417476 NR Description: unknown [Arabidopsis thaliana]
  misc_feature (769)..(1139): Homolog of NCBI NO: 18416076 NR Description: serine threonine kinase - like protein; protein At4g23140.1, supported by cDNA: gi_13506746 [Arabidopsis
  misc_feature (497)..(772): Homolog of NCBI NO: 18416076 NR Description: serine threonine kinase - like protein; protein At4g23140.1, supported by cDNA: gi_13506746 [Arabidopsis
MDDEIGAMETTHTWEICTLPPNKKPIGCKWVYKIKYNSDGTIERYKARLVAKGYTQQEGIDFIETFSPVCKLTSVKLILAISAIYNFTLHQLDISNAFLNGDLDEEIYMKLPPGYAARQGDSLPPNAVCYLKKSIYGLKQASRQWFLKFSVTLIGFGFVQSHSDHTYFLKITATLFLCVLVYVDDIIICSNNDAAVDELKSQLKSCFKLRDLGPLKYFLGLEIARSAAGINICQRKYALDLLDETGLLGCKPSSVPMDPSVTFSAHSGGDFVDAKAYRRLIGRLMYLQITRLDISFAVNKLSQFSEAPRLAHQQAVMKILHYIKGTVGQGLFYSSQAEMQLQVFSDASFQSCKDTRRSTNGYCMFLGTSLISWKSKKQQVVSKSSAEAEYRALSFATDEMMWLAQFFRELQLPLSKPTLLFCDNTAAIHIATNAVFHERTKHIESDCHSVRERSVYQATLSYSFQAYDEQDGFTEYLSPILRGTIMYIVSMFGLAGLEALICFIFLFLFSFLTSFKASAQNPFYLNHDCPNRTTYSSNSTYSTNLKTLLSSFASRNASYSTGFQNIRAGQTPDRVTGLFLCRGDLSPEVCSNCVAFSVNESLTRCPNQREAVFYYEECILRYSHKNFLSTVTYEGELIMRNPNNISSIQNQRDQFIDLVQSNMNQAANEAANSSRKFSTIKTELTSLQTLYGLVQCTPDLARQDCFSCLTSSINRMMPLFRIGARQFWPSCNSRYELYAFYNETAIGTPSPPPLFPGSTPPLTSPSIPALVGYCFLAQRTKKTFDTASASEVGDDMATADSLQLDYRTIQTATNDFAESNKIGRGGFGEVYKGTFSNGKEVAVKRLSKNSRQGEAEFKTEVVVVAKLQHRNLVRLLGFSLQGEERILVYEYMPNKSLDCLLFDPTKQTQLDWMQRYNIIGGIARGILYLHQDSRLTIIHRDLKASNILLDADINPKIADFGMARIFGLDQTQDNTSRIVGTYGYMAPEYAMHGQFSMKSDVYSFGVLVLEIISGRKNSSFDESDGAQDLLTHTWRLWTNRTALDLVDPLIANNCQNSEVVRCIHIGLLCVQEDPAKRPTISTVFMMLTSNTVTLPVPRQPGFFIQSSPVKDPTDSDQSTTTKSTPASIDDELITDLYPR

SEQ ID NO: 69643 - DNA, 327 bp, Arabidopsis thaliana
  misc_feature (1)..(327): Ceres Seq. ID no. 1821237
  misc_feature: MA Experiment ID: 20000307 Result: Up-regulated in Transcription
  misc_feature: MA Experiment 20000307 PARAMETER Experiment Name: At_Germinating_Seeds_Sub_P Parameter: Age (hr) Value: 24 vs. 0
  misc_feature: MA Experiment 20000307 PARAMETER Experiment Name: At_Germinating_Seeds_Sub_P Parameter: Organism Value: A. thaliana
  misc_feature: MA Experiment 20000307 PARAMETER Experiment Name: At_Germinating_Seeds_Sub_P Parameter: Plant Line Value: WS
  misc_feature: MA Experiment 20000307 PARAMETER Experiment Name: At_Germinating_Seeds_Sub_P Parameter: Tissue Value: Germinating Seeds
  misc_feature: MA Experiment ID: 20000327 Result: Down-regulated in Transcription
  misc_feature: MA Experiment 20000327 PARAMETER Experiment Name: At_42deg_Heat_Sub_P Parameter: Age (day) Value: 14
  misc_feature: MA Experiment 20000327 PARAMETER Experiment Name: At_42deg_Heat_Sub_P Parameter: Organism Value: A. thaliana
  misc_feature: MA Experiment 20000327 PARAMETER Experiment Name: At_42deg_Heat_Sub_P Parameter: Plant Line Value: WS
  misc_feature: MA Experiment 20000327 PARAMETER Experiment Name: At_42deg_Heat_Sub_P Parameter: Temperature (deg C) Value: 42 vs. 22
  misc_feature: MA Experiment 20000327 PARAMETER Experiment Name: At_42deg_Heat_Sub_P Parameter: Timepoint (hr) Value: 1
  misc_feature: MA Experiment 20000327 PARAMETER Experiment Name: At_42deg_Heat_Sub_P Parameter: Tissue Value: Aerial
atgggcagcaacacatgtggtggatgcggagaaagggcagtcagtaatgaggcagaaaggagcattatccaagatattgttacagcagtgattgtgactcgaagagaagatatatatttgacaggttatgagattttgatgggtttgctttatgggttaggagctctggtttatgcaactaggatcccagagagatggatgccgggtaaattcgatatagcaggacatagccatcagttgtttcatgttctggtagttgctggtgcgttcacgcactatagagctgggctagtgtatcttaagtggagagatattgaaggatgttga

SEQ ID NO: 69644 - protein, 108 aa, Arabidopsis thaliana
  peptide (1)..(108): Ceres Seq. ID no. 1821238
  misc_feature (36)..(97): Pfam Name: Uncharacterised protein family (Hly-III / UPF0073) Pfam Description: Uncharacterised protein family (Hly-III /
  misc_feature (1)..(108): Homolog of NCBI NO: 15233780 NR Description: putative protein; protein id: At4g38290.1
  misc_feature (36)..(108): Homolog of NCBI NO: 15235657 NR Description: expressed protein; protein id: At4g37680.1, by cDNA: 262351., supported by cDNA: gi_13430521, supported by
  misc_feature (36)..(108): Homolog of NCBI NO: 15226736 NR Description: unknown protein; protein id: At2g40710.1
  misc_feature (36)..(97): Homolog of NCBI NO: 15233813 NR Description: putative protein; protein id: At4g38320.1
  misc_feature (42)..(93): Homolog of NCBI NO: 24649051 NR Description: CG5315-PB [Drosophila melanogaster]
  misc_feature (1)..(46): Homolog of NCBI NO: 15233814 NR Description: putative protein; protein id: At4g38330.1
  misc_feature (42)..(93): Homolog of NCBI NO: 24649047 NR Description: CG5315-PA [Drosophila melanogaster]
  misc_feature (43)..(108): Homolog of NCBI NO: 15241302 NR Description: putative protein; protein id: At5g20270.1, by cDNA: 24749., supported by cDNA: gi_15982833 [Arabidopsis >gi|15982834|gb|AAL09764.1| AT5g20270/F5O24_160 [Arabidopsis
  misc_feature (43)..(103): Homolog of NCBI NO: 18377749 NR Description: unknown protein [Arabidopsis thaliana]
  misc_feature (43)..(103): Homolog of NCBI NO: 30688829 NR Description: expressed protein [Arabidopsis thaliana]
MGSNTCGGCGERAVSNEAERSIIQDIVTAVIVTRREDIYLTGYEILMGLLYGLGALVYATRIPERWMPGKFDIAGHSHQLFHVLVVAGAFTHYRAGLVYLKWRDIEGC

SEQ ID NO: 69645 - protein, 62 aa, Arabidopsis thaliana
  peptide (1)..(62): Ceres Seq. ID no. 1821239
  misc_feature (1)..(51): Pfam Name: Uncharacterised protein family (Hly-III / UPF0073) Pfam Description: Uncharacterised protein family (Hly-III /
  misc_feature (1)..(62): Homolog of NCBI NO: 15233780 NR Description: putative protein; protein id: At4g38290.1
  misc_feature (1)..(62): Homolog of NCBI NO: 15235657 NR Description: expressed protein; protein id: At4g37680.1, by cDNA: 262351., supported by cDNA: gi_13430521, supported by
  misc_feature (1)..(62): Homolog of NCBI NO: 15226736 NR Description: unknown protein; protein id: At2g40710.1
  misc_feature (1)..(51): Homolog of NCBI NO: 15233813 NR Description: putative protein; protein id: At4g38320.1
  misc_feature (1)..(47): Homolog of NCBI NO: 24649051 NR Description: CG5315-PB [Drosophila melanogaster]
  misc_feature (1)..(47): Homolog of NCBI NO: 24649047 NR Description: CG5315-PA [Drosophila melanogaster]
  misc_feature (1)..(62): Homolog of NCBI NO: 15241302 NR Description: putative protein; protein id: At5g20270.1, by cDNA: 24749., supported by cDNA: gi_15982833 [Arabidopsis >gi|15982834|gb|AAL09764.1| AT5g20270/F5O24_160 [Arabidopsis
  misc_feature (1)..(57): Homolog of NCBI NO: 18377749 NR Description: unknown protein [Arabidopsis thaliana]
  misc_feature (1)..(57): Homolog of NCBI NO: 30688829 NR Description: expressed protein [Arabidopsis thaliana]
  misc_feature (1)..(57): Homolog of NCBI NO: 25407688 NR Description: hypothetical protein AT4g30850 [imported] - thaliana >gi|2980781|emb|CAA18208.1| putative protein thaliana] >gi|7269986|emb|CAB79803.1| putative protein
MGLLYGLGALVYATRIPERWMPGKFDIAGHSHQLFHVLVVAGAFTHYRAGLVYLKWRDIEGC

SEQ ID NO: 69646 - DNA, 1203 bp, Arabidopsis thaliana
  misc_feature (1)..(1203): Ceres Seq. ID no. 1821317
  misc_feature: MA Experiment ID: 20000227 Result: Up-regulated in Transcription
  misc_feature: MA Experiment 20000227 PARAMETER Experiment Name: At_Root-Tips-vs-Tops_P Parameter: Tissue Value: Root Tips vs. Root Tops
  misc_feature: MA Experiment ID: 20000264 Result: Up-regulated in Transcription
  misc_feature: MA Experiment 20000264 PARAMETER Experiment Name: At_Open_Flower_P Parameter: Age (day) Value: 21
  misc_feature: MA Experiment 20000264 PARAMETER Experiment Name: At_Open_Flower_P Parameter: Plant Line Value: WS
  misc_feature: MA Experiment 20000264 PARAMETER Experiment Name: At_Open_Flower_P Parameter: Tissue Value: Open Flower vs. Whole Plant
  misc_feature: MA Experiment ID: 20000265 Result: Up-regulated in Transcription
  misc_feature: MA Experiment 20000265 PARAMETER Experiment Name: At_Open_Flower_P Parameter: Age (day) Value: 21
  misc_feature: MA Experiment 20000265 PARAMETER Experiment Name: At_Open_Flower_P Parameter: Plant Line Value: WS
  misc_feature: MA Experiment 20000265 PARAMETER Experiment Name: At_Open_Flower_P Parameter: Tissue Value: Closed Flower vs. Whole Plant
atggaggtctcttaccaaaaccccattgaagcagcgactattccagtgcaaatagccgtcgctgagccagtcgctacacccaatcctcctccttgcctccacgagaacaaattcctcgtatctgtggaggtctgcttaaagccttcaagcacggctcgtctagaggatgtccagagagctgtagaacggtttgtatcacattttctcatctattataatggactggttttgattcctgcagacgacttgttcctagttgataatgtgcaaaggatatgcatttgtgatacagatggacaacctgctagctttaacgaatggattctacccgcaaaggagtttgatggcttatgggaaagcctaatatatgaatctggacttaagcaaaggttactacgttatgctgcgagtgcattgctgttcacccagaagggtgttaacccaaatctcgtttcatggaacaggattattcttttgcacggaccaccagggactggcaaaacatccctttgcaaagcgttggctcaaaagctttcaatccggtgcaactccagatatccacattgccaattgattgaagtcaatgctcactctctatttagtaaatggttctctgaaagtggcaagctggttgccaagcttttccaaaaaatccaagagatggtggaggaagatggaaatctggtatttgttttgatcgatgaagtagaaagtcttgctgctgctcgaaaagctgcattgtctggctcagaaccgtcagattctatccgggttgtgaatgcactactcacccaaatggacaaattgaaatcagcaccgaatgtgataatccttacaacatcaaacataactactgctattgatgttgctttcgtggatcgagctgacataaaagcttatgttggccctccaactcttcatgttcgttatgaaatattaaggtcttgtgttgaggaattaataagtaaagggatcatatcaagtttccagtcagtgaaaataaaactgagaatactcttaaaaaaagcaagtatgaattgggatcaacttcttgatgtacagggtttaagtgggagatcattgaggaagcttccgtttttagcgcacgcagcacttgcagatccatatagccatgatccaagtaatttcttgtgtacaatgatagaaacagctaagagagagaagtctgaacaacctgaatga

SEQ ID NO: 69647 - protein, 400 aa, Arabidopsis thaliana
  peptide (1)..(400): Ceres Seq. ID no. 1821318
  misc_feature (156)..(320): Pfam Name: ATPase family associated with various cellular Pfam Description: ATPase family associated with various cellular
  misc_feature (1)..(400): Homolog of NCBI NO: 7485976 NR Description: hypothetical protein F22K18.90 - Arabidopsis >gi|4220519|emb|CAA22992.1| putative protein binding protein thaliana] >gi|7269322|emb|CAB79381.1| putative protein binding
  misc_feature (94)..(330): Homolog of NCBI NO: 30686626 NR Description: protein -related binding protein [Arabidopsis >gi|23297331|gb|AAN12943.1| putative binding protein [Arabidopsis
  misc_feature (1)..(98): Homolog of NCBI NO: 30686626 NR Description: protein -related binding protein [Arabidopsis >gi|23297331|gb|AAN12943.1| putative binding protein [Arabidopsis
  misc_feature (326)..(400): Homolog of NCBI NO: 30686626 NR Description: protein -related binding protein [Arabidopsis >gi|23297331|gb|AAN12943.1| putative binding protein [Arabidopsis
  misc_feature (98)..(330): Homolog of NCBI NO: 38605777 NR Description: OSJNBa0044K18.20 [Oryza sativa (japonica
  misc_feature (18)..(98): Homolog of NCBI NO: 38605777 NR Description: OSJNBa0044K18.20 [Oryza sativa (japonica
  misc_feature (354)..(397): Homolog of NCBI NO: 38605777 NR Description: OSJNBa0044K18.20 [Oryza sativa (japonica
  misc_feature (105)..(370): Homolog of NCBI NO: 11321607 NR Description: thyroid hormone receptor interactor 13; thyroid interacting protein 13 [Homo sapiens] >gi|2232019|gb|AAB64095.1| E1 protein binding protein [Homo sapiens]
  misc_feature (31)..(98): Homolog of NCBI NO: 11321607 NR Description: thyroid hormone receptor interactor 13; thyroid interacting protein 13 [Homo sapiens] >gi|2232019|gb|AAB64095.1| E1 protein binding protein [Homo sapiens]
  misc_feature (105)..(370): Homolog of NCBI NO: 12845703 NR Description: unnamed protein product [Mus musculus]
MEVSYQNPIEAATIPVQIAVAEPVATPNPPPCLHENKFLVSVEVCLKPSSTARLEDVQRAVERFVSHFLIYYNGLVLIPADDLFLVDNVQRICICDTDGQPASFNEWILPAKEFDGLWESLIYESGLKQRLLRYAASALLFTQKGVNPNLVSWNRIILLHGPPGTGKTSLCKALAQKLSIRCNSRYPHCQLIEVNAHSLFSKWFSESGKLVAKLFQKIQEMVEEDGNLVFVLIDEVESLAAARKAALSGSEPSDSIRVVNALLTQMDKLKSAPNVIILTTSNITTAIDVAFVDRADIKAYVGPPTLHVRYEILRSCVEELISKGIISSFQSVKIKLRILLKKASMNWDQLLDVQGLSGRSLRKLPFLAHAALADPYSHDPSNFLCTMIETAKREKSEQPE

SEQ ID NO: 69648 - DNA, 2487 bp, Arabidopsis thaliana
  misc_feature (1)..(2487): Ceres Seq. ID no. 1821391
  misc_feature: MA Experiment ID: 20001247 Result: Up-regulated in Transcription
  misc_feature: MA Experiment 20001247 PARAMETER Experiment Name: At_Far-red-induction_P Parameter: Age (day) Value: 7
  misc_feature: MA Experiment 20001247 PARAMETER Experiment Name: At_Far-red-induction_P Parameter: Light Value: Far-red vs. White
  misc_feature: MA Experiment 20001247 PARAMETER Experiment Name: At_Far-red-induction_P Parameter: Organism Value: A. thaliana
  misc_feature: MA Experiment 20001247 PARAMETER Experiment Name: At_Far-red-induction_P Parameter: Plant Line Value: Columbia
  misc_feature: MA Experiment 20001247 PARAMETER Experiment Name: At_Far-red-induction_P Parameter: Timepoint (hr) Value: 1
  misc_feature: MA Experiment 20001247 PARAMETER Experiment Name: At_Far-red-induction_P Parameter: Tissue Value: Whole Plant
atgggttgtacaagttctaagcttgacgatcttccggcggttgctctttgccgtgaacgctgtgctttcttagaagctgctattcatcaacgttacgctttagctgaatcacacgtggcttacactcattcgcttcgagaaatcggtcactctctccatcttttcatcaatcaccaccaccgtttcgtcgcttccggcggcgctaacgtcggtgattctcctcgacttaatcttcctcctcagagaaaaggtgaccttgacgacgaagcaacaaattccccaaaaaaacaaaagcttgcttcttctcaccacaaccacaaccacgctcactcgggttccggttctgattcgggtcatctcgaattcgattcagattccgacgaagatgaagaagacgacgacgacttggatttggattcgttgcatcaccactctcctccccaccaccatctcggcaatttccctattcccgaatcagcaccaatgggcggatacatggaacaacaaccgggttatataaacccgtacccgaatccagatatgatggggcatccttactctggaggaggaagttatatgcacatgaattacatgaagaacaaatccatgcctccttcagttgtctatgagcaaagaccaactagtcctcaacgagtctacataggcgaatcatcatcttcatatccatatcctcctcaaaattcatattttggatactcaaatccagtacccggacccggaccaggatactacggttcttcttctgcttctacaactgctgcagcaacaaaaccgccaccacctccaccgtcgccgcctaggtctaacggttgggattttttgaatccctttgatacttattatcctccgtatactccgagtcgagattcgagagagttaagagaagaagaaggtataccggatttagaagacgatgattcacattacgaagttgttaaagaagtttacggcaaaccaaaattcgccgccggtggtggtcaccaaccaaatcccgccgccgtacacatgatgagggaagagtccccgtctccgccgcttgataaatccggtgctagtactagcggtggaggtgatgtcggagatgcatctgcgtatcagtctagaccaagtgtgtcggtggagaaagaagggatggagtatgaagttcacgttgttgagaagaaggttgttgaagatgaggaacggcggagtaatgccacggcgacacgtggtggtggtggaggaggagggccacgtgcggtgcctgaagttgcgaaagagattgagaatcaattcgtgaaagctgcagagtcaggaagtgagattgctaagttacttgaagttgggaagcatccttatggtcgtaaacatggaacttcttcgtctgctgctgctgctgttgtgccacctacttatgcagatattgaagaagagcttgcttcgaggtcgaggaatctttcttcgacgttgcacaagctccatctttgggagaagaagctttatcatgaagtcaaggccgaggagaaactgcgtctagctcacgagaaaaagcttaggaagctaaagcgtttggatcaaagaggtgccgaggctatcaaagtagataaaacgcggaaattagtgagagatatgtccacaaaaatacggattgcgattcaggttgtcgacaaaatatccgtgacgattaataagataagagacgaagacctgtggccgcaactgaatgcattgattcaagggcttacaagaatgtggaaaacaatgcttgaatgtcatcaaagtcaatgtcaagctattagggaagcacaaggtttaggcccgataagagcaagcaagaaactaggcgatgaacatctagaagcgacgagtttgcttggacatgaacttattaattggatattgggattctctagctgggttagtgcgcagaagggttatgtaaaagagttgaataaatggctcatgaaatgtcttctgtatgaacctgaggaaacacctgatgggatagttcccttttcacctggtaggattggggctccacctatctttgtcatctgtaaccaatggtctcaagctctggataggatatctgagaaggaagttattgaggcaatgcgtagtttcactacaagtgtgcttcagctttgggaacaagatcggttagatacgatgatgacggggcatggtgattcagagaagaaagtcaggaacatggacagagaagaacagaggatacagagagagattcaagcattggaaaagaaaatgattcttgtggcaccgggtgatggtaacagtctttcgatatccggcaacgttgtttaccaaagcgatactagcagcgatagtttacaaggtagtttgcaacggatttttgaagctatggagagattcactgctgaatcgatgagagcttatgaggatctcttagagcgcaccaatgaagaaactgcaccacgggaacttgaggaagaagaggaggagtaa

SEQ ID NO: 69649 - protein, 828 aa, Arabidopsis thaliana
  peptide (1)..(828): Ceres Seq. ID no. 1821392
  misc_feature (400)..(716): Pfam Name: Protein of unknown function (DUF632) Pfam Description: Protein of unknown function (DUF632)
  misc_feature (348)..(826): Homolog of NCBI NO: 25411780 NR Description: hypothetical protein At2g17100 [imported] -
  misc_feature (1)..(179): Homolog of NCBI NO: 25411780 NR Description: hypothetical protein At2g17100 [imported] -
  misc_feature (191)..(248): Homolog of NCBI NO: 25411780 NR Description: hypothetical protein At2g17100 [imported] -
  misc_feature (445)..(826): Homolog of NCBI NO: 18398315 NR Description: expressed protein; protein id: At2g17110.1, by cDNA: gi_15724285 [Arabidopsis thaliana] AT4g35240/F23E12_200 [Arabidopsis thaliana]
  misc_feature (1)..(287): Homolog of NCBI NO: 15219083 NR Description: putative bzip-like transcription factor; protein At1g21740.1 [Arabidopsis thaliana] >gi|25518309|pir||A86351
  misc_feature (474)..(762): Homolog of NCBI NO: 15219083 NR Description: putative bzip-like transcription factor; protein At1g21740.1 [Arabidopsis thaliana] >gi|25518309|pir||A86351
  misc_feature (1)..(327): Homolog of NCBI NO: 15223973 NR Description: unknown protein; protein id: At1g77500.1
  misc_feature (485)..(807): Homolog of NCBI NO: 15223973 NR Description: unknown protein; protein id: At1g77500.1
  misc_feature (505)..(814): Homolog of NCBI NO: 38345928 NR Description: OSJNBb0078D11.3 [Oryza sativa (japonica
  misc_feature (157)..(361): Homolog of NCBI NO: 38345928 NR Description: OSJNBb0078D11.3 [Oryza sativa (japonica
MGCTSSKLDDLPAVALCRERCAFLEAAIHQRYALAESHVAYTHSLREIGHSLHLFINHHHRFVASGGANVGDSPRLNLPPQRKGDLDDEATNSPKKQKLASSHHNHNHAHSGSGSDSGHLEFDSDSDEDEEDDDDLDLDSLHHHSPPHHHLGNFPIPESAPMGGYMEQQPGYINPYPNPDMMGHPYSGGGSYMHMNYMKNKSMPPSVVYEQRPTSPQRVYIGESSSSYPYPPQNSYFGYSNPVPGPGPGYYGSSSASTTAAATKPPPPPPSPPRSNGWDFLNPFDTYYPPYTPSRDSRELREEEGIPDLEDDDSHYEVVKEVYGKPKFAAGGGHQPNPAAVHMMREESPSPPLDKSGASTSGGGDVGDASAYQSRPSVSVEKEGMEYEVHVVEKKVVEDEERRSNATATRGGGGGGGPRAVPEVAKEIENQFVKAAESGSEIAKLLEVGKHPYGRKHGTSSSAAAAVVPPTYADIEEELASRSRNLSSTLHKLHLWEKKLYHEVKAEEKLRLAHEKKLRKLKRLDQRGAEAIKVDKTRKLVRDMSTKIRIAIQVVDKISVTINKIRDEDLWPQLNALIQGLTRMWKTMLECHQSQCQAIREAQGLGPIRASKKLGDEHLEATSLLGHELINWILGFSSWVSAQKGYVKELNKWLMKCLLYEPEETPDGIVPFSPGRIGAPPIFVICNQWSQALDRISEKEVIEAMRSFTTSVLQLWEQDRLDTMMTGHGDSEKKVRNMDREEQRIQREIQALEKKMILVAPGDGNSLSISGNVVYQSDTSSDSLQGSLQRIFEAMERFTAESMRAYEDLLERTNEETAPRELEEEEEE

SEQ ID NO: 69650 - protein, 667 aa, Arabidopsis thaliana
  peptide (1)..(667): Ceres Seq. ID no. 1821393
  misc_feature (239)..(555): Pfam Name: Protein of unknown function (DUF632) Pfam Description: Protein of unknown function (DUF632)
  misc_feature (187)..(665): Homolog of NCBI NO: 25411780 NR Description: hypothetical protein At2g17100 [imported] -
  misc_feature (1)..(18): Homolog of NCBI NO: 25411780 NR Description: hypothetical protein At2g17100 [imported] -
  misc_feature (30)..(87): Homolog of NCBI NO: 25411780 NR Description: hypothetical protein At2g17100 [imported] -
  misc_feature (284)..(665): Homolog of NCBI NO: 18398315 NR Description: expressed protein; protein id: At2g17110.1, by cDNA: gi_15724285 [Arabidopsis thaliana] AT4g35240/F23E12_200 [Arabidopsis thaliana]
  misc_feature (1)..(126): Homolog of NCBI NO: 15219083 NR Description: putative bzip-like transcription factor; protein At1g21740.1 [Arabidopsis thaliana] >gi|25518309|pir||A86351
  misc_feature (313)..(601): Homolog of NCBI NO: 15219083 NR Description: putative bzip-like transcription factor; protein At1g21740.1 [Arabidopsis thaliana] >gi|25518309|pir||A86351
  misc_feature (1)..(166): Homolog of NCBI NO: 15223973 NR Description: unknown protein; protein id: At1g77500.1
  misc_feature (324)..(646): Homolog of NCBI NO: 15223973 NR Description: unknown protein; protein id: At1g77500.1
  misc_feature (344)..(653): Homolog of NCBI NO: 38345928 NR Description: OSJNBb0078D11.3 [Oryza sativa (japonica
  misc_feature (1)..(200): Homolog of NCBI NO: 38345928 NR Description: OSJNBb0078D11.3 [Oryza sativa (japonica
MGGYMEQQPGYINPYPNPDMMGHPYSGGGSYMHMNYMKNKSMPPSVVYEQRPTSPQRVYIGESSSSYPYPPQNSYFGYSNPVPGPGPGYYGSSSASTTAAATKPPPPPPSPPRSNGWDFLNPFDTYYPPYTPSRDSRELREEEGIPDLEDDDSHYEVVKEVYGKPKFAAGGGHQPNPAAVHMMREESPSPPLDKSGASTSGGGDVGDASAYQSRPSVSVEKEGMEYEVHVVEKKVVEDEERRSNATATRGGGGGGGPRAVPEVAKEIENQFVKAAESGSEIAKLLEVGKHPYGRKHGTSSSAAAAVVPPTYADIEEELASRSRNLSSTLHKLHLWEKKLYHEVKAEEKLRLAHEKKLRKLKRLDQRGAEAIKVDKTRKLVRDMSTKIRIAIQVVDKISVTINKIRDEDLWPQLNALIQGLTRMWKTMLECHQSQCQAIREAQGLGPIRASKKLGDEHLEATSLLGHELINWILGFSSWVSAQKGYVKELNKWLMKCLLYEPEETPDGIVPFSPGRIGAPPIFVICNQWSQALDRISEKEVIEAMRSFTTSVLQLWEQDRLDTMMTGHGDSEKKVRNMDREEQRIQREIQALEKKMILVAPGDGNSLSISGNVVYQSDTSSDSLQGSLQRIFEAMERFTAESMRAYEDLLERTNEETAPRELEEEEEE

SEQ ID NO: 69651 - protein, 663 aa, Arabidopsis thaliana
  peptide (1)..(663): Ceres Seq. ID no. 1821394
  misc_feature (235)..(551): Pfam Name: Protein of unknown function (DUF632) Pfam Description: Protein of unknown function (DUF632)
  misc_feature (183)..(661): Homolog of NCBI NO: 25411780 NR Description: hypothetical protein At2g17100 [imported] -
  misc_feature (1)..(14): Homolog of NCBI NO: 25411780 NR Description: hypothetical protein At2g17100 [imported] -
  misc_feature (26)..(83): Homolog of NCBI NO: 25411780 NR Description: hypothetical protein At2g17100 [imported] -
  misc_feature (280)..(661): Homolog of NCBI NO: 18398315 NR Description: expressed protein; protein id: At2g17110.1, by cDNA: gi_15724285 [Arabidopsis thaliana] AT4g35240/F23E12_200 [Arabidopsis thaliana]
  misc_feature (1)..(122): Homolog of NCBI NO: 15219083 NR Description: putative bzip-like transcription factor; protein At1g21740.1 [Arabidopsis thaliana] >gi|25518309|pir||A86351
  misc_feature (309)..(597): Homolog of NCBI NO: 15219083 NR Description: putative bzip-like transcription factor; protein At1g21740.1 [Arabidopsis thaliana] >gi|25518309|pir||A86351
  misc_feature (1)..(162): Homolog of NCBI NO: 15223973 NR Description: unknown protein; protein id: At1g77500.1
  misc_feature (320)..(642): Homolog of NCBI NO: 15223973 NR Description: unknown protein; protein id: At1g77500.1
  misc_feature (340)..(649): Homolog of NCBI NO: 38345928 NR Description: OSJNBb0078D11.3 [Oryza sativa (japonica
  misc_feature (1)..(196): Homolog of NCBI NO: 38345928 NR Description: OSJNBb0078D11.3 [Oryza sativa (japonica
MEQQPGYINPYPNPDMMGHPYSGGGSYMHMNYMKNKSMPPSVVYEQRPTSPQRVYIGESSSSYPYPPQNSYFGYSNPVPGPGPGYYGSSSASTTAAATKPPPPPPSPPRSNGWDFLNPFDTYYPPYTPSRDSRELREEEGIPDLEDDDSHYEVVKEVYGKPKFAAGGGHQPNPAAVHMMREESPSPPLDKSGASTSGGGDVGDASAYQSRPSVSVEKEGMEYEVHVVEKKVVEDEERRSNATATRGGGGGGGPRAVPEVAKEIENQFVKAAESGSEIAKLLEVGKHPYGRKHGTSSSAAAAVVPPTYADIEEELASRSRNLSSTLHKLHLWEKKLYHEVKAEEKLRLAHEKKLRKLKRLDQRGAEAIKVDKTRKLVRDMSTKIRIAIQVVDKISVTINKIRDEDLWPQLNALIQGLTRMWKTMLECHQSQCQAIREAQGLGPIRASKKLGDEHLEATSLLGHELINWILGFSSWVSAQKGYVKELNKWLMKCLLYEPEETPDGIVPFSPGRIGAPPIFVICNQWSQALDRISEKEVIEAMRSFTTSVLQLWEQDRLDTMMTGHGDSEKKVRNMDREEQRIQREIQALEKKMILVAPGDGNSLSISGNVVYQSDTSSDSLQGSLQRIFEAMERFTAESMRAYEDLLERTNEETAPRELEEEEEE

SEQ ID NO: 69652 - DNA, 3096 bp, Arabidopsis thaliana
  misc_feature (1)..(3096): Ceres Seq. ID no. 1821395
  misc_feature: MA Experiment ID: 20000327 Result: Down-regulated in Transcription
  misc_feature: MA Experiment 20000327 PARAMETER Experiment Name: At_42deg_Heat_Sub_P Parameter: Age (day) Value: 14
  misc_feature: MA Experiment 20000327 PARAMETER Experiment Name: At_42deg_Heat_Sub_P Parameter: Organism Value: A. thaliana
  misc_feature: MA Experiment 20000327 PARAMETER Experiment Name: At_42deg_Heat_Sub_P Parameter: Plant Line Value: WS
  misc_feature: MA Experiment 20000327 PARAMETER Experiment Name: At_42deg_Heat_Sub_P Parameter: Temperature (deg C) Value: 42 vs. 22
  misc_feature: MA Experiment 20000327 PARAMETER Experiment Name: At_42deg_Heat_Sub_P Parameter: Timepoint (hr) Value: 1
  misc_feature: MA Experiment 20000327 PARAMETER Experiment Name: At_42deg_Heat_Sub_P Parameter: Tissue Value: Aerial
  misc_feature: MA Experiment ID: 20000328 Result: Down-regulated in Transcription
  misc_feature: MA Experiment 20000328 PARAMETER Experiment Name: At_42deg_Heat_Sub_P Parameter: Age (day) Value: 14
  misc_feature: MA Experiment 20000328 PARAMETER Experiment Name: At_42deg_Heat_Sub_P Parameter: Organism Value: A. thaliana
  misc_feature: MA Experiment 20000328 PARAMETER Experiment Name: At_42deg_Heat_Sub_P Parameter: Plant Line Value: WS
  misc_feature: MA Experiment 20000328 PARAMETER Experiment Name: At_42deg_Heat_Sub_P Parameter: Temperature (deg C) Value: 42 vs. 22
  misc_feature: MA Experiment 20000328 PARAMETER Experiment Name: At_42deg_Heat_Sub_P Parameter: Timepoint (hr) Value: 6
  misc_feature: MA Experiment 20000328 PARAMETER Experiment Name: At_42deg_Heat_Sub_P Parameter: Tissue Value: Aerial
  misc_feature: MA Experiment ID: 20000634 Result: Down-regulated in Transcription
  misc_feature: MA Experiment 20000634 PARAMETER Experiment Name: At_10percent_PEG_Sub_P Parameter: Age (day) Value: 12
  misc_feature: MA Experiment 20000634 PARAMETER Experiment Name: At_10percent_PEG_Sub_P Parameter: Organism Value: A. thaliana
  misc_feature: MA Experiment 20000634 PARAMETER Experiment Name: At_10percent_PEG_Sub_P Parameter: Plant Line Value: WS
  misc_feature: MA Experiment 20000634 PARAMETER Experiment Name: At_10percent_PEG_Sub_P Parameter: Timepoint (day) Value: 12
  misc_feature: MA Experiment 20000634 PARAMETER Experiment Name: At_10percent_PEG_Sub_P Parameter: Tissue Value: Whole Plant
  misc_feature: MA Experiment 20000634 PARAMETER Experiment Name: At_10percent_PEG_Sub_P Parameter: Treatment Value: 10% PEG vs. No Treatment
atggaaggtggtcgtggtggtggagatggcaatttcttaccaaactctaactttggtgtattctctgactccgctatggatatggatttcatggatgaactcttgtttgatggatgttggcttgagacaactgatggtaagagcttgaagcagaccatgggacaacaagtatccgattctactaccatgaatgacaacaacaacaactcgtacctttacggttatcaatatgctgagaacctttcacaagatcatatctccaacgaagaaacagggagaaagtttcctccaataccaccgggctttctcaagatcgaggatctctccaatcaagtaccttttgaccagtctgcagttatgagttctgcacaagcagagaagtttctccttgaagaatctgagggaggaagaagatattggattgctccaagaacaagccaaggtccttcttcatcagtgaaagagagattagtacaagctatagagggtcttaacgaggaggtgcaagataaagacttcctcatacagatatggctaccaattcaacaagaaggcaagaactttctcacaacttcggagcagccacacttcttcaacccgaaatactcgagtcttaaaagatatagagatgtttcagtggcttataatttcctggctgatgaggattctaaagagtctgttggtctccccggtcgtgtttttcttaagaaactacctgagtggacacctgatgtgcggttctttagaagcgaagagtatccgcggatcaaagaagcagagcaatgtgatgttcgtggatcattagcccttcctgtgtttgaaagaggtagtggaacttgtttgggtgttgttgagattgttacaacaactcagaagatgaattacaggccagagcttgataatatctgtaaagctctcgagtctgttaatctaaggagttcaagaagcttgaatcccccaagcagagaggtgtgtaaaaatggtctcctaaatcaaacccttacttcatcaatacatagaaacaatgaattttggttgctaaatgtcatatgccctttttgtttcagtttctgcagagtatatgacctgcctctggctttaacgtgggcaccgtgtgctcggcaaggcaaagttggatcccgccattctgatgagaacttctctgagtgtgtttcaactgttgatgatgcttgcattgtccctgaccatcagagtcgtcattttctagaggcatgttctgaacaccatctgcttcaaggggaaggcattgtaggaaaagcattcaacgcaaccaaactgtttttcgtgcccgaagtaaccacttttagcaagaccaactaccctcttgcacaccatgctaagatctctggtctacatgctgctttagcagtcccattgaaaaacaaattcaatagttcggttgagtttgtgttggagtttttctttccaaaagcttgccttgacaccgaagcacaacaagatatgctcaagtctctgtctgcgacccttcagcaggatttcaggagcttaaatcttttcattgataaagagcttgagctagaagttgtatttcccgttagagaggaagttgtttttgcagagaacccacttatcaacgcaggaaccggagaggatatgaaaccattgcctttggaagaaatttctcaggaagattcttcatggatctcacacatgataaaggcaaatgagaaaggtaaaggcgtgtcactttcttgggagtaccaaaaagaagagccaaaagaagagtttatgcttacatctggatgggataacaatcagattggatcaggccacaataactttctttcagaagctgagcagtttcaaaaggtgacaaattcaggactcagaatcgacatggatccaagttttgaatcagcttcctttggtgttgggcagacattactaggcagtagaagaccaggtgagaagagaagaacaaaaacagaaaagacaattggtttagaagttcttcgacaatactttgcaggaagcctcaaagatgcagccaagagcattggtgaaagtgatgattcattcacgcagtttcattttcatgttgcagtttgtccaactaccttgaaaagaatatgcagacaacacgggataacacgatggccttcccggaagatcaagaaagtggggcattcattaaagaaactccaacttgttatagactctgttcaaggtgttcaaggttctattcaacttgattcattctatacaagtttcccagaattaagctccccacatatgtctggtactggcacttccttcaagaatccaaatgctcaaacggagaacggtgtttcagcacagggaactgctgcagctccaaagtcaccaccatcatcttcttgtagccacagctctggttcaagcacctgttgttcaactggagctaatcaaagtaccaatactgggactacctcaaatactgtaaccactctgatggctgaaaatgctagcgcgatcttgaagagagctcgtagcgaagtgagacttcataccatgaatcaggatgaaacaaagtccctctctagaaccctgagccacaaaacattcagtgagcatcctcttttcgaaaatccacctcggttaccggagaatagtagcaggaagttgaaagctggaggggcctcaaaagtgaaagccacatttggtgaagccaaacatgagattgctaggcgttttaacatagataatattgcaccctttgatcttaagtacctggatgatgacaaggaatgggttcttctgacatgtgaagcggatctcgaggaatgtatcgacatttatagatcatcacagagccgcacgatcaagataagtgttcatgaagcttctcaagtcaagctgggaggaatatgtgttcaagagagagaaccacctagtggagtgatcttccaagttcctaaccagagtatctctgttaaatcctcaaatcagtatttgttaaagaaacaagtaagcctgcagacaaaaggttctcgttttggtttgtttttgtttctttctgattcagtgagtgacacaaaggaagatattgatcctgaacctatcattgccacctaa

SEQ ID NO: 69653 - protein, 1031 aa, Arabidopsis thaliana
  peptide (1)..(1031): Ceres Seq. ID no. 1821396
  misc_feature (867)..(955): Pfam Name: PB1 domain Pfam Description: PB1 domain
  misc_feature (124)..(555): Homolog of NCBI NO: 30679885 NR Description: RWP-RK domain containing protein [Arabidopsis >gi|24030277|gb|AAN41311.1| unknown protein [Arabidopsis
  misc_feature (573)..(962): Homolog of NCBI NO: 30679885 NR Description: RWP-RK domain containing protein [Arabidopsis >gi|24030277|gb|AAN41311.1| unknown protein [Arabidopsis
  misc_feature (2)..(96): Homolog of NCBI NO: 30679885 NR Description: RWP-RK domain containing protein [Arabidopsis >gi|24030277|gb|AAN41311.1| unknown protein [Arabidopsis
  misc_feature (353)..(681): Homolog of NCBI NO: 25367427 NR Description: hypothetical protein At2g17150 [imported] -
  misc_feature (124)..(307): Homolog of NCBI NO: 25367427 NR Description: hypothetical protein At2g17150 [imported] -
  misc_feature (2)..(96): Homolog of NCBI NO: 25367427 NR Description: hypothetical protein At2g17150 [imported] -
  misc_feature (573)..(962): Homolog of NCBI NO: 25367427 NR Description: hypothetical protein At2g17150 [imported] -
  misc_feature (126)..(560): Homolog of NCBI NO: 15217991 NR Description: nodule inception protein, putative; protein id: supported by cDNA: gi_20259432 [Arabidopsis thaliana]
  misc_feature (650)..(956): Homolog of NCBI NO: 15217991 NR Description: nodule inception protein, putative; protein id: supported by cDNA: gi_20259432 [Arabidopsis thaliana]
  misc_feature (26)..(46): Homolog of NCBI NO: 15217991 NR Description: nodule inception protein, putative; protein id: supported by cDNA: gi_20259432 [Arabidopsis thaliana]
MEGGRGGGDGNFLPNSNFGVFSDSAMDMDFMDELLFDGCWLETTDGKSLKQTMGQQVSDSTTMNDNNNNSYLYGYQYAENLSQDHISNEETGRKFPPIPPGFLKIEDLSNQVPFDQSAVMSSAQAEKFLLEESEGGRRYWIAPRTSQGPSSSVKERLVQAIEGLNEEVQDKDFLIQIWLPIQQEGKNFLTTSEQPHFFNPKYSSLKRYRDVSVAYNFLADEDSKESVGLPGRVFLKKLPEWTPDVRFFRSEEYPRIKEAEQCDVRGSLALPVFERGSGTCLGVVEIVTTTQKMNYRPELDNICKALESVNLRSSRSLNPPSREVCKNGLLNQTLTSSIHRNNEFWLLNVICPFCFSFCRVYDLPLALTWAPCARQGKVGSRHSDENFSECVSTVDDACIVPDHQSRHFLEACSEHHLLQGEGIVGKAFNATKLFFVPEVTTFSKTNYPLAHHAKISGLHAALAVPLKNKFNSSVEFVLEFFFPKACLDTEAQQDMLKSLSATLQQDFRSLNLFIDKELELEVVFPVREEVVFAENPLINAGTGEDMKPLPLEEISQEDSSWISHMIKANEKGKGVSLSWEYQKEEPKEEFMLTSGWDNNQIGSGHNNFLSEAEQFQKVTNSGLRIDMDPSFESASFGVGQTLLGSRRPGEKRRTKTEKTIGLEVLRQYFAGSLKDAAKSIGESDDSFTQFHFHVAVCPTTLKRICRQHGITRWPSRKIKKVGHSLKKLQLVIDSVQGVQGSIQLDSFYTSFPELSSPHMSGTGTSFKNPNAQTENGVSAQGTAAAPKSPPSSSCSHSSGSSTCCSTGANQSTNTGTTSNTVTTLMAENASAILKRARSEVRLHTMNQDETKSLSRTLSHKTFSEHPLFENPPRLPENSSRKLKAGGASKVKATFGEAKHEIARRFNIDNIAPFDLKYLDDDKEWVLLTCEADLEECIDIYRSSQSRTIKISVHEASQVKLGGICVQEREPPSGVIFQVPNQSISVKSSNQYLLKKQVSLQTKGSRFGLFLFLSDSVSDTKEDIDPEPIIAT

SEQ ID NO: 69654 - protein, 1006 aa, Arabidopsis thaliana
  peptide (1)..(1006): Ceres Seq. ID no. 1821397
  misc_feature (842)..(930): Pfam Name: PB1 domain Pfam Description: PB1 domain
  misc_feature (99)..(530): Homolog of NCBI NO: 30679885 NR Description: RWP-RK domain containing protein [Arabidopsis >gi|24030277|gb|AAN41311.1| unknown protein [Arabidopsis
  misc_feature (548)..(937): Homolog of NCBI NO: 30679885 NR Description: RWP-RK domain containing protein [Arabidopsis >gi|24030277|gb|AAN41311.1| unknown protein [Arabidopsis
  misc_feature (1)..(71): Homolog of NCBI NO: 30679885 NR Description: RWP-RK domain containing protein [Arabidopsis >gi|24030277|gb|AAN41311.1| unknown protein [Arabidopsis
  misc_feature (328)..(656): Homolog of NCBI NO: 25367427 NR Description: hypothetical protein At2g17150 [imported] -
  misc_feature (99)..(282): Homolog of NCBI NO: 25367427 NR Description: hypothetical protein At2g17150 [imported] -
  misc_feature (1)..(71): Homolog of NCBI NO: 25367427 NR Description: hypothetical protein At2g17150 [imported] -
  misc_feature (548)..(937): Homolog of NCBI NO: 25367427 NR Description: hypothetical protein At2g17150 [imported] -
  misc_feature (101)..(535): Homolog of NCBI NO: 15217991 NR Description: nodule inception protein, putative; protein id: supported by cDNA: gi_20259432 [Arabidopsis thaliana]
  misc_feature (625)..(931): Homolog of NCBI NO: 15217991 NR Description: nodule inception protein, putative; protein id: supported by cDNA: gi_20259432 [Arabidopsis thaliana]
  misc_feature (1)..(21): Homolog of NCBI NO: 15217991 NR Description: nodule inception protein, putative; protein id: supported by cDNA: gi_20259432 [Arabidopsis thaliana]
MDMDFMDELLFDGCWLETTDGKSLKQTMGQQVSDSTTMNDNNNNSYLYGYQYAENLSQDHISNEETGRKFPPIPPGFLKIEDLSNQVPFDQSAVMSSAQAEKFLLEESEGGRRYWIAPRTSQGPSSSVKERLVQAIEGLNEEVQDKDFLIQIWLPIQQEGKNFLTTSEQPHFFNPKYSSLKRYRDVSVAYNFLADEDSKESVGLPGRVFLKKLPEWTPDVRFFRSEEYPRIKEAEQCDVRGSLALPVFERGSGTCLGVVEIVTTTQKMNYRPELDNICKALESVNLRSSRSLNPPSREVCKNGLLNQTLTSSIHRNNEFWLLNVICPFCFSFCRVYDLPLALTWAPCARQGKVGSRHSDENFSECVSTVDDACIVPDHQSRHFLEACSEHHLLQGEGIVGKAFNATKLFFVPEVTTFSKTNYPLAHHAKISGLHAALAVPLKNKFNSSVEFVLEFFFPKACLDTEAQQDMLKSLSATLQQDFRSLNLFIDKELELEVVFPVREEVVFAENPLINAGTGEDMKPLPLEEISQEDSSWISHMIKANEKGKGVSLSWEYQKEEPKEEFMLTSGWDNNQIGSGHNNFLSEAEQFQKVTNSGLRIDMDPSFESASFGVGQTLLGSRRPGEKRRTKTEKTIGLEVLRQYFAGSLKDAAKSIGESDDSFTQFHFHVAVCPTTLKRICRQHGITRWPSRKIKKVGHSLKKLQLVIDSVQGVQGSIQLDSFYTSFPELSSPHMSGTGTSFKNPNAQTENGVSAQGTAAAPKSPPSSSCSHSSGSSTCCSTGANQSTNTGTTSNTVTTLMAENASAILKRARSEVRLHTMNQDETKSLSRTLSHKTFSEHPLFENPPRLPENSSRKLKAGGASKVKATFGEAKHEIARRFNIDNIAPFDLKYLDDDKEWVLLTCEADLEECIDIYRSSQSRTIKISVHEASQVKLGGICVQEREPPSGVIFQVPNQSISVKSSNQYLLKKQVSLQTKGSRFGLFLFLSDSVSDTKEDIDPEPIIAT

SEQ ID NO: 69655 - protein, 1004 aa, Arabidopsis thaliana
  peptide (1)..(1004): Ceres Seq. ID no. 1821398
  misc_feature (840)..(928): Pfam Name: PB1 domain Pfam Description: PB1 domain
  misc_feature (97)..(528): Homolog of NCBI NO: 30679885 NR Description: RWP-RK domain containing protein [Arabidopsis >gi|24030277|gb|AAN41311.1| unknown protein [Arabidopsis
  misc_feature (546)..(935): Homolog of NCBI NO: 30679885 NR Description: RWP-RK domain containing protein [Arabidopsis >gi|24030277|gb|AAN41311.1| unknown protein [Arabidopsis
  misc_feature (1)..(69): Homolog of NCBI NO: 30679885 NR Description: RWP-RK domain containing protein [Arabidopsis >gi|24030277|gb|AAN41311.1| unknown protein [Arabidopsis
  misc_feature (326)..(654): Homolog of NCBI NO: 25367427 NR Description: hypothetical protein At2g17150 [imported] -
  misc_feature (97)..(280): Homolog of NCBI NO: 25367427 NR Description: hypothetical protein At2g17150 [imported] -
  misc_feature (1)..(69): Homolog of NCBI NO: 25367427 NR Description: hypothetical protein At2g17150 [imported] -
  misc_feature (546)..(935): Homolog of NCBI NO: 25367427 NR Description: hypothetical protein At2g17150 [imported] -
  misc_feature (99)..(533): Homolog of NCBI NO: 15217991 NR Description: nodule inception protein, putative; protein id: supported by cDNA: gi_20259432 [Arabidopsis thaliana]
  misc_feature (623)..(929): Homolog of NCBI NO: 15217991 NR Description: nodule inception protein, putative; protein id: supported by cDNA: gi_20259432 [Arabidopsis thaliana]
  misc_feature (1)..(19): Homolog of NCBI NO: 15217991 NR Description: nodule inception protein, putative; protein id: supported by cDNA: gi_20259432 [Arabidopsis thaliana]
MDFMDELLFDGCWLETTDGKSLKQTMGQQVSDSTTMNDNNNNSYLYGYQYAENLSQDHISNEETGRKFPPIPPGFLKIEDLSNQVPFDQSAVMSSAQAEKFLLEESEGGRRYWIAPRTSQGPSSSVKERLVQAIEGLNEEVQDKDFLIQIWLPIQQEGKNFLTTSEQPHFFNPKYSSLKRYRDVSVAYNFLADEDSKESVGLPGRVFLKKLPEWTPDVRFFRSEEYPRIKEAEQCDVRGSLALPVFERGSGTCLGVVEIVTTTQKMNYRPELDNICKALESVNLRSSRSLNPPSREVCKNGLLNQTLTSSIHRNNEFWLLNVICPFCFSFCRVYDLPLALTWAPCARQGKVGSRHSDENFSECVSTVDDACIVPDHQSRHFLEACSEHHLLQGEGIVGKAFNATKLFFVPEVTTFSKTNYPLAHHAKISGLHAALAVPLKNKFNSSVEFVLEFFFPKACLDTEAQQDMLKSLSATLQQDFRSLNLFIDKELELEVVFPVREEVVFAENPLINAGTGEDMKPLPLEEISQEDSSWISHMIKANEKGKGVSLSWEYQKEEPKEEFMLTSGWDNNQIGSGHNNFLSEAEQFQKVTNSGLRIDMDPSFESASFGVGQTLLGSRRPGEKRRTKTEKTIGLEVLRQYFAGSLKDAAKSIGESDDSFTQFHFHVAVCPTTLKRICRQHGITRWPSRKIKKVGHSLKKLQLVIDSVQGVQGSIQLDSFYTSFPELSSPHMSGTGTSFKNPNAQTENGVSAQGTAAAPKSPPSSSCSHSSGSSTCCSTGANQSTNTGTTSNTVTTLMAENASAILKRARSEVRLHTMNQDETKSLSRTLSHKTFSEHPLFENPPRLPENSSRKLKAGGASKVKATFGEAKHEIARRFNIDNIAPFDLKYLDDDKEWVLLTCEADLEECIDIYRSSQSRTIKISVHEASQVKLGGICVQEREPPSGVIFQVPNQSISVKSSNQYLLKKQVSLQTKGSRFGLFLFLSDSVSDTKEDIDPEPIIAT

SEQ ID NO: 69656 - DNA, 813 bp, Arabidopsis thaliana
  misc_feature (1)..(813): Ceres Seq. ID no. 1821427
  misc_feature: MA Experiment ID: 20000451 Result: Up-regulated in Transcription
  misc_feature: MA Experiment 20000451 PARAMETER Experiment Name: At_CS6879_Shoots-Roots_P Parameter: Age (day) Value: 14
  misc_feature: MA Experiment 20000451 PARAMETER Experiment Name: At_CS6879_Shoots-Roots_P Parameter: Organism Value: A. thaliana
  misc_feature: MA Experiment 20000451 PARAMETER Experiment Name: At_CS6879_Shoots-Roots_P Parameter: Plant Line Value: CS6879 vs. WS
  misc_feature: MA Experiment 20000451 PARAMETER Experiment Name: At_CS6879_Shoots-Roots_P Parameter: Tissue Value: Roots
atggaacttaacagatctgaagcagacgaagcaaaggccgagaccactcccaccggtggagccaccagctcagccacagcctctggctcttcctccggacgtcgtccacgtggtcgtcctgcaggttccaaaaacaaacccaaacctccgacgattataactagagatagtcctaacgtccttagatcacacgttcttgaagtcacctccggttcggacatatccgaggcagtctccacctacgccactcgtcgcggctgcggcgtttgcattataagcggcacgggtgcggtcactaacgtcacgatacggcaacctgcggctccggctggtggaggtgtgattaccctgcatggtcggtttgacattttgtctttgaccggtactgcgcttccaccgcctgcaccaccgggagcaggaggtttgacggtgtatctagccggaggtcaaggacaagttgtaggagggaatgtggctggttcgttaattgcttcgggaccggtagtgttgatggctgcttcttttgcaaacgcagtttatgataggttaccgattgaagaggaagaaaccccaccgccgagaaccaccggggtgcagcagcagcagccggaggcgtctcagtcgtcggaggttacggggagtggggcccaggcgtgtgagtcaaacctccaaggtggaaatggtggaggaggtgttgctttctacaatcttggaatgaatatgaacaattttcaattctccgggggagatatttacggtatgagcggcggtagcggaggaggtggtggcggtgcgactagacccgcgttttag

SEQ ID NO: 69657 - protein, 270 aa, Arabidopsis thaliana
  peptide (1)..(270): Ceres Seq. ID no. 1821428
  misc_feature (34)..(270): Homolog of NCBI NO: 18396925 NR Description: expressed protein; protein id: At3g04570.1, by cDNA: 15781. [Arabidopsis thaliana] hypothetical protein [Arabidopsis thaliana]
  misc_feature (4)..(193): Homolog of NCBI NO: 15234404 NR Description: putative DNA-binding protein; protein id:
  misc_feature (19)..(193): Homolog of NCBI NO: 15235815 NR Description: putative DNA binding protein; protein id:
  misc_feature (19)..(270): Homolog of NCBI NO: 34905212 NR Description: P0672D01.8 [Oryza sativa (japonica
  misc_feature (1)..(270): Homolog of NCBI NO: 7486025 NR Description: hypothetical protein F23E12.50 - Arabidopsis >gi|3080411|emb|CAA18730.1| putative protein [Arabidopsis >gi|7270491|emb|CAB80256.1| putative protein [Arabidopsis
  misc_feature (1)..(270): Homolog of NCBI NO: 30690333 NR Description: expressed protein [Arabidopsis thaliana]
  misc_feature (15)..(270): Homolog of NCBI NO: 38346718 NR Description: OSJNBa0086O06.16 [Oryza sativa (japonica
  misc_feature (7)..(230): Homolog of NCBI NO: 15218067 NR Description: putative DNA-binding protein; protein id:
  misc_feature (9)..(270): Homolog of NCBI NO: 15223074 NR Description: unknown protein; protein id: At1g76500.1
  misc_feature (2)..(189): Homolog of NCBI NO: 15225475 NR Description: putative AT-hook DNA-binding protein; protein id:
MELNRSEADEAKAETTPTGGATSSATASGSSSGRRPRGRPAGSKNKPKPPTIITRDSPNVLRSHVLEVTSGSDISEAVSTYATRRGCGVCIISGTGAVTNVTIRQPAAPAGGGVITLHGRFDILSLTGTALPPPAPPGAGGLTVYLAGGQGQVVGGNVAGSLIASGPVVLMAASFANAVYDRLPIEEEETPPPRTTGVQQQQPEASQSSEVTGSGAQACESNLQGGNGGGGVAFYNLGMNMNNFQFSGGDIYGMSGGSGGGGGGATRPAF

SEQ ID NO: 69658 - DNA, 1401 bp, Arabidopsis thaliana
  misc_feature (1)..(1401): Ceres Seq. ID no. 1821441
  misc_feature: MA Experiment ID: 20000440 Result: Up-regulated in Transcription
  misc_feature: MA Experiment 20000440 PARAMETER Experiment Name: At_Closed-Flower__Sub_P Parameter: Tissue Value: Closed Flower vs. Whole Plant
atgaggatgaacaaaattttacttgtttttgtgtttctaagcattgccactgtaatcaatagtggaacaacaagcaactttgtccgcacagctcaaccatcaactgagatgtctctcgaaacttttccatctccggctggtcataatgctccggaacaggttcatatcgtccaaggagattacaatggacgtggtataatcatatcgtgggtgacccccttaaacctagctggttcaaacgtggttacttattggaaggcagttgatggtgatgtgaaaccgaaaaagaagagaggtcatgcctctacctcgtcttaccgattttatgactatacttctggttttcttcatcacgccacaattaaaggactcgagtatgataccaaatacatctatgaggttggaactgatggatccgttagacaattttccttcactagtcctccaaaggttggacctgacgttccatacactttcggcattattggtgatcttggacaaactttagcttctaacgagacattatatcattacatgtcaaaccctaaaggccaagctgttctcttccctggagacttatcttacgcagatgaccatccaaaccatgatcagagaaagtgggattcgtggggaagattcgtggagccttgtgctgcttaccaaaccttcatctatgctgccgggaatcacgaaattgattttgtcccaaacattggggagcctcatgccttcaagccctacattcaccgttatcataacgcctacaaggcctcgaagagcatatctcctctttggtactctattagacgtgcatctgctcacatcatcgtcctctcctcttattctgcctacggaaaatacacacctcaatacgtgtggctcgagcaagagttgaagaaggtgaacagagaagagactccatggcttattgtcatggttcactcgccgtggtacaacagtaataactaccattacatggaaggtgagagcatgagagcaatgtttgagtcgtggttcgttaacagcaaggttgatttggttttgtctggtcacgtccattcctatgagagatccgaacgtgtctccaatattaaatacaacatcaccaatggcttgagctatcctgtgaaagacccttctgctccaatctacatcactatcggagatggaggaaacattgaaggaatcgcaaatagttttactgatccgcaaccgagctattcggcgtatagagaagctagttttggtcatgcagttttggagatttacaatagaactcacgcatactacacatggcataggaaccaagacaatgaacctgttgccgctgattcaattatgttgcataacagatatttctttccagtagaggaattagaatctggcaacactagggcctaa

SEQ ID NO: 69659 - protein, 466 aa, Arabidopsis thaliana
  peptide (1)..(466): Ceres Seq. ID no. 1821442
  misc_feature (157)..(355): Pfam Name: Calcineurin-like phosphoesterase Pfam Description: Calcineurin-like phosphoesterase
  misc_feature (1)..(466): Homolog of NCBI NO: 15234369 NR Description: purple acid phosphatase like protein; protein id: [Arabidopsis thaliana] >gi|7435104|pir||T04599 acid phosphatase
  misc_feature (4)..(466): Homolog of NCBI NO: 15223530 NR Description: purple acid phosphatase, putative; protein id: [Arabidopsis thaliana] >gi|25752265|pir||F96605 acid phosphatase
  misc_feature (164)..(458): Homolog of NCBI NO: 15224112 NR Description: putative purple acid phosphatase precursor; id: At2g18130.1, supported by cDNA: gi_20257484 [Arabidopsis
  misc_feature (1)..(127): Homolog of NCBI NO: 15224112 NR Description: putative purple acid phosphatase precursor; id: At2g18130.1, supported by cDNA: gi_20257484 [Arabidopsis
  misc_feature (6)..(458): Homolog of NCBI NO: 27597229 NR Description: purple acid phosphatase [Nicotiana tabacum]
MRMNKILLVFVFLSIATVINSGTTSNFVRTAQPSTEMSLETFPSPAGHNAPEQVHIVQGDYNGRGIIISWVTPLNLAGSNVVTYWKAVDGDVKPKKKRGHASTSSYRFYDYTSGFLHHATIKGLEYDTKYIYEVGTDGSVRQFSFTSPPKVGPDVPYTFGIIGDLGQTLASNETLYHYMSNPKGQAVLFPGDLSYADDHPNHDQRKWDSWGRFVEPCAAYQTFIYAAGNHEIDFVPNIGEPHAFKPYIHRYHNAYKASKSISPLWYSIRRASAHIIVLSSYSAYGKYTPQYVWLEQELKKVNREETPWLIVMVHSPWYNSNNYHYMEGESMRAMFESWFVNSKVDLVLSGHVHSYERSERVSNIKYNITNGLSYPVKDPSAPIYITIGDGGNIEGIANSFTDPQPSYSAYREASFGHAVLEIYNRTHAYYTWHRNQDNEPVAADSIMLHNRYFFPVEELESGNTRA

SEQ ID NO: 69660 - protein, 464 aa, Arabidopsis thaliana
  peptide (1)..(464): Ceres Seq. ID no. 1821443
  misc_feature (155)..(353): Pfam Name: Calcineurin-like phosphoesterase Pfam Description: Calcineurin-like phosphoesterase
  misc_feature (1)..(464): Homolog of NCBI NO: 15234369 NR Description: purple acid phosphatase like protein; protein id: [Arabidopsis thaliana] >gi|7435104|pir||T04599 acid phosphatase
  misc_feature (2)..(464): Homolog of NCBI NO: 15223530 NR Description: purple acid phosphatase, putative; protein id: [Arabidopsis thaliana] >gi|25752265|pir||F96605 acid phosphatase
  misc_feature (162)..(456): Homolog of NCBI NO: 15224112 NR Description: putative purple acid phosphatase precursor; id: At2g18130.1, supported by cDNA: gi_20257484 [Arabidopsis
  misc_feature (1)..(125): Homolog of NCBI NO: 15224112 NR Description: putative purple acid phosphatase precursor; id: At2g18130.1, supported by cDNA: gi_20257484 [Arabidopsis
  misc_feature (4)..(456): Homolog of NCBI NO: 27597229 NR Description: purple acid phosphatase [Nicotiana tabacum]
MNKILLVFVFLSIATVINSGTTSNFVRTAQPSTEMSLETFPSPAGHNAPEQVHIVQGDYNGRGIIISWVTPLNLAGSNVVTYWKAVDGDVKPKKKRGHASTSSYRFYDYTSGFLHHATIKGLEYDTKYIYEVGTDGSVRQFSFTSPPKVGPDVPYTFGIIGDLGQTLASNETLYHYMSNPKGQAVLFPGDLSYADDHPNHDQRKWDSWGRFVEPCAAYQTFIYAAGNHEIDFVPNIGEPHAFKPYIHRYHNAYKASKSISPLWYSIRRASAHIIVLSSYSAYGKYTPQYVWLEQELKKVNREETPWLIVMVHSPWYNSNNYHYMEGESMRAMFESWFVNSKVDLVLSGHVHSYERSERVSNIKYNITNGLSYPVKDPSAPIYITIGDGGNIEGIANSFTDPQPSYSAYREASFGHAVLEIYNRTHAYYTWHRNQDNEPVAADSIMLHNRYFFPVEELESGNTRA

SEQ ID NO: 69661 - protein, 430 aa, Arabidopsis thaliana
  peptide (1)..(430): Ceres Seq. ID no. 1821444
  misc_feature (121)..(319): Pfam Name: Calcineurin-like phosphoesterase Pfam Description: Calcineurin-like phosphoesterase
  misc_feature (1)..(430): Homolog of NCBI NO: 15234369 NR Description: purple acid phosphatase like protein; protein id: [Arabidopsis thaliana] >gi|7435104|pir||T04599 acid phosphatase
  misc_feature (1)..(430): Homolog of NCBI NO: 15223530 NR Description: purple acid phosphatase, putative; protein id: [Arabidopsis thaliana] >gi|25752265|pir||F96605 acid phosphatase
  misc_feature (128)..(422): Homolog of NCBI NO: 15224112 NR Description: putative purple acid phosphatase precursor; id: At2g18130.1, supported by cDNA: gi_20257484 [Arabidopsis
  misc_feature (1)..(91): Homolog of NCBI NO: 15224112 NR Description: putative purple acid phosphatase precursor; id: At2g18130.1, supported by cDNA: gi_20257484 [Arabidopsis
  misc_feature (1)..(422): Homolog of NCBI NO: 27597229 NR Description: purple acid phosphatase [Nicotiana tabacum]
MSLETFPSPAGHNAPEQVHIVQGDYNGRGIIISWVTPLNLAGSNVVTYWKAVDGDVKPKKKRGHASTSSYRFYDYTSGFLHHATIKGLEYDTKYIYEVGTDGSVRQFSFTSPPKVGPDVPYTFGIIGDLGQTLASNETLYHYMSNPKGQAVLFPGDLSYADDHPNHDQRKWDSWGRFVEPCAAYQTFIYAAGNHEIDFVPNIGEPHAFKPYIHRYHNAYKASKSISPLWYSIRRASAHIIVLSSYSAYGKYTPQYVWLEQELKKVNREETPWLIVMVHSPWYNSNNYHYMEGESMRAMFESWFVNSKVDLVLSGHVHSYERSERVSNIKYNITNGLSYPVKDPSAPIYITIGDGGNIEGIANSFTDPQPSYSAYREASFGHAVLEIYNRTHAYYTWHRNQDNEPVAADSIMLHNRYFFPVEELESGNTRA

SEQ ID NO: 69662 - DNA, 1602 bp, Arabidopsis thaliana
  misc_feature (1)..(1602): Ceres Seq. ID no. 1821688
  misc_feature: MA Experiment ID: 20000184 Result: Down-regulated in Transcription
  misc_feature: MA Experiment 20000184 PARAMETER Experiment Name: At_Shoots__P Parameter: Age (day) Value: 7
  misc_feature: MA Experiment 20000184 PARAMETER Experiment Name: At_Shoots__P Parameter: Tissue Value: Shoots vs. Whole Plant
atggctggagtattagctggggattgttcattcggtgagagtggtgtttcatcttactccaggaattccaatgaaaagcaggacgaggttgcccgctggtattttggaagaaaagaaattgaagaaaattcaccttcaaggttggatagtattgacttaaagaaggaaacatacctccgcaagtcatactgtacatttttgcaggatttaggcatgagattaaaagtaacagtattaagattattactgagtcctttttccatgttgtcctccctcctcacccagacgattgctacagtctgcatgttccttgcgggaaaagtggaagaaactcctaggccgttaaaagatgttattgttgtctcctatgagataatacacaagaaggatcctactactgcacagaaaatcaagcaaaaggaagtatatgagcaacaaaaagagcttatactaaatggagaaaagattgtactttctacgctgggatttgacttcaatgtttatcatccttataagcctcttgtagaagcgataaagaaatttaaggtcgcacagaatgctctggcccaagttgcatggaattttgttaacgatggtctgcggacgtcactctgcctgcaatttaagcctcaccacattgcggcgggagcaatttttcttgctgcgaagttccttaaagtgaaattaccatcagatggagagaaggtctggtggcaagaatttgatgtcacacctcgacaactagaggatgttagcaaccaaatgcttgagctctatgagcaaaaccgtgttcctgcatctcaagtaagcgaagtcgaaagtagtgtaggtggaggatcagctcatcatgttgggtctaggccatcagcacgtctaactcatgaacattcaaattctgataatctcgggggctcgacaaaagctacacaaaaccggagcaatgataatgggagtggtgaggcaggtagtgtcatcaccgagcagaagggggaaagagatacagaaacgaaagatagcatgcatactgaaagtcatccagcccataagtctagatcgggagttgaggcacctggggaggataaaatagagaaagcaggtgcacattttccagaagatgataaatctagaattgttggtacagctgatgtcacggtcagccaatccccaaaagacataaaaatgtttagagataaggtgaaggccaaactagaggcgaagaaggtccaaggtgaaaagacgagaaagaaggatttggtggatgaggatgatttgatagaaagagaactggaagacgtggaattagctgttgaggatgacaaagatatacaaaacaaaagctccatgggtacagaacatggcgagattcttgatggaaacaacttggtggtcaataccgaggaaggtgaaatgatagatgatgtttcttcaacaatgcctagccggaagagaaaaatggaaagtccttgtgaaaaacagttaggagaaggaaagagacgacacgacaacagtgagaatgtggaagaaggtcagaagacaaacccaggaggaagtagtcatagttatggtgacagagagccaagaagacactcccaagagaggtag

SEQ ID NO: 69663 - protein, 533 aa, Arabidopsis thaliana
  peptide (1)..(533): Ceres Seq. ID no. 1821689
  misc_feature (30)..(166): Pfam Name: Cyclin, N-terminal domain Pfam Description: Cyclin, N-terminal domain
  misc_feature (1)..(533): Homolog of NCBI NO: 7486085 NR Description: hypothetical protein F24J7.161 - Arabidopsis >gi|4582488|emb|CAB40377.1| putative protein [Arabidopsis >gi|7268756|emb|CAB78962.1| putative protein [Arabidopsis
  misc_feature (1)..(533): Homolog of NCBI NO: 30684822 NR Description: cyclin family [Arabidopsis thaliana]
  misc_feature (1)..(357): Homolog of NCBI NO: 30694715 NR Description: cyclin family [Arabidopsis thaliana]
  misc_feature (1)..(357): Homolog of NCBI NO: 9759604 NR Description: contains similarity to cyclin~gene_id:K18C1.7
  misc_feature (1)..(466): Homolog of NCBI NO: 15235087 NR Description: putative protein; protein id: At4g19560.1
  misc_feature (283)..(532): Homolog of NCBI NO: 9759604 NR Description: contains similarity to cyclin~gene_id:K18C1.7
  misc_feature (283)..(532): Homolog of NCBI NO: 30694715 NR Description: cyclin family [Arabidopsis thaliana]
  misc_feature (29)..(264): Homolog of NCBI NO: 15219592 NR Description: hypothetical protein; protein id: At1g35440.1
  misc_feature (27)..(263): Homolog of NCBI NO: 15217663 NR Description: putative cyclin; protein id: At1g27630.1, by cDNA: 33877., supported by cDNA: gi_12744988 [Arabidopsis >gi|5668773|gb|AAD46000.1|AC005916_12 Contains similarity to
  misc_feature (27)..(263): Homolog of NCBI NO: 21618277 NR Description: putative cyclin [Arabidopsis thaliana]
MAGVLAGDCSFGESGVSSYSRNSNEKQDEVARWYFGRKEIEENSPSRLDSIDLKKETYLRKSYCTFLQDLGMRLKVTVLRLLLSPFSMLSSLLTQTIATVCMFLAGKVEETPRPLKDVIVVSYEIIHKKDPTTAQKIKQKEVYEQQKELILNGEKIVLSTLGFDFNVYHPYKPLVEAIKKFKVAQNALAQVAWNFVNDGLRTSLCLQFKPHHIAAGAIFLAAKFLKVKLPSDGEKVWWQEFDVTPRQLEDVSNQMLELYEQNRVPASQVSEVESSVGGGSAHHVGSRPSARLTHEHSNSDNLGGSTKATQNRSNDNGSGEAGSVITEQKGERDTETKDSMHTESHPAHKSRSGVEAPGEDKIEKAGAHFPEDDKSRIVGTADVTVSQSPKDIKMFRDKVKAKLEAKKVQGEKTRKKDLVDEDDLIERELEDVELAVEDDKDIQNKSSMGTEHGEILDGNNLVVNTEEGEMIDDVSSTMPSRKRKMESPCEKQLGEGKRRHDNSENVEEGQKTNPGGSSHSYGDREPRRHSQER

SEQ ID NO: 69664 - protein, 462 aa, Arabidopsis thaliana
  peptide (1)..(462): Ceres Seq. ID no. 1821690
  misc_feature (1)..(95): Pfam Name: Cyclin, N-terminal domain Pfam Description: Cyclin, N-terminal domain
  misc_feature (1)..(462): Homolog of NCBI NO: 7486085 NR Description: hypothetical protein F24J7.161 - Arabidopsis >gi|4582488|emb|CAB40377.1| putative protein [Arabidopsis >gi|7268756|emb|CAB78962.1| putative protein [Arabidopsis
  misc_feature (1)..(462): Homolog of NCBI NO: 30684822 NR Description: cyclin family [Arabidopsis thaliana]
  misc_feature (1)..(286): Homolog of NCBI NO: 30694715 NR Description: cyclin family [Arabidopsis thaliana]
  misc_feature (1)..(286): Homolog of NCBI NO: 9759604 NR Description: contains similarity to cyclin~gene_id:K18C1.7
  misc_feature (1)..(395): Homolog of NCBI NO: 15235087 NR Description: putative protein; protein id: At4g19560.1
  misc_feature (212)..(461): Homolog of NCBI NO: 9759604 NR Description: contains similarity to cyclin~gene_id:K18C1.7
  misc_feature (212)..(461): Homolog of NCBI NO: 30694715 NR Description: cyclin family [Arabidopsis thaliana]
  misc_feature (1)..(193): Homolog of NCBI NO: 15219592 NR Description: hypothetical protein; protein id: At1g35440.1
  misc_feature (1)..(192): Homolog of NCBI NO: 15217663 NR Description: putative cyclin; protein id: At1g27630.1, by cDNA: 33877., supported by cDNA: gi_12744988 [Arabidopsis >gi|5668773|gb|AAD46000.1|AC005916_12 Contains similarity to
  misc_feature (1)..(192): Homolog of NCBI NO: 21618277 NR Description: putative cyclin [Arabidopsis thaliana]
MRLKVTVLRLLLSPFSMLSSLLTQTIATVCMFLAGKVEETPRPLKDVIVVSYEIIHKKDPTTAQKIKQKEVYEQQKELILNGEKIVLSTLGFDFNVYHPYKPLVEAIKKFKVAQNALAQVAWNFVNDGLRTSLCLQFKPHHIAAGAIFLAAKFLKVKLPSDGEKVWWQEFDVTPRQLEDVSNQMLELYEQNRVPASQVSEVESSVGGGSAHHVGSRPSARLTHEHSNSDNLGGSTKATQNRSNDNGSGEAGSVITEQKGERDTETKDSMHTESHPAHKSRSGVEAPGEDKIEKAGAHFPEDDKSRIVGTADVTVSQSPKDIKMFRDKVKAKLEAKKVQGEKTRKKDLVDEDDLIERELEDVELAVEDDKDIQNKSSMGTEHGEILDGNNLVVNTEEGEMIDDVSSTMPSRKRKMESPCEKQLGEGKRRHDNSENVEEGQKTNPGGSSHSYGDREPRRHSQER

SEQ ID NO: 69665 - protein, 446 aa, Arabidopsis thaliana
  peptide (1)..(446): Ceres Seq. ID no. 1821691
  misc_feature (1)..(79): Pfam Name: Cyclin, N-terminal domain Pfam Description: Cyclin, N-terminal domain
  misc_feature (1)..(446): Homolog of NCBI NO: 7486085 NR Description: hypothetical protein F24J7.161 - Arabidopsis >gi|4582488|emb|CAB40377.1| putative protein [Arabidopsis >gi|7268756|emb|CAB78962.1| putative protein [Arabidopsis
  misc_feature (1)..(446): Homolog of NCBI NO: 30684822 NR Description: cyclin family [Arabidopsis thaliana]
  misc_feature (1)..(270): Homolog of NCBI NO: 30694715 NR Description: cyclin family [Arabidopsis thaliana]
  misc_feature (1)..(270): Homolog of NCBI NO: 9759604 NR Description: contains similarity to cyclin~gene_id:K18C1.7
  misc_feature (1)..(379): Homolog of NCBI NO: 15235087 NR Description: putative protein; protein id: At4g19560.1
  misc_feature (196)..(445): Homolog of NCBI NO: 9759604 NR Description: contains similarity to cyclin~gene_id:K18C1.7
  misc_feature (196)..(445): Homolog of NCBI NO: 30694715 NR Description: cyclin family [Arabidopsis thaliana]
  misc_feature (1)..(177): Homolog of NCBI NO: 15219592 NR Description: hypothetical protein; protein id: At1g35440.1
  misc_feature (1)..(176): Homolog of NCBI NO: 15217663 NR Description: putative cyclin; protein id: At1g27630.1, by cDNA: 33877., supported by cDNA: gi_12744988 [Arabidopsis >gi|5668773|gb|AAD46000.1|AC005916_12 Contains similarity to
  misc_feature (1)..(176): Homolog of NCBI NO: 21618277 NR Description: putative cyclin [Arabidopsis thaliana]
MLSSLLTQTIATVCMFLAGKVEETPRPLKDVIVVSYEIIHKKDPTTAQKIKQKEVYEQQKELILNGEKIVLSTLGFDFNVYHPYKPLVEAIKKFKVAQNALAQVAWNFVNDGLRTSLCLQFKPHHIAAGAIFLAAKFLKVKLPSDGEKVWWQEFDVTPRQLEDVSNQMLELYEQNRVPASQVSEVESSVGGGSAHHVGSRPSARLTHEHSNSDNLGGSTKATQNRSNDNGSGEAGSVITEQKGERDTETKDSMHTESHPAHKSRSGVEAPGEDKIEKAGAHFPEDDKSRIVGTADVTVSQSPKDIKMFRDKVKAKLEAKKVQGEKTRKKDLVDEDDLIERELEDVELAVEDDKDIQNKSSMGTEHGEILDGNNLVVNTEEGEMIDDVSSTMPSRKRKMESPCEKQLGEGKRRHDNSENVEEGQKTNPGGSSHSYGDREPRRHSQER

SEQ ID NO: 69666 - DNA, 1260 bp, Arabidopsis thaliana
  misc_feature (1)..(1260): Ceres Seq. ID no. 1822185
  misc_feature: MA Experiment ID: 20000184 Result: Down-regulated in Transcription
  misc_feature: MA Experiment 20000184 PARAMETER Experiment Name: At_Shoots__P Parameter: Age (day) Value: 7
  misc_feature: MA Experiment 20000184 PARAMETER Experiment Name: At_Shoots__P Parameter: Tissue Value: Shoots vs. Whole Plant
  misc_feature: MA Experiment ID: 20000185 Result: Up-regulated in Transcription
  misc_feature: MA Experiment 20000185 PARAMETER Experiment Name: At_Roots__P Parameter: Age (day) Value: 7 vs. 21
  misc_feature: MA Experiment 20000185 PARAMETER Experiment Name: At_Roots__P Parameter: Organism Value: A. thaliana
  misc_feature: MA Experiment 20000185 PARAMETER Experiment Name: At_Roots__P Parameter: Tissue Value: Roots vs. Whole Plant
  misc_feature: MA Experiment ID: 20000234 Result: Down-regulated in Transcription
  misc_feature: MA Experiment 20000234 PARAMETER Experiment Name: At_Siliques_P Parameter: Age (day) Value: 21
  misc_feature: MA Experiment 20000234 PARAMETER Experiment Name: At_Siliques_P Parameter: Organism Value: A. thaliana
  misc_feature: MA Experiment 20000234 PARAMETER Experiment Name: At_Siliques_P Parameter: Plant Line Value: WS
  misc_feature: MA Experiment 20000234 PARAMETER Experiment Name: At_Siliques_P Parameter: Tissue Value: Less Than 5mm Siliques vs. Whole Plant
  misc_feature: MA Experiment ID: 20000264 Result: Up-regulated in Transcription
  misc_feature: MA Experiment 20000264 PARAMETER Experiment Name: At_Open_Flower_P Parameter: Age (day) Value: 21
  misc_feature: MA Experiment 20000264 PARAMETER Experiment Name: At_Open_Flower_P Parameter: Plant Line Value: WS
  misc_feature: MA Experiment 20000264 PARAMETER Experiment Name: At_Open_Flower_P Parameter: Tissue Value: Open Flower vs. Whole Plant
  misc_feature: MA Experiment ID: 20000265 Result: Up-regulated in Transcription
  misc_feature: MA Experiment 20000265 PARAMETER Experiment Name: At_Open_Flower_P Parameter: Age (day) Value: 21
  misc_feature: MA Experiment 20000265 PARAMETER Experiment Name: At_Open_Flower_P Parameter: Plant Line Value: WS
  misc_feature: MA Experiment 20000265 PARAMETER Experiment Name: At_Open_Flower_P Parameter: Tissue Value: Closed Flower vs. Whole Plant
  misc_feature: MA Experiment ID: 20000438 Result: Down-regulated in Transcription
  misc_feature: MA Experiment 20000438 PARAMETER Experiment Name: At_Shoots__P Parameter: Age (day) Value: 14
  misc_feature: MA Experiment 20000438 PARAMETER Experiment Name: At_Shoots__P Parameter: Tissue Value: Shoots vs. Whole Plant
  misc_feature: MA Experiment ID: 20000439 Result: Up-regulated in Transcription
  misc_feature: MA Experiment 20000439 PARAMETER Experiment Name: At_Roots__P Parameter: Age (day) Value: 14 vs. 21
  misc_feature: MA Experiment 20000439 PARAMETER Experiment Name: At_Roots__P Parameter: Organism Value: A. thaliana
  misc_feature: MA Experiment 20000439 PARAMETER Experiment Name: At_Roots__P Parameter: Tissue Value: Roots vs. Whole Plant
  misc_feature: MA Experiment ID: 20000794 Result: Up-regulated in Transcription
  misc_feature: MA Experiment 20000794 PARAMETER Experiment Name: At_Petals_P Parameter: Age (day) Value: 23-25 days
  misc_feature: MA Experiment 20000794 PARAMETER Experiment Name: At_Petals_P Parameter: Plant Line Value: WS
  misc_feature: MA Experiment 20000794 PARAMETER Experiment Name: At_Petals_P Parameter: Tissue Value: Petals vs. Whole plant
  misc_feature: MA Experiment ID: 20001904 Result: Up-regulated in Transcription
  misc_feature: MA Experiment 20001904 PARAMETER Experiment Name: At_Drought_Reproduction_P Parameter: Age (day) Value: 37
  misc_feature: MA Experiment 20001904 PARAMETER Experiment Name: At_Drought_Reproduction_P Parameter: Organism Value: A. thaliana
  misc_feature: MA Experiment 20001904 PARAMETER Experiment Name: At_Drought_Reproduction_P Parameter: Plant Line Value: WS
  misc_feature: MA Experiment 20001904 PARAMETER Experiment Name: At_Drought_Reproduction_P Parameter: Timepoint (day) Value: 7
  misc_feature: MA Experiment 20001904 PARAMETER Experiment Name: At_Drought_Reproduction_P Parameter: Tissue Value: Rosettes
  misc_feature: MA Experiment 20001904 PARAMETER Experiment Name: At_Drought_Reproduction_P Parameter: Treatment Value: Drought vs. No Drought
  misc_feature: MA Experiment ID: 20001911 Result: Down-regulated in Transcription
  misc_feature: MA Experiment 20001911 PARAMETER Experiment Name: At_Drought_Reproduction_P Parameter: Age (day) Value: 40
  misc_feature: MA Experiment 20001911 PARAMETER Experiment Name: At_Drought_Reproduction_P Parameter: Organism Value: A. thaliana
  misc_feature: MA Experiment 20001911 PARAMETER Experiment Name: At_Drought_Reproduction_P Parameter: Plant Line Value: WS
  misc_feature: MA Experiment 20001911 PARAMETER Experiment Name: At_Drought_Reproduction_P Parameter: Timepoint (day) Value: 10
  misc_feature: MA Experiment 20001911 PARAMETER Experiment Name: At_Drought_Reproduction_P Parameter: Tissue Value: Flowers
  misc_feature: MA Experiment 20001911 PARAMETER Experiment Name: At_Drought_Reproduction_P Parameter: Treatment Value: Drought vs. No Drought
atgaagaggaagaagaaagaggaggaggaggagaagttgatagtgactagagaattcgcgaagagatggcgagatctgagcggtcaaaaccattggaaagggatgttacagccgttggatcaagatctccgggaatatatcatacattatggtgagatggctcaggctggttacgatactttcaatatcaacaccgaatctcagttcgccggtgctagcatctactctagaaaagacttcttcgccaaggttggtttagagatagcacacccgtacacaaagtacaaagtgacgaagtttatatacgcgacatccgatatccacgtgcctgagtcattcttattgttcccaatttcacgtgagggatggtcaaaggaatcaaattggatgggttacgtggcggtaacagacgaccaaggcacggcacttcttggtcggagagatatcgtggtttcttggagaggctcagtgcaaccacttgaatgggtcgaagacttcgagtttggtttagtcaacgccataaaaatcttcggtgaaagaaacgatcaagtacaaattcatcaaggttggtattcaatctacatgtctcaagatgaacgatcaccttttactaagaccaatgctcgtgaccaggtattgcgagaggttggaagattgttggagaagtataaggacgaagaagttagtataactatatgtggtcatagtcttggagctgcactcgcgacgcttagtgccactgatattgtggctaatggttataaccgaccaaagagccgtcctgacaagtcttgtcctgttactgcctttgtctttgctagtcctcgtgttggggattcagactttaggaaactcttttccggattggaagatatccgagtgttacggacaaggaatctaccggacgtaattccgatctatccaccgataggttactccgaggtaggagatgagtttccaatagacacaagaaagtcaccatacatgaaatctcctggaaacctcgcaacctttcactgcttagagggttacttgcatggcgttgccgggactcaaggaacgaacaaagctgacttattcagactcgatgtggaaagagccatcggattggtcaataaatcagtggatgggttaaaagacgagtgtatggtcccagggaaatggagggttcttaaaaacaaaggtatggcccaacaagacgatggatcttgggagttagtggaccatgagattgatgataatgaagatttggatttctga

SEQ ID NO: 69667 - protein, 419 aa, Arabidopsis thaliana
  peptide (1)..(419): Ceres Seq. ID no. 1822186
  misc_feature (1)..(419): Homolog of NCBI NO: 15233922 NR Description: lipase-like protein; protein id: At4g18550.1
  misc_feature (20)..(413): Homolog of NCBI NO: 34911830 NR Description: lipase-like protein [Oryza sativa (japonica
  misc_feature (21)..(418): Homolog of NCBI NO: 21537306 NR Description: lipase-like protein [Arabidopsis thaliana]
  misc_feature (21)..(418): Homolog of NCBI NO: 15221426 NR Description: lipase-like protein; protein id: At1g06250.1, by cDNA: 12912. [Arabidopsis thaliana] >gi|25406908|pir||C86198
  misc_feature (17)..(223): Homolog of NCBI NO: 34911870 NR Description: lipase-like protein [Oryza sativa (japonica
  misc_feature (215)..(414): Homolog of NCBI NO: 34911870 NR Description: lipase-like protein [Oryza sativa (japonica
  misc_feature (20)..(418): Homolog of NCBI NO: 34911832 NR Description: lipase-like protein [Oryza sativa (japonica
  misc_feature (20)..(410): Homolog of NCBI NO: 34911842 NR Description: lipase-like protein [Oryza sativa (japonica
  misc_feature (20)..(412): Homolog of NCBI NO: 1527001 NR Description: Ipomoea nil Pn47p
  misc_feature (138)..(406): Homolog of NCBI NO: 15224613 NR Description: putative lipase; protein id: At2g31100.1
MKRKKKEEEEEKLIVTREFAKRWRDLSGQNHWKGMLQPLDQDLREYIIHYGEMAQAGYDTFNINTESQFAGASIYSRKDFFAKVGLEIAHPYTKYKVTKFIYATSDIHVPESFLLFPISREGWSKESNWMGYVAVTDDQGTALLGRRDIVVSWRGSVQPLEWVEDFEFGLVNAIKIFGERNDQVQIHQGWYSIYMSQDERSPFTKTNARDQVLREVGRLLEKYKDEEVSITICGHSLGAALATLSATDIVANGYNRPKSRPDKSCPVTAFVFASPRVGDSDFRKLFSGLEDIRVLRTRNLPDVIPIYPPIGYSEVGDEFPIDTRKSPYMKSPGNLATFHCLEGYLHGVAGTQGTNKADLFRLDVERAIGLVNKSVDGLKDECMVPGKWRVLKNKGMAQQDDGSWELVDHEIDDNEDLDF

SEQ ID NO: 69668 - protein, 385 aa, Arabidopsis thaliana
  peptide (1)..(385): Ceres Seq. ID no. 1822187
  misc_feature (1)..(385): Homolog of NCBI NO: 15233922 NR Description: lipase-like protein; protein id: At4g18550.1
  misc_feature (1)..(379): Homolog of NCBI NO: 34911830 NR Description: lipase-like protein [Oryza sativa (japonica
  misc_feature (1)..(384): Homolog of NCBI NO: 21537306 NR Description: lipase-like protein [Arabidopsis thaliana]
  misc_feature (1)..(384): Homolog of NCBI NO: 15221426 NR Description: lipase-like protein; protein id: At1g06250.1, by cDNA: 12912. [Arabidopsis thaliana] >gi|25406908|pir||C86198
  misc_feature (1)..(189): Homolog of NCBI NO: 34911870 NR Description: lipase-like protein [Oryza sativa (japonica
  misc_feature (181)..(380): Homolog of NCBI NO: 34911870 NR Description: lipase-like protein [Oryza sativa (japonica
  misc_feature (1)..(384): Homolog of NCBI NO: 34911832 NR Description: lipase-like protein [Oryza sativa (japonica
  misc_feature (1)..(376): Homolog of NCBI NO: 34911842 NR Description: lipase-like protein [Oryza sativa (japonica
  misc_feature (1)..(378): Homolog of NCBI NO: 1527001 NR Description: Ipomoea nil Pn47p
  misc_feature (104)..(372): Homolog of NCBI NO: 15224613 NR Description: putative lipase; protein id: At2g31100.1
MLQPLDQDLREYIIHYGEMAQAGYDTFNINTESQFAGASIYSRKDFFAKVGLEIAHPYTKYKVTKFIYATSDIHVPESFLLFPISREGWSKESNWMGYVAVTDDQGTALLGRRDIVVSWRGSVQPLEWVEDFEFGLVNAIKIFGERNDQVQIHQGWYSIYMSQDERSPFTKTNARDQVLREVGRLLEKYKDEEVSITICGHSLGAALATLSATDIVANGYNRPKSRPDKSCPVTAFVFASPRVGDSDFRKLFSGLEDIRVLRTRNLPDVIPIYPPIGYSEVGDEFPIDTRKSPYMKSPGNLATFHCLEGYLHGVAGTQGTNKADLFRLDVERAIGLVNKSVDGLKDECMVPGKWRVLKNKGMAQQDDGSWELVDHEIDDNEDLDF

SEQ ID NO: 69669 - protein, 367 aa, Arabidopsis thaliana
  peptide (1)..(367): Ceres Seq. ID no. 1822188
  misc_feature (1)..(367): Homolog of NCBI NO: 15233922 NR Description: lipase-like protein; protein id: At4g18550.1
  misc_feature (1)..(361): Homolog of NCBI NO: 34911830 NR Description: lipase-like protein [Oryza sativa (japonica
  misc_feature (1)..(366): Homolog of NCBI NO: 21537306 NR Description: lipase-like protein [Arabidopsis thaliana]
  misc_feature (1)..(366): Homolog of NCBI NO: 15221426 NR Description: lipase-like protein; protein id: At1g06250.1, by cDNA: 12912. [Arabidopsis thaliana] >gi|25406908|pir||C86198
  misc_feature (1)..(171): Homolog of NCBI NO: 34911870 NR Description: lipase-like protein [Oryza sativa (japonica
  misc_feature (163)..(362): Homolog of NCBI NO: 34911870 NR Description: lipase-like protein [Oryza sativa (japonica
  misc_feature (1)..(366): Homolog of NCBI NO: 34911832 NR Description: lipase-like protein [Oryza sativa (japonica
  misc_feature (1)..(358): Homolog of NCBI NO: 34911842 NR Description: lipase-like protein [Oryza sativa (japonica
  misc_feature (1)..(360): Homolog of NCBI NO: 1527001 NR Description: Ipomoea nil Pn47p
  misc_feature (86)..(354): Homolog of NCBI NO: 15224613 NR Description: putative lipase; protein id: At2g31100.1
MAQAGYDTFNINTESQFAGASIYSRKDFFAKVGLEIAHPYTKYKVTKFIYATSDIHVPESFLLFPISREGWSKESNWMGYVAVTDDQGTALLGRRDIVVSWRGSVQPLEWVEDFEFGLVNAIKIFGERNDQVQIHQGWYSIYMSQDERSPFTKTNARDQVLREVGRLLEKYKDEEVSITICGHSLGAALATLSATDIVANGYNRPKSRPDKSCPVTAFVFASPRVGDSDFRKLFSGLEDIRVLRTRNLPDVIPIYPPIGYSEVGDEFPIDTRKSPYMKSPGNLATFHCLEGYLHGVAGTQGTNKADLFRLDVERAIGLVNKSVDGLKDECMVPGKWRVLKNKGMAQQDDGSWELVDHEIDDNEDLDF

SEQ ID NO: 69670 - DNA, 1698 bp, Arabidopsis thaliana
  misc_feature (1)..(1698): Ceres Seq. ID no. 1822197
  misc_feature: MA Experiment ID: 20000439 Result: Down-regulated in Transcription
  misc_feature: MA Experiment 20000439 PARAMETER Experiment Name: At_Roots__P Parameter: Age (day) Value: 14 vs. 21
  misc_feature: MA Experiment 20000439 PARAMETER Experiment Name: At_Roots__P Parameter: Organism Value: A. thaliana
  misc_feature: MA Experiment 20000439 PARAMETER Experiment Name: At_Roots__P Parameter: Tissue Value: Roots vs. Whole Plant
atgttttcgttatcgttaatccaaccgcgtctccggatttcagagattccggtgactcaatcctacaaatctccgacgatatgttacagtagcgattcaagaactaagcgagaggaacagagacacgtgagattacctgggtttcgattagtttctggaaagagagcatctttcgattcgggttttagtggtttcaaaggagagaatgtgaatcaggatgattcgtcttctttcgatagcgaaagagttgattatgctctgttagcggagtggctacagtcttctaatgggatgcgactcattaaaaggatccatgcgatggcgttgaaacttggtgatttggtttatgcacgtaaagtgttcgacagtatgcctgagaaaaatactgttacttggactgctatgattgatgggtatttgaagtatggtcttgaggatgaggcttttgcactgtttgaggattatgtgaagcatggaatacgttttacgaacgagaggatgtttgtgtgtttgttgaatctgtgtagtaggagagcagagtttgagttagggagacaagttcatggtaatatggtgaaagttggagtggggaatctcattgtggagagttctcttgtttatttttatgcgcaatgcggtgaattgacaagtgcgttacgagcttttgatatgatggaggagaaagatgtgatatcttggactgctgttatatcggcgtgttcgagaaaagggcatggaattaaagctataggcatgtttatcggaatgttgaatcactggtttttgcctaacgagtttacggtgtgcagtattttgaaggcttgtagtgaggagaaagcgttaagattcggaaggcaagtacacagcttggttgttaagaggatgataaagacagatgtttttgtgggaacttcgctgatggacatgtatgctaagtgtggggagatttctgattgcagaaaagtgtttgatggaatgagtaatagaaacacggtcacatggacttcgattatagctgctcatgctcgggaaggttttggtgaggaagctatcagcctcttccggataatgaagaggcggcatttgattgctaacaatttgacagtagaacttcatgcacagattatcaagaattcgatcgaaaagaatgtctatataggaagtactttggtgtggctgtattgtaaatgcggagaatctcgtgacgctttcaatgttctccagcaattgccatctagagatgtggtttcatggaccgctatgatctctggatgttcgagcttaggacatgaatcggaagcgctagacttcttgaaagagatgattcaagaaggtgtagagccaaacccatttacatactcctcggctttaaaagcttgtgcgaattcagaatctcttcttatcggtagatcaatccattccattgcaaagaagaatcatgctctatcaaatgtctttgtgggaagtgctttgattcacattatgcctgagaagaacttggtttcatggaaggcgatgataatgggttatgcgaggaatgggttttgcagggaagcattgaagctaatgtatagaatggaggcagagggatttgaagttgatgattatatatttgcaacaattctctctacttgtggagatattgagctcgatgaagctgttgaatcttctgcaacttgttacttggagacatcttga

SEQ ID NO: 69671 - protein, 565 aa, Arabidopsis thaliana
  peptide (1)..(565): Ceres Seq. ID no. 1822198
  misc_feature (231)..(265): Pfam Name: PPR repeat Pfam Description: PPR repeat
  misc_feature (1)..(565): Homolog of NCBI NO: 7486295 NR Description: hypothetical protein F28J12.180 - Arabidopsis >gi|2832657|emb|CAA16732.1| putative protein [Arabidopsis >gi|7268645|emb|CAB78854.1| putative protein [Arabidopsis
  misc_feature (1)..(565): Homolog of NCBI NO: 30684439 NR Description: pentatricopeptide (PPR) repeat-containing protein
  misc_feature (117)..(379): Homolog of NCBI NO: 34915012 NR Description: P0458A05.10 [Oryza sativa (japonica
  misc_feature (343)..(545): Homolog of NCBI NO: 34915012 NR Description: P0458A05.10 [Oryza sativa (japonica
  misc_feature (112)..(359): Homolog of NCBI NO: 37536800 NR Description: putative PPR-repeat protein [Oryza sativa
  misc_feature (371)..(550): Homolog of NCBI NO: 37536800 NR Description: putative PPR-repeat protein [Oryza sativa
  misc_feature (110)..(402): Homolog of NCBI NO: 15231572 NR Description: hypothetical protein; protein id: At3g26540.1
  misc_feature (370)..(561): Homolog of NCBI NO: 15231572 NR Description: hypothetical protein; protein id: At3g26540.1
  misc_feature (115)..(419): Homolog of NCBI NO: 15232885 NR Description: hypothetical protein; protein id: At3g02330.1
  misc_feature (416)..(555): Homolog of NCBI NO: 15232885 NR Description: hypothetical protein; protein id: At3g02330.1
MFSLSLIQPRLRISEIPVTQSYKSPTICYSSDSRTKREEQRHVRLPGFRLVSGKRASFDSGFSGFKGENVNQDDSSSFDSERVDYALLAEWLQSSNGMRLIKRIHAMALKLGDLVYARKVFDSMPEKNTVTWTAMIDGYLKYGLEDEAFALFEDYVKHGIRFTNERMFVCLLNLCSRRAEFELGRQVHGNMVKVGVGNLIVESSLVYFYAQCGELTSALRAFDMMEEKDVISWTAVISACSRKGHGIKAIGMFIGMLNHWFLPNEFTVCSILKACSEEKALRFGRQVHSLVVKRMIKTDVFVGTSLMDMYAKCGEISDCRKVFDGMSNRNTVTWTSIIAAHAREGFGEEAISLFRIMKRRHLIANNLTVELHAQIIKNSIEKNVYIGSTLVWLYCKCGESRDAFNVLQQLPSRDVVSWTAMISGCSSLGHESEALDFLKEMIQEGVEPNPFTYSSALKACANSESLLIGRSIHSIAKKNHALSNVFVGSALIHIMPEKNLVSWKAMIMGYARNGFCREALKLMYRMEAEGFEVDDYIFATILSTCGDIELDEAVESSATCYLETS

SEQ ID NO: 69672 - protein, 468 aa, Arabidopsis thaliana
  peptide (1)..(468): Ceres Seq. ID no. 1822199
  misc_feature (134)..(168): Pfam Name: PPR repeat Pfam Description: PPR repeat
  misc_feature (1)..(468): Homolog of NCBI NO: 7486295 NR Description: hypothetical protein F28J12.180 - Arabidopsis >gi|2832657|emb|CAA16732.1| putative protein [Arabidopsis >gi|7268645|emb|CAB78854.1| putative protein [Arabidopsis
  misc_feature (1)..(468): Homolog of NCBI NO: 30684439 NR Description: pentatricopeptide (PPR) repeat-containing protein
  misc_feature (20)..(282): Homolog of NCBI NO: 34915012 NR Description: P0458A05.10 [Oryza sativa (japonica
  misc_feature (246)..(448): Homolog of NCBI NO: 34915012 NR Description: P0458A05.10 [Oryza sativa (japonica
  misc_feature (15)..(262): Homolog of NCBI NO: 37536800 NR Description: putative PPR-repeat protein [Oryza sativa
  misc_feature (274)..(453): Homolog of NCBI NO: 37536800 NR Description: putative PPR-repeat protein [Oryza sativa
  misc_feature (13)..(305): Homolog of NCBI NO: 15231572 NR Description: hypothetical protein; protein id: At3g26540.1
  misc_feature (273)..(464): Homolog of NCBI NO: 15231572 NR Description: hypothetical protein; protein id: At3g26540.1
  misc_feature (18)..(322): Homolog of NCBI NO: 15232885 NR Description: hypothetical protein; protein id: At3g02330.1
  misc_feature (319)..(458): Homolog of NCBI NO: 15232885 NR Description: hypothetical protein; protein id: At3g02330.1
MRLIKRIHAMALKLGDLVYARKVFDSMPEKNTVTWTAMIDGYLKYGLEDEAFALFEDYVKHGIRFTNERMFVCLLNLCSRRAEFELGRQVHGNMVKVGVGNLIVESSLVYFYAQCGELTSALRAFDMMEEKDVISWTAVISACSRKGHGIKAIGMFIGMLNHWFLPNEFTVCSILKACSEEKALRFGRQVHSLVVKRMIKTDVFVGTSLMDMYAKCGEISDCRKVFDGMSNRNTVTWTSIIAAHAREGFGEEAISLFRIMKRRHLIANNLTVELHAQIIKNSIEKNVYIGSTLVWLYCKCGESRDAFNVLQQLPSRDVVSWTAMISGCSSLGHESEALDFLKEMIQEGVEPNPFTYSSALKACANSESLLIGRSIHSIAKKNHALSNVFVGSALIHIMPEKNLVSWKAMIMGYARNGFCREALKLMYRMEAEGFEVDDYIFATILSTCGDIELDEAVESSATCYLETS

SEQ ID NO: 69673 - protein, 459 aa, Arabidopsis thaliana
  peptide (1)..(459): Ceres Seq. ID no. 1822200
  misc_feature (125)..(159): Pfam Name: PPR repeat Pfam Description: PPR repeat
  misc_feature (1)..(459): Homolog of NCBI NO: 7486295 NR Description: hypothetical protein F28J12.180 - Arabidopsis >gi|2832657|emb|CAA16732.1| putative protein [Arabidopsis >gi|7268645|emb|CAB78854.1| putative protein [Arabidopsis
  misc_feature (1)..(459): Homolog of NCBI NO: 30684439 NR Description: pentatricopeptide (PPR) repeat-containing protein
  misc_feature (11)..(273): Homolog of NCBI NO: 34915012 NR Description: P0458A05.10 [Oryza sativa (japonica
  misc_feature (237)..(439): Homolog of NCBI NO: 34915012 NR Description: P0458A05.10 [Oryza sativa (japonica
  misc_feature (6)..(253): Homolog of NCBI NO: 37536800 NR Description: putative PPR-repeat protein [Oryza sativa
  misc_feature (265)..(444): Homolog of NCBI NO: 37536800 NR Description: putative PPR-repeat protein [Oryza sativa
  misc_feature (4)..(296): Homolog of NCBI NO: 15231572 NR Description: hypothetical protein; protein id: At3g26540.1
  misc_feature (264)..(455): Homolog of NCBI NO: 15231572 NR Description: hypothetical protein; protein id: At3g26540.1
  misc_feature (9)..(313): Homolog of NCBI NO: 15232885 NR Description: hypothetical protein; protein id: At3g02330.1
  misc_feature (310)..(449): Homolog of NCBI NO: 15232885 NR Description: hypothetical protein; protein id: At3g02330.1
MALKLGDLVYARKVFDSMPEKNTVTWTAMIDGYLKYGLEDEAFALFEDYVKHGIRFTNERMFVCLLNLCSRRAEFELGRQVHGNMVKVGVGNLIVESSLVYFYAQCGELTSALRAFDMMEEKDVISWTAVISACSRKGHGIKAIGMFIGMLNHWFLPNEFTVCSILKACSEEKALRFGRQVHSLVVKRMIKTDVFVGTSLMDMYAKCGEISDCRKVFDGMSNRNTVTWTSIIAAHAREGFGEEAISLFRIMKRRHLIANNLTVELHAQIIKNSIEKNVYIGSTLVWLYCKCGESRDAFNVLQQLPSRDVVSWTAMISGCSSLGHESEALDFLKEMIQEGVEPNPFTYSSALKACANSESLLIGRSIHSIAKKNHALSNVFVGSALIHIMPEKNLVSWKAMIMGYARNGFCREALKLMYRMEAEGFEVDDYIFATILSTCGDIELDEAVESSATCYLETS

SEQ ID NO: 69674 - DNA, 1170 bp, Arabidopsis thaliana
  misc_feature (1)..(1170): Ceres Seq. ID no. 1822330
  misc_feature: MA Experiment ID: 20000437 Result: Up-regulated in Transcription
  misc_feature: MA Experiment 20000437 PARAMETER Experiment Name: At_Drought_P Parameter: Age (day) Value: 8
  misc_feature: MA Experiment 20000437 PARAMETER Experiment Name: At_Drought_P Parameter: Organism Value: A. thaliana
  misc_feature: MA Experiment 20000437 PARAMETER Experiment Name: At_Drought_P Parameter: Plant Line Value: WS
  misc_feature: MA Experiment 20000437 PARAMETER Experiment Name: At_Drought_P Parameter: Timepoint (hr) Value: 24
  misc_feature: MA Experiment 20000437 PARAMETER Experiment Name: At_Drought_P Parameter: Tissue Value: Whole Plant
  misc_feature: MA Experiment 20000437 PARAMETER Experiment Name: At_Drought_P Parameter: Treatment Value: Drought vs. No Drought
  misc_feature: MA Experiment ID: 20001905 Result: Up-regulated in Transcription
  misc_feature: MA Experiment 20001905 PARAMETER Experiment Name: At_Drought_Reproduction_P Parameter: Age (day) Value: 40
  misc_feature: MA Experiment 20001905 PARAMETER Experiment Name: At_Drought_Reproduction_P Parameter: Organism Value: A. thaliana
  misc_feature: MA Experiment 20001905 PARAMETER Experiment Name: At_Drought_Reproduction_P Parameter: Plant Line Value: WS
  misc_feature: MA Experiment 20001905 PARAMETER Experiment Name: At_Drought_Reproduction_P Parameter: Timepoint (day) Value: 10
  misc_feature: MA Experiment 20001905 PARAMETER Experiment Name: At_Drought_Reproduction_P Parameter: Tissue Value: Rosettes
  misc_feature: MA Experiment 20001905 PARAMETER Experiment Name: At_Drought_Reproduction_P Parameter: Treatment Value: Drought vs. No Drought
atgtcactcctcaaaagtagaaatcgttcttcgaatataaatctgcagtttagatgtgtgattatatgtttgcgcattggcatcattcctagaaatgtgactgtagatgctgctgctgctgctattaattttaatgaacactctaatatgtacagtcagaacgggaagttcagctatggatatgcaagctctcccggtaaaagatcttctatggaggacttctatgaaactaggatcgacggcgttgaaggggaaatagttggtctatttggagtctttgatggacatggaggtgcacgtgcagctgaatatgtgaagcaaaatctcttcagtaacctgatcaggcatccaaagttcatctctgataccacagctgcaatagctgatgcatacaaccaaacagactcagagtttcttaaatcagaaaatagtcagaacagagatgctggttcaacggcgtcaacagccatcttagttggtgaccgtttacttgttgcaaatgtaggggactctagagctgtaatatgcagaggtggcaatgctattgctgtatcccgagatcacaagcctgatcaaagtgacgagcgccaaagaattgaggatgcaggaggatttgtcatgtgggctggaacatggagagttggaggagttcttgctgtttctcgtgcatttggcgataggttgttgaagcagtatgttgttgctgatccggagatacaggtattgactttttgccaaaatctcctcctatatattaaaaatgccactttgttattaacaattgaacataacctgcattggatttcaatagttagctacttgaatggcactttacaaaacttccttcgttcactcattagcataaatggaaaatttcaggaggaaaaagttgatagctctctcgagtttctcattcttgcaagtgatggtctctgggacgttgtatctaacgaggaagccgtaggcatgatcaaggcgatagaagatcccgaggaaggtgcaaagagactgatgatggaagcttaccaaagaggaagtgcagacaacataacttgtgtcgtcgtacgtttcttttcagaccaagcaggaggaataggttccagcagcaccaatatcccaatagatcatggtatcgtacctgaccgaatctccggtgactcatcaacctag

SEQ ID NO: 69675 - protein, 389 aa, Arabidopsis thaliana
  peptide (1)..(389): Ceres Seq. ID no. 1822331
  misc_feature (57)..(350): Pfam Name: Protein phosphatase 2C Pfam Description: Protein phosphatase 2C
  misc_feature (52)..(240): Homolog of NCBI NO: 18416366 NR Description: protein phosphatase 2C -like protein; protein id:
  misc_feature (282)..(370): Homolog of NCBI NO: 18416366 NR Description: protein phosphatase 2C -like protein; protein id:
  misc_feature (52)..(240): Homolog of NCBI NO: 30689144 NR Description: protein phosphatase 2C (PP2C), putative thaliana] >gi|19347765|gb|AAL86334.1| unknown protein thaliana] >gi|22136752|gb|AAM91695.1| unknown protein
  misc_feature (52)..(240): Homolog of NCBI NO: 20146110 NR Description: protein phosphatase 2C [Mesembryanthemum
  misc_feature (52)..(240): Homolog of NCBI NO: 15238651 NR Description: Protein phosphatase 2C-like protein; protein id:
  misc_feature (282)..(387): Homolog of NCBI NO: 15238651 NR Description: Protein phosphatase 2C-like protein; protein id:
  misc_feature (282)..(389): Homolog of NCBI NO: 20146110 NR Description: protein phosphatase 2C [Mesembryanthemum
  misc_feature (282)..(389): Homolog of NCBI NO: 30689144 NR Description: protein phosphatase 2C (PP2C), putative thaliana] >gi|19347765|gb|AAL86334.1| unknown protein thaliana] >gi|22136752|gb|AAM91695.1| unknown protein
  misc_feature (1)..(389): Homolog of NCBI NO: 7486331 NR Description: hypothetical protein F28M20.60 - Arabidopsis >gi|3281853|emb|CAA19748.1| putative protein [Arabidopsis >gi|7270078|emb|CAB79893.1| putative protein [Arabidopsis
  misc_feature (52)..(240): Homolog of NCBI NO: 38345197 NR Description: OSJNBa0015K02.7 [Oryza sativa (japonica
MSLLKSRNRSSNINLQFRCVIICLRIGIIPRNVTVDAAAAAINFNEHSNMYSQNGKFSYGYASSPGKRSSMEDFYETRIDGVEGEIVGLFGVFDGHGGARAAEYVKQNLFSNLIRHPKFISDTTAAIADAYNQTDSEFLKSENSQNRDAGSTASTAILVGDRLLVANVGDSRAVICRGGNAIAVSRDHKPDQSDERQRIEDAGGFVMWAGTWRVGGVLAVSRAFGDRLLKQYVVADPEIQVLTFCQNLLLYIKNATLLLTIEHNLHWISIVSYLNGTLQNFLRSLISINGKFQEEKVDSSLEFLILASDGLWDVVSNEEAVGMIKAIEDPEEGAKRLMMEAYQRGSADNITCVVVRFFSDQAGGIGSSSTNIPIDHGIVPDRISGDSST

SEQ ID NO: 69676 - protein, 340 aa, Arabidopsis thaliana
  peptide (1)..(340): Ceres Seq. ID no. 1822332
  misc_feature (8)..(301): Pfam Name: Protein phosphatase 2C Pfam Description: Protein phosphatase 2C
  misc_feature (1)..(340): Homolog of NCBI NO: 7486331 NR Description: hypothetical protein F28M20.60 - Arabidopsis >gi|3281853|emb|CAA19748.1| putative protein [Arabidopsis >gi|7270078|emb|CAB79893.1| putative protein [Arabidopsis
  misc_feature (3)..(191): Homolog of NCBI NO: 30689144 NR Description: protein phosphatase 2C (PP2C), putative thaliana] >gi|19347765|gb|AAL86334.1| unknown protein thaliana] >gi|22136752|gb|AAM91695.1| unknown protein
  misc_feature (233)..(340): Homolog of NCBI NO: 30689144 NR Description: protein phosphatase 2C (PP2C), putative thaliana] >gi|19347765|gb|AAL86334.1| unknown protein thaliana] >gi|22136752|gb|AAM91695.1| unknown protein
  misc_feature (3)..(191): Homolog of NCBI NO: 20146110 NR Description: protein phosphatase 2C [Mesembryanthemum
  misc_feature (233)..(340): Homolog of NCBI NO: 20146110 NR Description: protein phosphatase 2C [Mesembryanthemum
  misc_feature (3)..(191): Homolog of NCBI NO: 15238651 NR Description: Protein phosphatase 2C-like protein; protein id:
  misc_feature (233)..(338): Homolog of NCBI NO: 15238651 NR Description: Protein phosphatase 2C-like protein; protein id:
  misc_feature (3)..(191): Homolog of NCBI NO: 18416366 NR Description: protein phosphatase 2C -like protein; protein id:
  misc_feature (233)..(321): Homolog of NCBI NO: 18416366 NR Description: protein phosphatase 2C -like protein; protein id:
  misc_feature (3)..(191): Homolog of NCBI NO: 38345197 NR Description: OSJNBa0015K02.7 [Oryza sativa (japonica
MYSQNGKFSYGYASSPGKRSSMEDFYETRIDGVEGEIVGLFGVFDGHGGARAAEYVKQNLFSNLIRHPKFISDTTAAIADAYNQTDSEFLKSENSQNRDAGSTASTAILVGDRLLVANVGDSRAVICRGGNAIAVSRDHKPDQSDERQRIEDAGGFVMWAGTWRVGGVLAVSRAFGDRLLKQYVVADPEIQVLTFCQNLLLYIKNATLLLTIEHNLHWISIVSYLNGTLQNFLRSLISINGKFQEEKVDSSLEFLILASDGLWDVVSNEEAVGMIKAIEDPEEGAKRLMMEAYQRGSADNITCVVVRFFSDQAGGIGSSSTNIPIDHGIVPDRISGDSST

SEQ ID NO: 69677 - protein, 319 aa, Arabidopsis thaliana
  peptide (1)..(319): Ceres Seq. ID no. 1822333
  misc_feature (1)..(280): Pfam Name: Protein phosphatase 2C Pfam Description: Protein phosphatase 2C
  misc_feature (1)..(319): Homolog of NCBI NO: 7486331 NR Description: hypothetical protein F28M20.60 - Arabidopsis >gi|3281853|emb|CAA19748.1| putative protein [Arabidopsis >gi|7270078|emb|CAB79893.1| putative protein [Arabidopsis
  misc_feature (1)..(170): Homolog of NCBI NO: 30689144 NR Description: protein phosphatase 2C (PP2C), putative thaliana] >gi|19347765|gb|AAL86334.1| unknown protein thaliana] >gi|22136752|gb|AAM91695.1| unknown protein
  misc_feature (212)..(319): Homolog of NCBI NO: 30689144 NR Description: protein phosphatase 2C (PP2C), putative thaliana] >gi|19347765|gb|AAL86334.1| unknown protein thaliana] >gi|22136752|gb|AAM91695.1| unknown protein
  misc_feature (1)..(170): Homolog of NCBI NO: 20146110 NR Description: protein phosphatase 2C [Mesembryanthemum
  misc_feature (212)..(319): Homolog of NCBI NO: 20146110 NR Description: protein phosphatase 2C [Mesembryanthemum
  misc_feature (1)..(170): Homolog of NCBI NO: 15238651 NR Description: Protein phosphatase 2C-like protein; protein id:
  misc_feature (212)..(317): Homolog of NCBI NO: 15238651 NR Description: Protein phosphatase 2C-like protein; protein id:
  misc_feature (1)..(170): Homolog of NCBI NO: 18416366 NR Description: protein phosphatase 2C -like protein; protein id:
  misc_feature (212)..(300): Homolog of NCBI NO: 18416366 NR Description: protein phosphatase 2C -like protein; protein id:
  misc_feature (1)..(170): Homolog of NCBI NO: 38345197 NR Description: OSJNBa0015K02.7 [Oryza sativa (japonica
MEDFYETRIDGVEGEIVGLFGVFDGHGGARAAEYVKQNLFSNLIRHPKFISDTTAAIADAYNQTDSEFLKSENSQNRDAGSTASTAILVGDRLLVANVGDSRAVICRGGNAIAVSRDHKPDQSDERQRIEDAGGFVMWAGTWRVGGVLAVSRAFGDRLLKQYVVADPEIQVLTFCQNLLLYIKNATLLLTIEHNLHWISIVSYLNGTLQNFLRSLISINGKFQEEKVDSSLEFLILASDGLWDVVSNEEAVGMIKAIEDPEEGAKRLMMEAYQRGSADNITCVVVRFFSDQAGGIGSSSTNIPIDHGIVPDRISGDSST

SEQ ID NO: 69678 - DNA, 1464 bp, Arabidopsis thaliana
  misc_feature (1)..(1464): Ceres Seq. ID no. 1822921
  misc_feature: MA Experiment ID: 20000179 Result: Up-regulated in Transcription
  misc_feature: MA Experiment 20000179 PARAMETER Experiment Name: At_Germinating_Seeds_P Parameter: Age (hr) Value: 6 vs. 0
  misc_feature: MA Experiment 20000179 PARAMETER Experiment Name: At_Germinating_Seeds_P Parameter: Tissue Value: Germinating Seeds
  misc_feature: MA Experiment ID: 20000264 Result: Up-regulated in Transcription
  misc_feature: MA Experiment 20000264 PARAMETER Experiment Name: At_Open_Flower_P Parameter: Age (day) Value: 21
  misc_feature: MA Experiment 20000264 PARAMETER Experiment Name: At_Open_Flower_P Parameter: Plant Line Value: WS
  misc_feature: MA Experiment 20000264 PARAMETER Experiment Name: At_Open_Flower_P Parameter: Tissue Value: Open Flower vs. Whole Plant
  misc_feature: MA Experiment ID: 20000265 Result: Up-regulated in Transcription
  misc_feature: MA Experiment 20000265 PARAMETER Experiment Name: At_Open_Flower_P Parameter: Age (day) Value: 21
  misc_feature: MA Experiment 20000265 PARAMETER Experiment Name: At_Open_Flower_P Parameter: Plant Line Value: WS
  misc_feature: MA Experiment 20000265 PARAMETER Experiment Name: At_Open_Flower_P Parameter: Tissue Value: Closed Flower vs. Whole Plant
  misc_feature: MA Experiment ID: 20000286 Result: Up-regulated in Transcription
  misc_feature: MA Experiment 20000286 PARAMETER Experiment Name: At_Open_Flower_P Parameter: Age (day) Value: 21
  misc_feature: MA Experiment 20000286 PARAMETER Experiment Name: At_Open_Flower_P Parameter: Plant Line Value: WS
  misc_feature: MA Experiment 20000286 PARAMETER Experiment Name: At_Open_Flower_P Parameter: Tissue Value: Half Open vs. Whole Plant
  misc_feature: MA Experiment ID: 20000437 Result: Down-regulated in Transcription
  misc_feature: MA Experiment 20000437 PARAMETER Experiment Name: At_Drought_P Parameter: Age (day) Value: 8
  misc_feature: MA Experiment 20000437 PARAMETER Experiment Name: At_Drought_P Parameter: Organism Value: A. thaliana
  misc_feature: MA Experiment 20000437 PARAMETER Experiment Name: At_Drought_P Parameter: Plant Line Value: WS
  misc_feature: MA Experiment 20000437 PARAMETER Experiment Name: At_Drought_P Parameter: Timepoint (hr) Value: 24
  misc_feature: MA Experiment 20000437 PARAMETER Experiment Name: At_Drought_P Parameter: Tissue Value: Whole Plant
  misc_feature: MA Experiment 20000437 PARAMETER Experiment Name: At_Drought_P Parameter: Treatment Value: Drought vs. No Drought
atggagatggatgaagatatggaaatcgagccaatggtgtttgaggttaaagagatcgatctggagtacgaatttgatgcggcgaggtggtacgattttactcgggaagagttaccggaggagtctcaagccgctgagttctggtttcactctgctccgtcgtacgctccttctccttttgtaacaaaactgttactaagagaggaggtttatgatgacaagacggaggcatctacgagatcagaggatgaggaagtcgttgcagatgtttgtgataagtataaaggaacctttcagcaaccaaatcatttagccacagattttaataagacaggaagtagaatgcgttctgggattttttcctcccaacaacaacaaggttgtaatttgaagaaagttccaaatcagcccatatggaaagggccgacggttagcaatcacaaacacactgataaaccaaaattccgagctaagtcaagcatcagaccaactccaaggagctcaacattaatgagacctactgctagccaattagcaaaacaaaataatgccagtaaattccatatgcaagtggatcaaagtcatgataaaggaagttgtgggacatctgggactgaagttcaagcgtctaaaagacagaagcttgatggaggtcttcttcgtaaggttgctgatacaaagcaggaaatgagttttgtccacaagatccccaagaaggatacaactcttgataaaaacgctcaacatgccaggacaaagattactatcccacaggagcctgattttgctacatcacagagggctcacaggatacggcacaagaatgatgcgaagttagaacaagagcaaccagctgtatatagattcaaagcacgtccatttaaccgaaagatatttgatgctccttcattgcccatccggaaaaagagcactccgaaactaccagaattccaagaatttcatttgaagacttcagaaagggctatgcaacattcatcagcagtaacaacacggtctcatgcgtataaggagtcagacaaatctattataactgatatgcttgacggtgataacagagaaagtaggagaccaagcggtatggatatatctaagcatgatgtctcagaaggaagtcacgtttttaaagctcgtcctctgaacaagaagatactttcaagcagaggagacatgggcattttcaaaaatagcaagcgagaaacaacagtacctttggtatggcagtcttaccaattattctttgcacttgatcttctgctctccataaaatccgagatacagccaaacgatggatctcgcacaagattatttcaaccaaaggtaacaagaatggcagcggcaaaaccagtctcttcagctggacaacaaatgcaatttggtaatagtggaataactcctgaaacaaaccagcaatggacagctaggaggaacttaggcattcgctga

SEQ ID NO: 69679 - protein, 487 aa, Arabidopsis thaliana
  peptide (1)..(487): Ceres Seq. ID no. 1822922
  misc_feature (1)..(487): Homolog of NCBI NO: 7486581 NR Description: hypothetical protein F7H19.40 - Arabidopsis >gi|3292811|emb|CAA19801.1| hypothetical protein [Arabidopsis >gi|7269133|emb|CAB79241.1| hypothetical protein [Arabidopsis
  misc_feature (1)..(487): Homolog of NCBI NO: 30685961 NR Description: expressed protein [Arabidopsis thaliana]
  misc_feature (2)..(413): Homolog of NCBI NO: 15234384 NR Description: putative protein; protein id: At4g11990.1
  misc_feature (219)..(339): Homolog of NCBI NO: 34395225 NR Description: unknown protein [Oryza sativa (japonica
  misc_feature (19)..(113): Homolog of NCBI NO: 34395225 NR Description: unknown protein [Oryza sativa (japonica
  misc_feature (221)..(410): Homolog of NCBI NO: 30678673 NR Description: expressed protein [Arabidopsis thaliana]
  misc_feature (19)..(89): Homolog of NCBI NO: 30678673 NR Description: expressed protein [Arabidopsis thaliana]
  misc_feature (221)..(410): Homolog of NCBI NO: 25406742 NR Description: hypothetical protein [imported] - Arabidopsis >gi|4204309|gb|AAD10690.1| Hypothetical protein [Arabidopsis
  misc_feature (19)..(89): Homolog of NCBI NO: 25406742 NR Description: hypothetical protein [imported] - Arabidopsis >gi|4204309|gb|AAD10690.1| Hypothetical protein [Arabidopsis
  misc_feature (18)..(138): Homolog of NCBI NO: 8809637 NR Description: emb|CAB87273.1~gene_id:MMI9.7~similar to unknown
MEMDEDMEIEPMVFEVKEIDLEYEFDAARWYDFTREELPEESQAAEFWFHSAPSYAPSPFVTKLLLREEVYDDKTEASTRSEDEEVVADVCDKYKGTFQQPNHLATDFNKTGSRMRSGIFSSQQQQGCNLKKVPNQPIWKGPTVSNHKHTDKPKFRAKSSIRPTPRSSTLMRPTASQLAKQNNASKFHMQVDQSHDKGSCGTSGTEVQASKRQKLDGGLLRKVADTKQEMSFVHKIPKKDTTLDKNAQHARTKITIPQEPDFATSQRAHRIRHKNDAKLEQEQPAVYRFKARPFNRKIFDAPSLPIRKKSTPKLPEFQEFHLKTSERAMQHSSAVTTRSHAYKESDKSIITDMLDGDNRESRRPSGMDISKHDVSEGSHVFKARPLNKKILSSRGDMGIFKNSKRETTVPLVWQSYQLFFALDLLLSIKSEIQPNDGSRTRLFQPKVTRMAAAKPVSSAGQQMQFGNSGITPETNQQWTARRNLGIR

SEQ ID NO: 69680 - protein, 485 aa, Arabidopsis thaliana
  peptide (1)..(485): Ceres Seq. ID no. 1822923
  misc_feature (1)..(485): Homolog of NCBI NO: 7486581 NR Description: hypothetical protein F7H19.40 - Arabidopsis >gi|3292811|emb|CAA19801.1| hypothetical protein [Arabidopsis >gi|7269133|emb|CAB79241.1| hypothetical protein [Arabidopsis
  misc_feature (1)..(485): Homolog of NCBI NO: 30685961 NR Description: expressed protein [Arabidopsis thaliana]
  misc_feature (1)..(411): Homolog of NCBI NO: 15234384 NR Description: putative protein; protein id: At4g11990.1
  misc_feature (217)..(337): Homolog of NCBI NO: 34395225 NR Description: unknown protein [Oryza sativa (japonica
  misc_feature (17)..(111): Homolog of NCBI NO: 34395225 NR Description: unknown protein [Oryza sativa (japonica
  misc_feature (219)..(408): Homolog of NCBI NO: 30678673 NR Description: expressed protein [Arabidopsis thaliana]
  misc_feature (17)..(87): Homolog of NCBI NO: 30678673 NR Description: expressed protein [Arabidopsis thaliana]
  misc_feature (219)..(408): Homolog of NCBI NO: 25406742 NR Description: hypothetical protein [imported] - Arabidopsis >gi|4204309|gb|AAD10690.1| Hypothetical protein [Arabidopsis
  misc_feature (17)..(87): Homolog of NCBI NO: 25406742 NR Description: hypothetical protein [imported] - Arabidopsis >gi|4204309|gb|AAD10690.1| Hypothetical protein [Arabidopsis
  misc_feature (16)..(136): Homolog of NCBI NO: 8809637 NR Description: emb|CAB87273.1~gene_id:MMI9.7~similar to unknown
MDEDMEIEPMVFEVKEIDLEYEFDAARWYDFTREELPEESQAAEFWFHSAPSYAPSPFVTKLLLREEVYDDKTEASTRSEDEEVVADVCDKYKGTFQQPNHLATDFNKTGSRMRSGIFSSQQQQGCNLKKVPNQPIWKGPTVSNHKHTDKPKFRAKSSIRPTPRSSTLMRPTASQLAKQNNASKFHMQVDQSHDKGSCGTSGTEVQASKRQKLDGGLLRKVADTKQEMSFVHKIPKKDTTLDKNAQHARTKITIPQEPDFATSQRAHRIRHKNDAKLEQEQPAVYRFKARPFNRKIFDAPSLPIRKKSTPKLPEFQEFHLKTSERAMQHSSAVTTRSHAYKESDKSIITDMLDGDNRESRRPSGMDISKHDVSEGSHVFKARPLNKKILSSRGDMGIFKNSKRETTVPLVWQSYQLFFALDLLLSIKSEIQPNDGSRTRLFQPKVTRMAAAKPVSSAGQQMQFGNSGITPETNQQWTARRNLGIR

SEQ ID NO: 69681 - protein, 481 aa, Arabidopsis thaliana
  peptide (1)..(481): Ceres Seq. ID no. 1822924
  misc_feature (1)..(481): Homolog of NCBI NO: 7486581 NR Description: hypothetical protein F7H19.40 - Arabidopsis >gi|3292811|emb|CAA19801.1| hypothetical protein [Arabidopsis >gi|7269133|emb|CAB79241.1| hypothetical protein [Arabidopsis
  misc_feature (1)..(481): Homolog of NCBI NO: 30685961 NR Description: expressed protein [Arabidopsis thaliana]
  misc_feature (1)..(407): Homolog of NCBI NO: 15234384 NR Description: putative protein; protein id: At4g11990.1
  misc_feature (213)..(333): Homolog of NCBI NO: 34395225 NR Description: unknown protein [Oryza sativa (japonica
  misc_feature (13)..(107): Homolog of NCBI NO: 34395225 NR Description: unknown protein [Oryza sativa (japonica
  misc_feature (215)..(404): Homolog of NCBI NO: 30678673 NR Description: expressed protein [Arabidopsis thaliana]
  misc_feature (13)..(83): Homolog of NCBI NO: 30678673 NR Description: expressed protein [Arabidopsis thaliana]
  misc_feature (215)..(404): Homolog of NCBI NO: 25406742 NR Description: hypothetical protein [imported] - Arabidopsis >gi|4204309|gb|AAD10690.1| Hypothetical protein [Arabidopsis
  misc_feature (13)..(83): Homolog of NCBI NO: 25406742 NR Description: hypothetical protein [imported] - Arabidopsis >gi|4204309|gb|AAD10690.1| Hypothetical protein [Arabidopsis
  misc_feature (12)..(132): Homolog of NCBI NO: 8809637 NR Description: emb|CAB87273.1~gene_id:MMI9.7~similar to unknown
MEIEPMVFEVKEIDLEYEFDAARWYDFTREELPEESQAAEFWFHSAPSYAPSPFVTKLLLREEVYDDKTEASTRSEDEEVVADVCDKYKGTFQQPNHLATDFNKTGSRMRSGIFSSQQQQGCNLKKVPNQPIWKGPTVSNHKHTDKPKFRAKSSIRPTPRSSTLMRPTASQLAKQNNASKFHMQVDQSHDKGSCGTSGTEVQASKRQKLDGGLLRKVADTKQEMSFVHKIPKKDTTLDKNAQHARTKITIPQEPDFATSQRAHRIRHKNDAKLEQEQPAVYRFKARPFNRKIFDAPSLPIRKKSTPKLPEFQEFHLKTSERAMQHSSAVTTRSHAYKESDKSIITDMLDGDNRESRRPSGMDISKHDVSEGSHVFKARPLNKKILSSRGDMGIFKNSKRETTVPLVWQSYQLFFALDLLLSIKSEIQPNDGSRTRLFQPKVTRMAAAKPVSSAGQQMQFGNSGITPETNQQWTARRNLGIR

SEQ ID NO: 69682 - DNA, 882 bp, Arabidopsis thaliana
  misc_feature (1)..(882): Ceres Seq. ID no. 1822951
  misc_feature: MA Experiment ID: 20000185 Result: Up-regulated in Transcription
  misc_feature: MA Experiment 20000185 PARAMETER Experiment Name: At_Roots__P Parameter: Age (day) Value: 7 vs. 21
  misc_feature: MA Experiment 20000185 PARAMETER Experiment Name: At_Roots__P Parameter: Organism Value: A. thaliana
  misc_feature: MA Experiment 20000185 PARAMETER Experiment Name: At_Roots__P Parameter: Tissue Value: Roots vs. Whole Plant
  misc_feature: MA Experiment ID: 20000439 Result: Up-regulated in Transcription
  misc_feature: MA Experiment 20000439 PARAMETER Experiment Name: At_Roots__P Parameter: Age (day) Value: 14 vs. 21
  misc_feature: MA Experiment 20000439 PARAMETER Experiment Name: At_Roots__P Parameter: Organism Value: A. thaliana
  misc_feature: MA Experiment 20000439 PARAMETER Experiment Name: At_Roots__P Parameter: Tissue Value: Roots vs. Whole Plant
atggatccaccattcaacgaaatatacaataaccttttgtataatcagatcacaaagaaagataacgatgtttctgaaataccctttagcttctcagtcacagccgtcgtcgaggaggtggagcttcctgtgattgacgtcagccgtttgattgatggagccgaggaggagagagagaaatgtaaggaagcgattgcgagagcttcgagggagtggggattttttcaagtgataaaccatggaatatcaatggatgtgttggagaagatgagacaagagcaaattagggtctttagagagccttttgacaagaaaagtaactcaacaatggagaaatttgcttcggaatcagaggcattagcatatatgttggcagaggttcttgcagaaaaatctggacaaaattcaagtttcttcaaagaaaactgtgtgagaaatacatgttatctaaggatgaaccgatatccaccttgtcccaaaccatcggaggtgtacggattaatgccacacacggacagtgatttcctcacaatcttgtatcaagatcaagtcggaggactccaacttatcaaagacaatagatggatcgctgttaaacctaatcctaaagctctcattatcaatattggtgacttatttcaggcatggagcaatggcatgtacaaaagtgttgaacaccgtgtgatgacgaacccaaaggtggagagattctcaacggcttattttatgtgtccatcatacgacgccgttatagagtgttcaagtgatcgtcctgcttatagaaatttcagcttcagagaattcagacaacaagttcaagaagatgttaagaagtttggttttaaagttggccttcctaggttccttaatcacgtctactaa

SEQ ID NO: 69683 - protein, 293 aa, Arabidopsis thaliana
  peptide (1)..(293): Ceres Seq. ID no. 1822952
  misc_feature (146)..(245): Pfam Name: 2OG-Fe(II) oxygenase superfamily Pfam Description: 2OG-Fe(II) oxygenase superfamily
  misc_feature (1)..(293): Homolog of NCBI NO: 15233553 NR Description: gibberellin 20-oxidase - like protein; protein At4g21200.1 [Arabidopsis thaliana] >gi|7433237|pir||T04951
  misc_feature (107)..(289): Homolog of NCBI NO: 29825611 NR Description: gibberellin 2-oxidase 1 [Nicotiana sylvestris]
  misc_feature (2)..(117): Homolog of NCBI NO: 29825611 NR Description: gibberellin 2-oxidase 1 [Nicotiana sylvestris]
  misc_feature (111)..(291): Homolog of NCBI NO: 32492254 NR Description: OSJNBa0019D11.23 [Oryza sativa (japonica
  misc_feature (1)..(108): Homolog of NCBI NO: 32492254 NR Description: OSJNBa0019D11.23 [Oryza sativa (japonica
  misc_feature (105)..(288): Homolog of NCBI NO: 34915474 NR Description: gibberellin 20-oxidase-like protein [Oryza sativa
  misc_feature (2)..(132): Homolog of NCBI NO: 34915474 NR Description: gibberellin 20-oxidase-like protein [Oryza sativa
  misc_feature (41)..(289): Homolog of NCBI NO: 15223684 NR Description: gibberellin 20-oxidase, putative; protein id:
  misc_feature (107)..(256): Homolog of NCBI NO: 18402992 NR Description: expressed protein; protein id: At3g21420.1, by cDNA: 118190. [Arabidopsis thaliana]
  misc_feature (41)..(126): Homolog of NCBI NO: 18402992 NR Description: expressed protein; protein id: At3g21420.1, by cDNA: 118190. [Arabidopsis thaliana]
MDPPFNEIYNNLLYNQITKKDNDVSEIPFSFSVTAVVEEVELPVIDVSRLIDGAEEEREKCKEAIARASREWGFFQVINHGISMDVLEKMRQEQIRVFREPFDKKSNSTMEKFASESEALAYMLAEVLAEKSGQNSSFFKENCVRNTCYLRMNRYPPCPKPSEVYGLMPHTDSDFLTILYQDQVGGLQLIKDNRWIAVKPNPKALIINIGDLFQAWSNGMYKSVEHRVMTNPKVERFSTAYFMCPSYDAVIECSSDRPAYRNFSFREFRQQVQEDVKKFGFKVGLPRFLNHVY

SEQ ID NO: 69684 - protein, 210 aa, Arabidopsis thaliana
  peptide (1)..(210): Ceres Seq. ID no. 1822953
  misc_feature (63)..(162): Pfam Name: 2OG-Fe(II) oxygenase superfamily Pfam Description: 2OG-Fe(II) oxygenase superfamily
  misc_feature (1)..(210): Homolog of NCBI NO: 15233553 NR Description: gibberellin 20-oxidase - like protein; protein At4g21200.1 [Arabidopsis thaliana] >gi|7433237|pir||T04951
  misc_feature (24)..(206): Homolog of NCBI NO: 29825611 NR Description: gibberellin 2-oxidase 1 [Nicotiana sylvestris]
  misc_feature (1)..(34): Homolog of NCBI NO: 29825611 NR Description: gibberellin 2-oxidase 1 [Nicotiana sylvestris]
  misc_feature (28)..(208): Homolog of NCBI NO: 32492254 NR Description: OSJNBa0019D11.23 [Oryza sativa (japonica
  misc_feature (1)..(25): Homolog of NCBI NO: 32492254 NR Description: OSJNBa0019D11.23 [Oryza sativa (japonica
  misc_feature (22)..(205): Homolog of NCBI NO: 34915474 NR Description: gibberellin 20-oxidase-like protein [Oryza sativa
  misc_feature (1)..(49): Homolog of NCBI NO: 34915474 NR Description: gibberellin 20-oxidase-like protein [Oryza sativa
  misc_feature (1)..(206): Homolog of NCBI NO: 15223684 NR Description: gibberellin 20-oxidase, putative; protein id:
  misc_feature (24)..(173): Homolog of NCBI NO: 18402992 NR Description: expressed protein; protein id: At3g21420.1, by cDNA: 118190. [Arabidopsis thaliana]
  misc_feature (1)..(43): Homolog of NCBI NO: 18402992 NR Description: expressed protein; protein id: At3g21420.1, by cDNA: 118190. [Arabidopsis thaliana]
MDVLEKMRQEQIRVFREPFDKKSNSTMEKFASESEALAYMLAEVLAEKSGQNSSFFKENCVRNTCYLRMNRYPPCPKPSEVYGLMPHTDSDFLTILYQDQVGGLQLIKDNRWIAVKPNPKALIINIGDLFQAWSNGMYKSVEHRVMTNPKVERFSTAYFMCPSYDAVIECSSDRPAYRNFSFREFRQQVQEDVKKFGFKVGLPRFLNHVY

SEQ ID NO: 69685 - protein, 204 aa, Arabidopsis thaliana
  peptide (1)..(204): Ceres Seq. ID no. 1822954
  misc_feature (57)..(156): Pfam Name: 2OG-Fe(II) oxygenase superfamily Pfam Description: 2OG-Fe(II) oxygenase superfamily
  misc_feature (1)..(204): Homolog of NCBI NO: 15233553 NR Description: gibberellin 20-oxidase - like protein; protein At4g21200.1 [Arabidopsis thaliana] >gi|7433237|pir||T04951
  misc_feature (18)..(200): Homolog of NCBI NO: 29825611 NR Description: gibberellin 2-oxidase 1 [Nicotiana sylvestris]
  misc_feature (1)..(28): Homolog of NCBI NO: 29825611 NR Description: gibberellin 2-oxidase 1 [Nicotiana sylvestris]
  misc_feature (22)..(202): Homolog of NCBI NO: 32492254 NR Description: OSJNBa0019D11.23 [Oryza sativa (japonica
  misc_feature (1)..(19): Homolog of NCBI NO: 32492254 NR Description: OSJNBa0019D11.23 [Oryza sativa (japonica
  misc_feature (16)..(199): Homolog of NCBI NO: 34915474 NR Description: gibberellin 20-oxidase-like protein [Oryza sativa
  misc_feature (1)..(43): Homolog of NCBI NO: 34915474 NR Description: gibberellin 20-oxidase-like protein [Oryza sativa
  misc_feature (1)..(200): Homolog of NCBI NO: 15223684 NR Description: gibberellin 20-oxidase, putative; protein id:
  misc_feature (18)..(167): Homolog of NCBI NO: 18402992 NR Description: expressed protein; protein id: At3g21420.1, by cDNA: 118190. [Arabidopsis thaliana]
  misc_feature (1)..(37): Homolog of NCBI NO: 18402992 NR Description: expressed protein; protein id: At3g21420.1, by cDNA: 118190. [Arabidopsis thaliana]
MRQEQIRVFREPFDKKSNSTMEKFASESEALAYMLAEVLAEKSGQNSSFFKENCVRNTCYLRMNRYPPCPKPSEVYGLMPHTDSDFLTILYQDQVGGLQLIKDNRWIAVKPNPKALIINIGDLFQAWSNGMYKSVEHRVMTNPKVERFSTAYFMCPSYDAVIECSSDRPAYRNFSFREFRQQVQEDVKKFGFKVGLPRFLNHVY

SEQ ID NO: 69686 - DNA, 687 bp, Arabidopsis thaliana
  misc_feature (1)..(687): Ceres Seq. ID no. 1822975
  misc_feature: MA Experiment ID: 20000227 Result: Up-regulated in Transcription
  misc_feature: MA Experiment 20000227 PARAMETER Experiment Name: At_Root-Tips-vs-Tops_P Parameter: Tissue Value: Root Tips vs. Root Tops
  misc_feature: MA Experiment ID: 20001247 Result: Down-regulated in Transcription
  misc_feature: MA Experiment 20001247 PARAMETER Experiment Name: At_Far-red-induction_P Parameter: Age (day) Value: 7
  misc_feature: MA Experiment 20001247 PARAMETER Experiment Name: At_Far-red-induction_P Parameter: Light Value: Far-red vs. White
  misc_feature: MA Experiment 20001247 PARAMETER Experiment Name: At_Far-red-induction_P Parameter: Organism Value: A. thaliana
  misc_feature: MA Experiment 20001247 PARAMETER Experiment Name: At_Far-red-induction_P Parameter: Plant Line Value: Columbia
  misc_feature: MA Experiment 20001247 PARAMETER Experiment Name: At_Far-red-induction_P Parameter: Timepoint (hr) Value: 1
  misc_feature: MA Experiment 20001247 PARAMETER Experiment Name: At_Far-red-induction_P Parameter: Tissue Value: Whole Plant
  misc_feature: MA Experiment ID: 20001450 Result: Down-regulated in Transcription
  misc_feature: MA Experiment 20001450 PARAMETER Experiment Name: At_Far-red-induction_P Parameter: Age (day) Value: 7
  misc_feature: MA Experiment 20001450 PARAMETER Experiment Name: At_Far-red-induction_P Parameter: Light Value: Far-red vs. White
  misc_feature: MA Experiment 20001450 PARAMETER Experiment Name: At_Far-red-induction_P Parameter: Organism Value: A. thaliana
  misc_feature: MA Experiment 20001450 PARAMETER Experiment Name: At_Far-red-induction_P Parameter: Plant Line Value: Columbia
  misc_feature: MA Experiment 20001450 PARAMETER Experiment Name: At_Far-red-induction_P Parameter: Timepoint (hr) Value: 8
  misc_feature: MA Experiment 20001450 PARAMETER Experiment Name: At_Far-red-induction_P Parameter: Tissue Value: Whole Plant
  misc_feature: MA Experiment ID: 20001451 Result: Down-regulated in Transcription
  misc_feature: MA Experiment 20001451 PARAMETER Experiment Name: At_Far-red-induction_P Parameter: Age (day) Value: 7
  misc_feature: MA Experiment 20001451 PARAMETER Experiment Name: At_Far-red-induction_P Parameter: Light Value: Far-red vs. White
  misc_feature: MA Experiment 20001451 PARAMETER Experiment Name: At_Far-red-induction_P Parameter: Organism Value: A. thaliana
  misc_feature: MA Experiment 20001451 PARAMETER Experiment Name: At_Far-red-induction_P Parameter: Plant Line Value: Columbia
  misc_feature: MA Experiment 20001451 PARAMETER Experiment Name: At_Far-red-induction_P Parameter: Timepoint (hr) Value: 24
  misc_feature: MA Experiment 20001451 PARAMETER Experiment Name: At_Far-red-induction_P Parameter: Tissue Value: Whole Plant
  misc_feature: MA Experiment ID: 20001556 Result: Up-regulated in Transcription
  misc_feature: MA Experiment 20001556 PARAMETER Experiment Name: At_Drought_Soil_Dry_P Parameter: Age (day) Value: 26
  misc_feature: MA Experiment 20001556 PARAMETER Experiment Name: At_Drought_Soil_Dry_P Parameter: Organism Value: A. thaliana
  misc_feature: MA Experiment 20001556 PARAMETER Experiment Name: At_Drought_Soil_Dry_P Parameter: Plant Line Value: WS
  misc_feature: MA Experiment 20001556 PARAMETER Experiment Name: At_Drought_Soil_Dry_P Parameter: Post Timepoint (hr) Value: None
  misc_feature: MA Experiment 20001556 PARAMETER Experiment Name: At_Drought_Soil_Dry_P Parameter: Post-Treatment Value: None
  misc_feature: MA Experiment 20001556 PARAMETER Experiment Name: At_Drought_Soil_Dry_P Parameter: Timepoint (day) Value: 12
  misc_feature: MA Experiment 20001556 PARAMETER Experiment Name: At_Drought_Soil_Dry_P Parameter: Treatment Value: Drought vs. No Drought
  misc_feature: MA Experiment ID: 20001558 Result: Up-regulated in Transcription
  misc_feature: MA Experiment 20001558 PARAMETER Experiment Name: At_Drought_Soil_Dry_P Parameter: Age (day) Value: 27
  misc_feature: MA Experiment 20001558 PARAMETER Experiment Name: At_Drought_Soil_Dry_P Parameter: Organism Value: A. thaliana
  misc_feature: MA Experiment 20001558 PARAMETER Experiment Name: At_Drought_Soil_Dry_P Parameter: Plant Line Value: WS
  misc_feature: MA Experiment 20001558 PARAMETER Experiment Name: At_Drought_Soil_Dry_P Parameter: Post Timepoint (hr) Value: 6
  misc_feature: MA Experiment 20001558 PARAMETER Experiment Name: At_Drought_Soil_Dry_P Parameter: Post-Treatment Value: Re-Water vs. No Drought
  misc_feature: MA Experiment 20001558 PARAMETER Experiment Name: At_Drought_Soil_Dry_P Parameter: Timepoint (day) Value: 13
  misc_feature: MA Experiment 20001558 PARAMETER Experiment Name: At_Drought_Soil_Dry_P Parameter: Treatment Value: Drought vs. No Drought
  misc_feature: MA Experiment ID: 20001560 Result: Up-regulated in Transcription
  misc_feature: MA Experiment 20001560 PARAMETER Experiment Name: At_Drought_Soil_Dry_P Parameter: Age (day) Value: 28
  misc_feature: MA Experiment 20001560 PARAMETER Experiment Name: At_Drought_Soil_Dry_P Parameter: Organism Value: A. thaliana
  misc_feature: MA Experiment 20001560 PARAMETER Experiment Name: At_Drought_Soil_Dry_P Parameter: Plant Line Value: WS
  misc_feature: MA Experiment 20001560 PARAMETER Experiment Name: At_Drought_Soil_Dry_P Parameter: Post Timepoint (hr) Value: None
  misc_feature: MA Experiment 20001560 PARAMETER Experiment Name: At_Drought_Soil_Dry_P Parameter: Post-Treatment Value: None
  misc_feature: MA Experiment 20001560 PARAMETER Experiment Name: At_Drought_Soil_Dry_P Parameter: Timepoint (day) Value: 14
  misc_feature: MA Experiment 20001560 PARAMETER Experiment Name: At_Drought_Soil_Dry_P Parameter: Treatment Value: Drought vs. No Drought
atgatcagattcgcgagaccaaaacctataattgactcagtgagttacaatcttctccagaaatgttacgctagtggaacccccaaaggaaaatcgaagctgaagacaggccaatcattgaaacgcaacaaactcacaatcaaaaaaggcggtggaaacggcggtggcagaggtggtgatgaggtggataagggaaaaggaagaatctcagatcaatgcataaacgctccttgtcctgttcgttacctgagacctaaggaaagagagcgagaagcgagacgagagaagctagggctaatcagtaaagcgaggcaaaaagagattgattttcagaagaaaggtggatcctttacgatgggagttactactgcgccgatgaggattgggactccaggattggattacatttcgttagggatttttacggaagatgagttaccaaagtataaggttacagtggaggatgggattagacttgcgaaagagtatagtagagtgcttatgagagagcatagagcgagacgtgtagcggagattagtttgatgaagatgaggaacgctgcggttgaggcattgccggagaatttgaagaaggcggctttagtgcgtgatttgactccgtttccggtgagtcgaggtacggtacgcttactccacctattgaagggtatttggagaggattatga

SEQ ID NO: 69687 - protein, 228 aa, Arabidopsis thaliana
  peptide (1)..(228): Ceres Seq. ID no. 1822976
  misc_feature (1)..(228): Homolog of NCBI NO: 15233539 NR Description: hypothetical protein; protein id: At4g21140.1
  misc_feature (1)..(223): Homolog of NCBI NO: 15235571 NR Description: putative protein; protein id: At4g05400.1
  misc_feature (16)..(223): Homolog of NCBI NO: 34914612 NR Description: P0520B06.19 [Oryza sativa (japonica
MIRFARPKPIIDSVSYNLLQKCYASGTPKGKSKLKTGQSLKRNKLTIKKGGGNGGGRGGDEVDKGKGRISDQCINAPCPVRYLRPKEREREARREKLGLISKARQKEIDFQKKGGSFTMGVTTAPMRIGTPGLDYISLGIFTEDELPKYKVTVEDGIRLAKEYSRVLMREHRARRVAEISLMKMRNAAVEALPENLKKAALVRDLTPFPVSRGTVRLLHLLKGIWRGL

SEQ ID NO: 69688 - DNA, 1134 bp, Arabidopsis thaliana
  misc_feature (1)..(1134): Ceres Seq. ID no. 1823009
  misc_feature: MA Experiment ID: 20000314 Result: Down-regulated in Transcription
  misc_feature: MA Experiment 20000314 PARAMETER Experiment Name: At_14day_Shoots-Roots_Sub_P Parameter: Age (day) Value: 14
  misc_feature: MA Experiment 20000314 PARAMETER Experiment Name: At_14day_Shoots-Roots_Sub_P Parameter: Organism Value: A. thaliana
  misc_feature: MA Experiment 20000314 PARAMETER Experiment Name: At_14day_Shoots-Roots_Sub_P Parameter: Plant Line Value: WS
  misc_feature: MA Experiment 20000314 PARAMETER Experiment Name: At_14day_Shoots-Roots_Sub_P Parameter: Tissue Value: Roots vs. Whole Plant
  misc_feature: MA Experiment ID: 20000315 Result: Down-regulated in Transcription
  misc_feature: MA Experiment 20000315 PARAMETER Experiment Name: At_14day_Shoots-Roots_Sub_P Parameter: Age (day) Value: 14
  misc_feature: MA Experiment 20000315 PARAMETER Experiment Name: At_14day_Shoots-Roots_Sub_P Parameter: Organism Value: A. thaliana
  misc_feature: MA Experiment 20000315 PARAMETER Experiment Name: At_14day_Shoots-Roots_Sub_P Parameter: Plant Line Value: WS
  misc_feature: MA Experiment 20000315 PARAMETER Experiment Name: At_14day_Shoots-Roots_Sub_P Parameter: Tissue Value: Shoots vs. Whole Plant
  misc_feature: MA Experiment ID: 20000327 Result: Down-regulated in Transcription
  misc_feature: MA Experiment 20000327 PARAMETER Experiment Name: At_42deg_Heat_Sub_P Parameter: Age (day) Value: 14
  misc_feature: MA Experiment 20000327 PARAMETER Experiment Name: At_42deg_Heat_Sub_P Parameter: Organism Value: A. thaliana
  misc_feature: MA Experiment 20000327 PARAMETER Experiment Name: At_42deg_Heat_Sub_P Parameter: Plant Line Value: WS
  misc_feature: MA Experiment 20000327 PARAMETER Experiment Name: At_42deg_Heat_Sub_P Parameter: Temperature (deg C) Value: 42 vs. 22
  misc_feature: MA Experiment 20000327 PARAMETER Experiment Name: At_42deg_Heat_Sub_P Parameter: Timepoint (hr) Value: 1
  misc_feature: MA Experiment 20000327 PARAMETER Experiment Name: At_42deg_Heat_Sub_P Parameter: Tissue Value: Aerial
  misc_feature: MA Experiment ID: 20000328 Result: Down-regulated in Transcription
  misc_feature: MA Experiment 20000328 PARAMETER Experiment Name: At_42deg_Heat_Sub_P Parameter: Age (day) Value: 14
  misc_feature: MA Experiment 20000328 PARAMETER Experiment Name: At_42deg_Heat_Sub_P Parameter: Organism Value: A. thaliana
  misc_feature: MA Experiment 20000328 PARAMETER Experiment Name: At_42deg_Heat_Sub_P Parameter: Plant Line Value: WS
  misc_feature: MA Experiment 20000328 PARAMETER Experiment Name: At_42deg_Heat_Sub_P Parameter: Temperature (deg C) Value: 42 vs. 22
  misc_feature: MA Experiment 20000328 PARAMETER Experiment Name: At_42deg_Heat_Sub_P Parameter: Timepoint (hr) Value: 6
  misc_feature: MA Experiment 20000328 PARAMETER Experiment Name: At_42deg_Heat_Sub_P Parameter: Tissue Value: Aerial
  misc_feature: MA Experiment ID: 20000332 Result: Up-regulated in Transcription
  misc_feature: MA Experiment 20000332 PARAMETER Experiment Name: At_4deg_Cold_Sub_P Parameter: Age (day) Value: 14
  misc_feature: MA Experiment 20000332 PARAMETER Experiment Name: At_4deg_Cold_Sub_P Parameter: Organism Value: A. thaliana
  misc_feature: MA Experiment 20000332 PARAMETER Experiment Name: At_4deg_Cold_Sub_P Parameter: Plant Line Value: WS
  misc_feature: MA Experiment 20000332 PARAMETER Experiment Name: At_4deg_Cold_Sub_P Parameter: Temperature (deg C) Value: 4 vs. 22
  misc_feature: MA Experiment 20000332 PARAMETER Experiment Name: At_4deg_Cold_Sub_P Parameter: Timepoint (hr) Value: 2
  misc_feature: MA Experiment 20000332 PARAMETER Experiment Name: At_4deg_Cold_Sub_P Parameter: Tissue Value: Aerial
  misc_feature: MA Experiment ID: 20000347 Result: Up-regulated in Transcription
  misc_feature: MA Experiment 20000347 PARAMETER Experiment Name: At_2mM_SA_Sub_P Parameter: Age (day) Value: 14
  misc_feature: MA Experiment 20000347 PARAMETER Experiment Name: At_2mM_SA_Sub_P Parameter: Organism Value: A. thaliana
  misc_feature: MA Experiment 20000347 PARAMETER Experiment Name: At_2mM_SA_Sub_P Parameter: Plant Line Value: WS
  misc_feature: MA Experiment 20000347 PARAMETER Experiment Name: At_2mM_SA_Sub_P Parameter: Timepoint (hr) Value: 6
  misc_feature: MA Experiment 20000347 PARAMETER Experiment Name: At_2mM_SA_Sub_P Parameter: Tissue Value: Aerial
  misc_feature: MA Experiment 20000347 PARAMETER Experiment Name: At_2mM_SA_Sub_P Parameter: Treatment Value: 2mM SA vs. No Treatment
  misc_feature: MA Experiment ID: 20000348 Result: Up-regulated in Transcription
  misc_feature: MA Experiment 20000348 PARAMETER Experiment Name: At_100uM_ABA_Sub_P Parameter: Age (day) Value: 14
  misc_feature: MA Experiment 20000348 PARAMETER Experiment Name: At_100uM_ABA_Sub_P Parameter: Organism Value: A. thaliana
  misc_feature: MA Experiment 20000348 PARAMETER Experiment Name: At_100uM_ABA_Sub_P Parameter: Plant Line Value: WS
  misc_feature: MA Experiment 20000348 PARAMETER Experiment Name: At_100uM_ABA_Sub_P Parameter: Timepoint (hr) Value: 1
  misc_feature: MA Experiment 20000348 PARAMETER Experiment Name: At_100uM_ABA_Sub_P Parameter: Tissue Value: Aerial
  misc_feature: MA Experiment 20000348 PARAMETER Experiment Name: At_100uM_ABA_Sub_P Parameter: Treatment Value: 100uM ABA vs. No Treatment
  misc_feature: MA Experiment ID: 20000440 Result: Down-regulated in Transcription
  misc_feature: MA Experiment 20000440 PARAMETER Experiment Name: At_Closed-Flower__Sub_P Parameter: Tissue Value: Closed Flower vs. Whole Plant
atggatttgaatataaacaagacgacccctgttcttagtgaccctactacaccagtaagtaaaacaagacttggatcatccttcccttcagggagattcatgatgaattctagaaagaagattcctaaactcgatgatgttcgatctaacggttggttggacgcgatgatatcttcgtctccaccgcgtaaaaggcttgtcaaggatttcaatattgagattgctcctgaagatgatttttctcaacgggcctggatgctcaagtatccttcagcgattacctcgtttgcgcatattgcagctcaagcaaagaacaagaagatagctgtgtttctagattatgatggaacactttctccaatagtcgatgaccctgatcgcgccatcatgtctgatgcgatgcgtgctgctgtgaaagatgtcgccaagtacttcccaacagcaataattagtggtagaagccgtgacaaggtttaccaattggtagggctaaccgaactctattacgcgggtagtcacgggatggacattatgactcctgtaaatccaaatggatcccctgaagaccctaattgtataaaaaccactgaccaacagggtgaggaggtaaacctctttcagcctgctaaagagttcatacccgtcattgaagaggtttataataacctcgttgagataactaaatgtatcaaaggtgcaaaagtagagaaccataagttttgtacttctgtacattaccgtaatgttgacgagaaggactggccacttgttgctcaacgcgttcatgaccacctgaaacgataccctcgtttgcgtataactcacggtagaaaggttttagaggtgcgtcctgtgattgagtggaacaaaggaaaagcagtagagtttctgttagagtctctcggattaagcaacaacgatgagttcctcccaatcttcatcggagatgacaagaccgatgaagatgcattcaaggtactgagggaagggaacagaggatttggaatattggtatcgtctgtaccaaaagaaagcaatgcattttactctcttagagacccttccgaggtgaagaagtttctcaagactttggtgaaatgggggaagatggaaagttcaaaaacaagtttttga

SEQ ID NO: 69689 - protein, 377 aa, Arabidopsis thaliana
  peptide (1)..(377): Ceres Seq. ID no. 1823010
  misc_feature (111)..(355): Pfam Name: Trehalose-phosphatase Pfam Description: Trehalose-phosphatase
  misc_feature (1)..(377): Homolog of NCBI NO: 15235713 NR Description: trehalose-6-phosphate phosphatase - like protein;
  misc_feature (1)..(377): Homolog of NCBI NO: 15234552 NR Description: putative trehalose-6-phosphate phosphatase protein id: At4g12430.1, supported by cDNA: gi_16648940
  misc_feature (1)..(367): Homolog of NCBI NO: 30696058 NR Description: trehalose-6-phosphate phosphatase (TPPA)
  misc_feature (1)..(367): Homolog of NCBI NO: 30696054 NR Description: trehalose-6-phosphate phosphatase (TPPA)
  misc_feature (1)..(373): Homolog of NCBI NO: 37536726 NR Description: putative trehalose-6-phosphate phosphatase [Oryza
  misc_feature (31)..(370): Homolog of NCBI NO: 18399940 NR Description: trehalose-phosphatase, putative; protein id:
  misc_feature (31)..(370): Homolog of NCBI NO: 21554408 NR Description: trehalose-phosphatase, putative [Arabidopsis
  misc_feature (31)..(370): Homolog of NCBI NO: 25354597 NR Description: probable trehalose-phosphatase [imported] -
  misc_feature (5)..(367): Homolog of NCBI NO: 15218205 NR Description: trehalose-6-phosphate phosphatase (AtTPPB); id: At1g78090.1, supported by cDNA: gi_2944179 [Arabidopsis
  misc_feature (5)..(367): Homolog of NCBI NO: 25354595 NR Description: trehalose-phosphatase (EC 3.1.3.12) B [imported] -
MDLNINKTTPVLSDPTTPVSKTRLGSSFPSGRFMMNSRKKIPKLDDVRSNGWLDAMISSSPPRKRLVKDFNIEIAPEDDFSQRAWMLKYPSAITSFAHIAAQAKNKKIAVFLDYDGTLSPIVDDPDRAIMSDAMRAAVKDVAKYFPTAIISGRSRDKVYQLVGLTELYYAGSHGMDIMTPVNPNGSPEDPNCIKTTDQQGEEVNLFQPAKEFIPVIEEVYNNLVEITKCIKGAKVENHKFCTSVHYRNVDEKDWPLVAQRVHDHLKRYPRLRITHGRKVLEVRPVIEWNKGKAVEFLLESLGLSNNDEFLPIFIGDDKTDEDAFKVLREGNRGFGILVSSVPKESNAFYSLRDPSEVKKFLKTLVKWGKMESSKTSF

SEQ ID NO: 69690 - protein, 344 aa, Arabidopsis thaliana
  peptide (1)..(344): Ceres Seq. ID no. 1823011
  misc_feature (78)..(322): Pfam Name: Trehalose-phosphatase Pfam Description: Trehalose-phosphatase
  misc_feature (1)..(344): Homolog of NCBI NO: 15235713 NR Description: trehalose-6-phosphate phosphatase - like protein;
  misc_feature (1)..(344): Homolog of NCBI NO: 15234552 NR Description: putative trehalose-6-phosphate phosphatase protein id: At4g12430.1, supported by cDNA: gi_16648940
  misc_feature (1)..(334): Homolog of NCBI NO: 30696058 NR Description: trehalose-6-phosphate phosphatase (TPPA)
  misc_feature (1)..(334): Homolog of NCBI NO: 30696054 NR Description: trehalose-6-phosphate phosphatase (TPPA)
  misc_feature (1)..(340): Homolog of NCBI NO: 37536726 NR Description: putative trehalose-6-phosphate phosphatase [Oryza
  misc_feature (1)..(337): Homolog of NCBI NO: 18399940 NR Description: trehalose-phosphatase, putative; protein id:
  misc_feature (1)..(337): Homolog of NCBI NO: 21554408 NR Description: trehalose-phosphatase, putative [Arabidopsis
  misc_feature (1)..(337): Homolog of NCBI NO: 25354597 NR Description: probable trehalose-phosphatase [imported] -
  misc_feature (1)..(334): Homolog of NCBI NO: 15218205 NR Description: trehalose-6-phosphate phosphatase (AtTPPB); id: At1g78090.1, supported by cDNA: gi_2944179 [Arabidopsis
  misc_feature (1)..(334): Homolog of NCBI NO: 25354595 NR Description: trehalose-phosphatase (EC 3.1.3.12) B [imported] -
MMNSRKKIPKLDDVRSNGWLDAMISSSPPRKRLVKDFNIEIAPEDDFSQRAWMLKYPSAITSFAHIAAQAKNKKIAVFLDYDGTLSPIVDDPDRAIMSDAMRAAVKDVAKYFPTAIISGRSRDKVYQLVGLTELYYAGSHGMDIMTPVNPNGSPEDPNCIKTTDQQGEEVNLFQPAKEFIPVIEEVYNNLVEITKCIKGAKVENHKFCTSVHYRNVDEKDWPLVAQRVHDHLKRYPRLRITHGRKVLEVRPVIEWNKGKAVEFLLESLGLSNNDEFLPIFIGDDKTDEDAFKVLREGNRGFGILVSSVPKESNAFYSLRDPSEVKKFLKTLVKWGKMESSKTSF

SEQ ID NO: 69691 - protein, 343 aa, Arabidopsis thaliana
  peptide (1)..(343): Ceres Seq. ID no. 1823012
  misc_feature (77)..(321): Pfam Name: Trehalose-phosphatase Pfam Description: Trehalose-phosphatase
  misc_feature (1)..(336): Homolog of NCBI NO: 25354597 NR Description: probable trehalose-phosphatase [imported] -
  misc_feature (1)..(333): Homolog of NCBI NO: 15218205 NR Description: trehalose-6-phosphate phosphatase (AtTPPB); id: At1g78090.1, supported by cDNA: gi_2944179 [Arabidopsis
  misc_feature (1)..(343): Homolog of NCBI NO: 15234552 NR Description: putative trehalose-6-phosphate phosphatase protein id: At4g12430.1, supported by cDNA: gi_16648940
  misc_feature (1)..(333): Homolog of NCBI NO: 30696054 NR Description: trehalose-6-phosphate phosphatase (TPPA)
  misc_feature (1)..(336): Homolog of NCBI NO: 18399940 NR Description: trehalose-phosphatase, putative; protein id:
  misc_feature (1)..(336): Homolog of NCBI NO: 21554408 NR Description: trehalose-phosphatase, putative [Arabidopsis
  misc_feature (1)..(339): Homolog of NCBI NO: 37536726 NR Description: putative trehalose-6-phosphate phosphatase [Oryza
  misc_feature (1)..(333): Homolog of NCBI NO: 30696058 NR Description: trehalose-6-phosphate phosphatase (TPPA)
  misc_feature (1)..(343): Homolog of NCBI NO: 15235713 NR Description: trehalose-6-phosphate phosphatase - like protein;
  misc_feature (1)..(333): Homolog of NCBI NO: 25354595 NR Description: trehalose-phosphatase (EC 3.1.3.12) B [imported] -
MNSRKKIPKLDDVRSNGWLDAMISSSPPRKRLVKDFNIEIAPEDDFSQRAWMLKYPSAITSFAHIAAQAKNKKIAVFLDYDGTLSPIVDDPDRAIMSDAMRAAVKDVAKYFPTAIISGRSRDKVYQLVGLTELYYAGSHGMDIMTPVNPNGSPEDPNCIKTTDQQGEEVNLFQPAKEFIPVIEEVYNNLVEITKCIKGAKVENHKFCTSVHYRNVDEKDWPLVAQRVHDHLKRYPRLRITHGRKVLEVRPVIEWNKGKAVEFLLESLGLSNNDEFLPIFIGDDKTDEDAFKVLREGNRGFGILVSSVPKESNAFYSLRDPSEVKKFLKTLVKWGKMESSKTSF

SEQ ID NO: 69692 - DNA, 1293 bp, Arabidopsis thaliana
  misc_feature (1)..(1293): Ceres Seq. ID no. 1823154
  misc_feature: MA Experiment ID: 20000173 Result: Up-regulated in Transcription
  misc_feature: MA Experiment 20000173 PARAMETER Experiment Name: At_42deg_Heat_P Parameter: Age (day) Value: 14
  misc_feature: MA Experiment 20000173 PARAMETER Experiment Name: At_42deg_Heat_P Parameter: Organism Value: A. thaliana
  misc_feature: MA Experiment 20000173 PARAMETER Experiment Name: At_42deg_Heat_P Parameter: Plant Line Value: WS
  misc_feature: MA Experiment 20000173 PARAMETER Experiment Name: At_42deg_Heat_P Parameter: Temperature (deg C) Value: 42 vs. 22
  misc_feature: MA Experiment 20000173 PARAMETER Experiment Name: At_42deg_Heat_P Parameter: Timepoint (hr) Value: 6
  misc_feature: MA Experiment 20000173 PARAMETER Experiment Name: At_42deg_Heat_P Parameter: Tissue Value: Aerial
  misc_feature: MA Experiment ID: 20000234 Result: Up-regulated in Transcription
  misc_feature: MA Experiment 20000234 PARAMETER Experiment Name: At_Siliques_P Parameter: Age (day) Value: 21
  misc_feature: MA Experiment 20000234 PARAMETER Experiment Name: At_Siliques_P Parameter: Organism Value: A. thaliana
  misc_feature: MA Experiment 20000234 PARAMETER Experiment Name: At_Siliques_P Parameter: Plant Line Value: WS
  misc_feature: MA Experiment 20000234 PARAMETER Experiment Name: At_Siliques_P Parameter: Tissue Value: Less Than 5mm Siliques vs. Whole Plant
  misc_feature: MA Experiment ID: 20000495 Result: Up-regulated in Transcription
  misc_feature: MA Experiment 20000495 PARAMETER Experiment Name: At_Guard_Cells_P Parameter: Harvest Date Value: 8/2/2002
  misc_feature: MA Experiment 20000495 PARAMETER Experiment Name: At_Guard_Cells_P Parameter: Organism Value: A. thaliana
  misc_feature: MA Experiment 20000495 PARAMETER Experiment Name: At_Guard_Cells_P Parameter: Tissue Value: Guard Cells vs. Leaves
  misc_feature: MA Experiment ID: 20000496 Result: Up-regulated in Transcription
  misc_feature: MA Experiment 20000496 PARAMETER Experiment Name: At_Guard_Cells_P Parameter: Harvest Date Value: 7/19/2002
  misc_feature: MA Experiment 20000496 PARAMETER Experiment Name: At_Guard_Cells_P Parameter: Organism Value: Canola
  misc_feature: MA Experiment 20000496 PARAMETER Experiment Name: At_Guard_Cells_P Parameter: Tissue Value: Guard Cells vs. Leaves
atggctgtggctcgtataaagcttataaggaacaagagattagttgtggtgaagcaaatgaggcgtgacatcgctgttcttcttcaatccggtcaagatgccactgctcgaatcagagttgagcatgtgataagggaacagaacattcaggcagcaaacgaaatcattgagcttttctgtgaacttattgtttctcgtctcactatcatcactaagcaaaagcaatgtcctgtggatcttaaggaaggtattgctagtttgatttttgctgcgcctagatgctctgaaattcctgagcttggagatcttagagacatctttgcgaagaaatatgggaaagattttgtatctgctgctactgatttgcgtcctagctgcggtgttaaccggatgttgattgataagctttcggttagaaatcccggtggagaatacaaactgaaaatcatgaaggaaattgcaaaggaattccaggttgattgggatactacagagacagagcaagaacttctcaaacctcaagaagaaagcatagacgggccacgtaagtttgttagcgcttcaagcttaccagttaatcgtgcagctatcaacgagcctattgatcctaccaaagcagtgccaagatcgactagtagcatgagcatcaacacgcattatcatgacaccgagtcagcagcggaagcagctacagaattagccaaacaggcagttgcagcagcacaagtagcctccttattagctaccagaagagacagcagcaacaaggagttctctgtatcttctgatcattcaacacaccagaaggattcacagtacatggatcatcatcatcatcatccaggttcaagaagacaatcacgagactccgaaacaagttcctattacgcaaaacctggtgcagaaaacagaggaatgggtaggagacacagctacaacaatccgggtattaatgaatctgactacgaggaagagtataccaataccgaagcagaagcaaaagaaacaatgaggaggagacacagctacaaccctcgatcagttcctcctcctgcaacttctgagatcaagtttgatgagtcagactactacgaggaagagacagagccagatgaaccatcacagggtcgtgtttcttctctcccgccaaaccgagcaccgcctcaggctcctcagtccggtgagtccagacaggactcgagcggtcaccaggttcacccaaaactgcctgactatgatattttggctgcacgttttgaagcaatcagacacagtaaagggccattgatctga

SEQ ID NO: 69693 - protein, 430 aa, Arabidopsis thaliana
  peptide (1)..(430): Ceres Seq. ID no. 1823155
  misc_feature (1)..(122): Pfam Name: Eukaryotic protein of unknown function, DUF292 Pfam Description: Eukaryotic protein of unknown function, DUF292
  misc_feature (1)..(430): Homolog of NCBI NO: 15237108 NR Description: putative protein; protein id: At4g35730.1
  misc_feature (1)..(391): Homolog of NCBI NO: 40253290 NR Description: unknown protein [Oryza sativa (japonica
  misc_feature (1)..(277): Homolog of NCBI NO: 15218545 NR Description: hypothetical protein; protein id: At1g34220.1
  misc_feature (132)..(277): Homolog of NCBI NO: 33589706 NR Description: At1g34220 [Arabidopsis thaliana]
  misc_feature (1)..(130): Homolog of NCBI NO: 33589706 NR Description: At1g34220 [Arabidopsis thaliana]
  misc_feature (1)..(183): Homolog of NCBI NO: 18395668 NR Description: expressed protein; protein id: At1g25420.1, by cDNA: 7917., supported by cDNA: gi_20465253 [Arabidopsis
  misc_feature (1)..(183): Homolog of NCBI NO: 21595428 NR Description: unknown [Arabidopsis thaliana]
  misc_feature (1)..(414): Homolog of NCBI NO: 15224833 NR Description: hypothetical protein; protein id: At2g19710.1
  misc_feature (1)..(414): Homolog of NCBI NO: 34222084 NR Description: At2g19710 [Arabidopsis thaliana]
  misc_feature (1)..(229): Homolog of NCBI NO: 34910388 NR Description: P0692C11.15 [Oryza sativa (japonica
MAVARIKLIRNKRLVVVKQMRRDIAVLLQSGQDATARIRVEHVIREQNIQAANEIIELFCELIVSRLTIITKQKQCPVDLKEGIASLIFAAPRCSEIPELGDLRDIFAKKYGKDFVSAATDLRPSCGVNRMLIDKLSVRNPGGEYKLKIMKEIAKEFQVDWDTTETEQELLKPQEESIDGPRKFVSASSLPVNRAAINEPIDPTKAVPRSTSSMSINTHYHDTESAAEAATELAKQAVAAAQVASLLATRRDSSNKEFSVSSDHSTHQKDSQYMDHHHHHPGSRRQSRDSETSSYYAKPGAENRGMGRRHSYNNPGINESDYEEEYTNTEAEAKETMRRRHSYNPRSVPPPATSEIKFDESDYYEEETEPDEPSQGRVSSLPPNRAPPQAPQSGESRQDSSGHQVHPKLPDYDILAARFEAIRHSKGPLI

SEQ ID NO: 69694 - protein, 411 aa, Arabidopsis thaliana
  peptide (1)..(411): Ceres Seq. ID no. 1823156
  misc_feature (1)..(103): Pfam Name: Eukaryotic protein of unknown function, DUF292 Pfam Description: Eukaryotic protein of unknown function, DUF292
  misc_feature (1)..(411): Homolog of NCBI NO: 15237108 NR Description: putative protein; protein id: At4g35730.1
  misc_feature (1)..(372): Homolog of NCBI NO: 40253290 NR Description: unknown protein [Oryza sativa (japonica
  misc_feature (1)..(258): Homolog of NCBI NO: 15218545 NR Description: hypothetical protein; protein id: At1g34220.1
  misc_feature (113)..(258): Homolog of NCBI NO: 33589706 NR Description: At1g34220 [Arabidopsis thaliana]
  misc_feature (1)..(111): Homolog of NCBI NO: 33589706 NR Description: At1g34220 [Arabidopsis thaliana]
  misc_feature (1)..(164): Homolog of NCBI NO: 18395668 NR Description: expressed protein; protein id: At1g25420.1, by cDNA: 7917., supported by cDNA: gi_20465253 [Arabidopsis
  misc_feature (1)..(164): Homolog of NCBI NO: 21595428 NR Description: unknown [Arabidopsis thaliana]
  misc_feature (1)..(395): Homolog of NCBI NO: 15224833 NR Description: hypothetical protein; protein id: At2g19710.1
  misc_feature (1)..(395): Homolog of NCBI NO: 34222084 NR Description: At2g19710 [Arabidopsis thaliana]
  misc_feature (1)..(210): Homolog of NCBI NO: 34910388 NR Description: P0692C11.15 [Oryza sativa (japonica
MRRDIAVLLQSGQDATARIRVEHVIREQNIQAANEIIELFCELIVSRLTIITKQKQCPVDLKEGIASLIFAAPRCSEIPELGDLRDIFAKKYGKDFVSAATDLRPSCGVNRMLIDKLSVRNPGGEYKLKIMKEIAKEFQVDWDTTETEQELLKPQEESIDGPRKFVSASSLPVNRAAINEPIDPTKAVPRSTSSMSINTHYHDTESAAEAATELAKQAVAAAQVASLLATRRDSSNKEFSVSSDHSTHQKDSQYMDHHHHHPGSRRQSRDSETSSYYAKPGAENRGMGRRHSYNNPGINESDYEEEYTNTEAEAKETMRRRHSYNPRSVPPPATSEIKFDESDYYEEETEPDEPSQGRVSSLPPNRAPPQAPQSGESRQDSSGHQVHPKLPDYDILAARFEAIRHSKGPLI

SEQ ID NO: 69695 - protein, 300 aa, Arabidopsis thaliana
  peptide (1)..(300): Ceres Seq. ID no. 1823157
  misc_feature (1)..(300): Homolog of NCBI NO: 15237108 NR Description: putative protein; protein id: At4g35730.1
  misc_feature (1)..(261): Homolog of NCBI NO: 40253290 NR Description: unknown protein [Oryza sativa (japonica
  misc_feature (1)..(147): Homolog of NCBI NO: 15218545 NR Description: hypothetical protein; protein id: At1g34220.1
  misc_feature (2)..(147): Homolog of NCBI NO: 33589706 NR Description: At1g34220 [Arabidopsis thaliana]
  misc_feature (1)..(53): Homolog of NCBI NO: 18395668 NR Description: expressed protein; protein id: At1g25420.1, by cDNA: 7917., supported by cDNA: gi_20465253 [Arabidopsis
  misc_feature (1)..(53): Homolog of NCBI NO: 21595428 NR Description: unknown [Arabidopsis thaliana]
  misc_feature (1)..(284): Homolog of NCBI NO: 15224833 NR Description: hypothetical protein; protein id: At2g19710.1
  misc_feature (1)..(284): Homolog of NCBI NO: 34222084 NR Description: At2g19710 [Arabidopsis thaliana]
  misc_feature (1)..(99): Homolog of NCBI NO: 34910388 NR Description: P0692C11.15 [Oryza sativa (japonica
  misc_feature (1)..(136): Homolog of NCBI NO: 34911298 NR Description: P0519D04.18 [Oryza sativa (japonica
MLIDKLSVRNPGGEYKLKIMKEIAKEFQVDWDTTETEQELLKPQEESIDGPRKFVSASSLPVNRAAINEPIDPTKAVPRSTSSMSINTHYHDTESAAEAATELAKQAVAAAQVASLLATRRDSSNKEFSVSSDHSTHQKDSQYMDHHHHHPGSRRQSRDSETSSYYAKPGAENRGMGRRHSYNNPGINESDYEEEYTNTEAEAKETMRRRHSYNPRSVPPPATSEIKFDESDYYEEETEPDEPSQGRVSSLPPNRAPPQAPQSGESRQDSSGHQVHPKLPDYDILAARFEAIRHSKGPLI

SEQ ID NO: 69696 - DNA, 1512 bp, Arabidopsis thaliana
  misc_feature (1)..(1512): Ceres Seq. ID no. 1823172
  misc_feature: MA Experiment ID: 20000437 Result: Down-regulated in Transcription
  misc_feature: MA Experiment 20000437 PARAMETER Experiment Name: At_Drought_P Parameter: Age (day) Value: 8
  misc_feature: MA Experiment 20000437 PARAMETER Experiment Name: At_Drought_P Parameter: Organism Value: A. thaliana
  misc_feature: MA Experiment 20000437 PARAMETER Experiment Name: At_Drought_P Parameter: Plant Line Value: WS
  misc_feature: MA Experiment 20000437 PARAMETER Experiment Name: At_Drought_P Parameter: Timepoint (hr) Value: 24
  misc_feature: MA Experiment 20000437 PARAMETER Experiment Name: At_Drought_P Parameter: Tissue Value: Whole Plant
  misc_feature: MA Experiment 20000437 PARAMETER Experiment Name: At_Drought_P Parameter: Treatment Value: Drought vs. No Drought
  misc_feature: MA Experiment ID: 20000573 Result: Down-regulated in Transcription
  misc_feature: MA Experiment 20000573 PARAMETER Experiment Name: At_100uM_ABA_Mutants__P Parameter: Organism Value: A. thaliana
  misc_feature: MA Experiment 20000573 PARAMETER Experiment Name: At_100uM_ABA_Mutants__P Parameter: Plant Line Value: CS22 vs. Ler wt
  misc_feature: MA Experiment 20000573 PARAMETER Experiment Name: At_100uM_ABA_Mutants__P Parameter: Timepoint (hr) Value: N/A
  misc_feature: MA Experiment 20000573 PARAMETER Experiment Name: At_100uM_ABA_Mutants__P Parameter: Tissue Value: Whole Plant
  misc_feature: MA Experiment 20000573 PARAMETER Experiment Name: At_100uM_ABA_Mutants__P Parameter: Treatment Value: None
  misc_feature: MA Experiment ID: 20000574 Result: Down-regulated in Transcription
  misc_feature: MA Experiment 20000574 PARAMETER Experiment Name: At_100uM_ABA_Mutants__P Parameter: Organism Value: A. thaliana
  misc_feature: MA Experiment 20000574 PARAMETER Experiment Name: At_100uM_ABA_Mutants__P Parameter: Plant Line Value: CS23 vs. Ler wt
  misc_feature: MA Experiment 20000574 PARAMETER Experiment Name: At_100uM_ABA_Mutants__P Parameter: Timepoint (hr) Value: N/A
  misc_feature: MA Experiment 20000574 PARAMETER Experiment Name: At_100uM_ABA_Mutants__P Parameter: Tissue Value: Whole Plant
  misc_feature: MA Experiment 20000574 PARAMETER Experiment Name: At_100uM_ABA_Mutants__P Parameter: Treatment Value: None
  misc_feature: MA Experiment ID: 20001557 Result: Up-regulated in Transcription
  misc_feature: MA Experiment 20001557 PARAMETER Experiment Name: At_Drought_Soil_Dry_P Parameter: Age (day) Value: 27
  misc_feature: MA Experiment 20001557 PARAMETER Experiment Name: At_Drought_Soil_Dry_P Parameter: Organism Value: A. thaliana
  misc_feature: MA Experiment 20001557 PARAMETER Experiment Name: At_Drought_Soil_Dry_P Parameter: Plant Line Value: WS
  misc_feature: MA Experiment 20001557 PARAMETER Experiment Name: At_Drought_Soil_Dry_P Parameter: Post Timepoint (hr) Value: 3
  misc_feature: MA Experiment 20001557 PARAMETER Experiment Name: At_Drought_Soil_Dry_P Parameter: Post-Treatment Value: Re-Water vs. No Drought
  misc_feature: MA Experiment 20001557 PARAMETER Experiment Name: At_Drought_Soil_Dry_P Parameter: Timepoint (day) Value: 13
  misc_feature: MA Experiment 20001557 PARAMETER Experiment Name: At_Drought_Soil_Dry_P Parameter: Treatment Value: Drought vs. No Drought
atggaaggtctcgattcagtcttcttgtctaatcaaaccacacaccaaccggttcgatctgcgagtcttccttcaagaatccatccactctctgttaaactcagaacagctttgagccggctcagtatctggcggagatcttcttcctcaatctcggtttcagcttcgtttgggtatgagacggttctcgttggactcgtgaacctcactgagctctacggttgcgtgcatgagctacttgagtctccttacgtgaaacacactcttcttcatcaccaggaagggaaacttctggacgaatctttagatggatctgttctgttgctcgacgtgtatgaggggacacgggaggtgattgtagcgatgagagaacacgtgacgaatctcaaatctgctcttcgtaggaaaggtagcttagagaaggaggcgaaagcatactttaacttgcggaagaaggcaaagaaagaaatctctaaacagattaatgcactcaagaaaatggaaaccagagatatttccaccaacacagatcaagattcagcgatagcatccacgagtgttctgagagagacaatccaaatcactgtctcgatgttcagacatcttttgttgttcctatcaacaataccaccaccaccatcgcccgcaatattcaagactaccatagggcttttgtcgattcctttcgtatcgccatcattatcagataaatctctgattctgataaaggaaatgaagagtcttgatgatgtctttctgggttctattttggattcgagaaaaactttattcgaagtagaaacaatggagaacgagaagatgaggagagatgtagttgaagatggttttcgtgatctggaggcagaactggactctgtttccaagtgtctagttaaaaacagagttttgttccttaacatcctcaatcttgtttgtgagatatcgcagcaccactcaagccgtgaatttgggtccatgtcttggaaaggaggccgaggaaaaccaaaaggatatggcggcgattatggcaagcctgagccttttgtgattttccctgaaattacgttacctgatccaaaatcaatctcaacagactcgcaattagttgtagttcaaagctactttactttcaataagttttggatgaattctccttatcacttatgcgatggtggtgtttctaagaaagagaaagcgagtttagatattgagagacctgataacttctctaaagaacttgttggagatactcgaagagaacaacggcctgtgaagagagctaaatggagtcaagaagctgatttgcagaaattggatgtgtttgagaagcttgagtctaagtttaagactcaaggcaatgaagagaaagaagacggagaagatgatgaacaagttgtggaatcagaaggagaagaatcagataacggagattatgatcagaatcaagactttgatgatgatgaagacgattataatcatgaggaggatggtggatttgaagaggtgtattaa

SEQ ID NO: 69697 - protein, 503 aa, Arabidopsis thaliana
  peptide (1)..(503): Ceres Seq. ID no. 1823173
  misc_feature (64)..(307): Pfam Name: Arabidopsis protein of unknown function Pfam Description: Arabidopsis protein of unknown function
  misc_feature (1)..(503): Homolog of NCBI NO: 15237097 NR Description: putative protein; protein id: At4g35680.1
  misc_feature (326)..(405): Homolog of NCBI NO: 7487018 NR Description: hypothetical protein T15B16.1 - Arabidopsis >gi|3859595|gb|AAC72861.1| T15B16.1 gene product [Arabidopsis
  misc_feature (437)..(503): Homolog of NCBI NO: 7487018 NR Description: hypothetical protein T15B16.1 - Arabidopsis >gi|3859595|gb|AAC72861.1| T15B16.1 gene product [Arabidopsis
  misc_feature (394)..(501): Homolog of NCBI NO: 7487018 NR Description: hypothetical protein T15B16.1 - Arabidopsis >gi|3859595|gb|AAC72861.1| T15B16.1 gene product [Arabidopsis
  misc_feature (394)..(503): Homolog of NCBI NO: 15234253 NR Description: hypothetical protein; protein id: At4g01590.1
  misc_feature (326)..(496): Homolog of NCBI NO: 15234253 NR Description: hypothetical protein; protein id: At4g01590.1
MEGLDSVFLSNQTTHQPVRSASLPSRIHPLSVKLRTALSRLSIWRRSSSSISVSASFGYETVLVGLVNLTELYGCVHELLESPYVKHTLLHHQEGKLLDESLDGSVLLLDVYEGTREVIVAMREHVTNLKSALRRKGSLEKEAKAYFNLRKKAKKEISKQINALKKMETRDISTNTDQDSAIASTSVLRETIQITVSMFRHLLLFLSTIPPPPSPAIFKTTIGLLSIPFVSPSLSDKSLILIKEMKSLDDVFLGSILDSRKTLFEVETMENEKMRRDVVEDGFRDLEAELDSVSKCLVKNRVLFLNILNLVCEISQHHSSREFGSMSWKGGRGKPKGYGGDYGKPEPFVIFPEITLPDPKSISTDSQLVVVQSYFTFNKFWMNSPYHLCDGGVSKKEKASLDIERPDNFSKELVGDTRREQRPVKRAKWSQEADLQKLDVFEKLESKFKTQGNEEKEDGEDDEQVVESEGEESDNGDYDQNQDFDDDEDDYNHEEDGGFEEVY

SEQ ID NO: 69698 - protein, 382 aa, Arabidopsis thaliana
  peptide (1)..(382): Ceres Seq. ID no. 1823174
  misc_feature (1)..(186): Pfam Name: Arabidopsis protein of unknown function Pfam Description: Arabidopsis protein of unknown function
  misc_feature (1)..(382): Homolog of NCBI NO: 15237097 NR Description: putative protein; protein id: At4g35680.1
  misc_feature (205)..(284): Homolog of NCBI NO: 7487018 NR Description: hypothetical protein T15B16.1 - Arabidopsis >gi|3859595|gb|AAC72861.1| T15B16.1 gene product [Arabidopsis
  misc_feature (316)..(382): Homolog of NCBI NO: 7487018 NR Description: hypothetical protein T15B16.1 - Arabidopsis >gi|3859595|gb|AAC72861.1| T15B16.1 gene product [Arabidopsis
  misc_feature (273)..(380): Homolog of NCBI NO: 7487018 NR Description: hypothetical protein T15B16.1 - Arabidopsis >gi|3859595|gb|AAC72861.1| T15B16.1 gene product [Arabidopsis
  misc_feature (273)..(382): Homolog of NCBI NO: 15234253 NR Description: hypothetical protein; protein id: At4g01590.1
  misc_feature (205)..(375): Homolog of NCBI NO: 15234253 NR Description: hypothetical protein; protein id: At4g01590.1
MREHVTNLKSALRRKGSLEKEAKAYFNLRKKAKKEISKQINALKKMETRDISTNTDQDSAIASTSVLRETIQITVSMFRHLLLFLSTIPPPPSPAIFKTTIGLLSIPFVSPSLSDKSLILIKEMKSLDDVFLGSILDSRKTLFEVETMENEKMRRDVVEDGFRDLEAELDSVSKCLVKNRVLFLNILNLVCEISQHHSSREFGSMSWKGGRGKPKGYGGDYGKPEPFVIFPEITLPDPKSISTDSQLVVVQSYFTFNKFWMNSPYHLCDGGVSKKEKASLDIERPDNFSKELVGDTRREQRPVKRAKWSQEADLQKLDVFEKLESKFKTQGNEEKEDGEDDEQVVESEGEESDNGDYDQNQDFDDDEDDYNHEEDGGFEEVY

SEQ ID NO: 69699 - protein, 337 aa, Arabidopsis thaliana
  peptide (1)..(337): Ceres Seq. ID no. 1823175
  misc_feature (1)..(141): Pfam Name: Arabidopsis protein of unknown function Pfam Description: Arabidopsis protein of unknown function
  misc_feature (1)..(337): Homolog of NCBI NO: 15237097 NR Description: putative protein; protein id: At4g35680.1
  misc_feature (160)..(239): Homolog of NCBI NO: 7487018 NR Description: hypothetical protein T15B16.1 - Arabidopsis >gi|3859595|gb|AAC72861.1| T15B16.1 gene product [Arabidopsis
  misc_feature (271)..(337): Homolog of NCBI NO: 7487018 NR Description: hypothetical protein T15B16.1 - Arabidopsis >gi|3859595|gb|AAC72861.1| T15B16.1 gene product [Arabidopsis
  misc_feature (228)..(335): Homolog of NCBI NO: 7487018 NR Description: hypothetical protein T15B16.1 - Arabidopsis >gi|3859595|gb|AAC72861.1| T15B16.1 gene product [Arabidopsis
  misc_feature (228)..(337): Homolog of NCBI NO: 15234253 NR Description: hypothetical protein; protein id: At4g01590.1
  misc_feature (160)..(330): Homolog of NCBI NO: 15234253 NR Description: hypothetical protein; protein id: At4g01590.1
METRDISTNTDQDSAIASTSVLRETIQITVSMFRHLLLFLSTIPPPPSPAIFKTTIGLLSIPFVSPSLSDKSLILIKEMKSLDDVFLGSILDSRKTLFEVETMENEKMRRDVVEDGFRDLEAELDSVSKCLVKNRVLFLNILNLVCEISQHHSSREFGSMSWKGGRGKPKGYGGDYGKPEPFVIFPEITLPDPKSISTDSQLVVVQSYFTFNKFWMNSPYHLCDGGVSKKEKASLDIERPDNFSKELVGDTRREQRPVKRAKWSQEADLQKLDVFEKLESKFKTQGNEEKEDGEDDEQVVESEGEESDNGDYDQNQDFDDDEDDYNHEEDGGFEEVY

SEQ ID NO: 69700 - DNA, 2754 bp, Arabidopsis thaliana
  misc_feature (1)..(2754): Ceres Seq. ID no. 1823206
  misc_feature: MA Experiment ID: 20000166 Result: Up-regulated in Transcription
  misc_feature: MA Experiment 20000166 PARAMETER Experiment Name: At_100uM_ABA_P Parameter: Age (day) Value: 14
  misc_feature: MA Experiment 20000166 PARAMETER Experiment Name: At_100uM_ABA_P Parameter: Organism Value: A. thaliana
  misc_feature: MA Experiment 20000166 PARAMETER Experiment Name: At_100uM_ABA_P Parameter: Plant Line Value: WS
  misc_feature: MA Experiment 20000166 PARAMETER Experiment Name: At_100uM_ABA_P Parameter: Timepoint (hr) Value: 1
  misc_feature: MA Experiment 20000166 PARAMETER Experiment Name: At_100uM_ABA_P Parameter: Tissue Value: Aerial
  misc_feature: MA Experiment 20000166 PARAMETER Experiment Name: At_100uM_ABA_P Parameter: Treatment Value: 100uM ABA vs. No Treatment
  misc_feature: MA Experiment ID: 20000184 Result: Down-regulated in Transcription
  misc_feature: MA Experiment 20000184 PARAMETER Experiment Name: At_Shoots__P Parameter: Age (day) Value: 7
  misc_feature: MA Experiment 20000184 PARAMETER Experiment Name: At_Shoots__P Parameter: Tissue Value: Shoots vs. Whole Plant
  misc_feature: MA Experiment ID: 20000185 Result: Up-regulated in Transcription
  misc_feature: MA Experiment 20000185 PARAMETER Experiment Name: At_Roots__P Parameter: Age (day) Value: 7 vs. 21
  misc_feature: MA Experiment 20000185 PARAMETER Experiment Name: At_Roots__P Parameter: Organism Value: A. thaliana
  misc_feature: MA Experiment 20000185 PARAMETER Experiment Name: At_Roots__P Parameter: Tissue Value: Roots vs. Whole Plant
  misc_feature: MA Experiment ID: 20000234 Result: Up-regulated in Transcription
  misc_feature: MA Experiment 20000234 PARAMETER Experiment Name: At_Siliques_P Parameter: Age (day) Value: 21
  misc_feature: MA Experiment 20000234 PARAMETER Experiment Name: At_Siliques_P Parameter: Organism Value: A. thaliana
  misc_feature: MA Experiment 20000234 PARAMETER Experiment Name: At_Siliques_P Parameter: Plant Line Value: WS
  misc_feature: MA Experiment 20000234 PARAMETER Experiment Name: At_Siliques_P Parameter: Tissue Value: Less Than 5mm Siliques vs. Whole Plant
  misc_feature: MA Experiment ID: 20000235 Result: Up-regulated in Transcription
  misc_feature: MA Experiment 20000235 PARAMETER Experiment Name: At_Siliques_P Parameter: Age (day) Value: 21
  misc_feature: MA Experiment 20000235 PARAMETER Experiment Name: At_Siliques_P Parameter: Organism Value: A. thaliana
  misc_feature: MA Experiment 20000235 PARAMETER Experiment Name: At_Siliques_P Parameter: Plant Line Value: WS
  misc_feature: MA Experiment 20000235 PARAMETER Experiment Name: At_Siliques_P Parameter: Tissue Value: 5-10mm Siliques vs. Whole Plant
  misc_feature: MA Experiment ID: 20000265 Result: Up-regulated in Transcription
  misc_feature: MA Experiment 20000265 PARAMETER Experiment Name: At_Open_Flower_P Parameter: Age (day) Value: 21
  misc_feature: MA Experiment 20000265 PARAMETER Experiment Name: At_Open_Flower_P Parameter: Plant Line Value: WS
  misc_feature: MA Experiment 20000265 PARAMETER Experiment Name: At_Open_Flower_P Parameter: Tissue Value: Closed Flower vs. Whole Plant
  misc_feature: MA Experiment ID: 20000267 Result: Up-regulated in Transcription
  misc_feature: MA Experiment 20000267 PARAMETER Experiment Name: At_Drought_P Parameter: Age (day) Value: 7
  misc_feature: MA Experiment 20000267 PARAMETER Experiment Name: At_Drought_P Parameter: Organism Value: A. thaliana
  misc_feature: MA Experiment 20000267 PARAMETER Experiment Name: At_Drought_P Parameter: Plant Line Value: WS
  misc_feature: MA Experiment 20000267 PARAMETER Experiment Name: At_Drought_P Parameter: Timepoint (hr) Value: 6
  misc_feature: MA Experiment 20000267 PARAMETER Experiment Name: At_Drought_P Parameter: Tissue Value: Whole Plant
  misc_feature: MA Experiment 20000267 PARAMETER Experiment Name: At_Drought_P Parameter: Treatment Value: Drought vs. No Drought
  misc_feature: MA Experiment ID: 20000436 Result: Up-regulated in Transcription
  misc_feature: MA Experiment 20000436 PARAMETER Experiment Name: At_Drought_P Parameter: Age (day) Value: 7
  misc_feature: MA Experiment 20000436 PARAMETER Experiment Name: At_Drought_P Parameter: Organism Value: A. thaliana
  misc_feature: MA Experiment 20000436 PARAMETER Experiment Name: At_Drought_P Parameter: Plant Line Value: WS
  misc_feature: MA Experiment 20000436 PARAMETER Experiment Name: At_Drought_P Parameter: Timepoint (hr) Value: 12
  misc_feature: MA Experiment 20000436 PARAMETER Experiment Name: At_Drought_P Parameter: Tissue Value: Whole Plant
  misc_feature: MA Experiment 20000436 PARAMETER Experiment Name: At_Drought_P Parameter: Treatment Value: Drought vs. No Drought
  misc_feature: MA Experiment ID: 20000437 Result: Up-regulated in Transcription
  misc_feature: MA Experiment 20000437 PARAMETER Experiment Name: At_Drought_P Parameter: Age (day) Value: 8
  misc_feature: MA Experiment 20000437 PARAMETER Experiment Name: At_Drought_P Parameter: Organism Value: A. thaliana
  misc_feature: MA Experiment 20000437 PARAMETER Experiment Name: At_Drought_P Parameter: Plant Line Value: WS
  misc_feature: MA Experiment 20000437 PARAMETER Experiment Name: At_Drought_P Parameter: Timepoint (hr) Value: 24
  misc_feature: MA Experiment 20000437 PARAMETER Experiment Name: At_Drought_P Parameter: Tissue Value: Whole Plant
  misc_feature: MA Experiment 20000437 PARAMETER Experiment Name: At_Drought_P Parameter: Treatment Value: Drought vs. No Drought
  misc_feature: MA Experiment ID: 20000439 Result: Up-regulated in Transcription
  misc_feature: MA Experiment 20000439 PARAMETER Experiment Name: At_Roots__P Parameter: Age (day) Value: 14 vs. 21
  misc_feature: MA Experiment 20000439 PARAMETER Experiment Name: At_Roots__P Parameter: Organism Value: A. thaliana
  misc_feature: MA Experiment 20000439 PARAMETER Experiment Name: At_Roots__P Parameter: Tissue Value: Roots vs. Whole Plant
  misc_feature: MA Experiment ID: 20000453 Result: Up-regulated in Transcription
  misc_feature: MA Experiment 20000453 PARAMETER Experiment Name: At_100uM_ABA_P Parameter: Age (day) Value: 15
  misc_feature: MA Experiment 20000453 PARAMETER Experiment Name: At_100uM_ABA_P Parameter: Organism Value: A. thaliana
  misc_feature: MA Experiment 20000453 PARAMETER Experiment Name: At_100uM_ABA_P Parameter: Plant Line Value: WS
  misc_feature: MA Experiment 20000453 PARAMETER Experiment Name: At_100uM_ABA_P Parameter: Timepoint (hr) Value: 24
  misc_feature: MA Experiment 20000453 PARAMETER Experiment Name: At_100uM_ABA_P Parameter: Tissue Value: Aerial
  misc_feature: MA Experiment 20000453 PARAMETER Experiment Name: At_100uM_ABA_P Parameter: Treatment Value: 100uM ABA vs. No Treatment
  misc_feature: MA Experiment ID: 20000794 Result: Up-regulated in Transcription
  misc_feature: MA Experiment 20000794 PARAMETER Experiment Name: At_Petals_P Parameter: Age (day) Value: 23-25 days
  misc_feature: MA Experiment 20000794 PARAMETER Experiment Name: At_Petals_P Parameter: Plant Line Value: WS
  misc_feature: MA Experiment 20000794 PARAMETER Experiment Name: At_Petals_P Parameter: Tissue Value: Petals vs. Whole plant
  misc_feature: MA Experiment ID: 20001554 Result: Up-regulated in Transcription
  misc_feature: MA Experiment 20001554 PARAMETER Experiment Name: At_Drought_Soil_Dry_P Parameter: Age (day) Value: 21
  misc_feature: MA Experiment 20001554 PARAMETER Experiment Name: At_Drought_Soil_Dry_P Parameter: Organism Value: A. thaliana
  misc_feature: MA Experiment 20001554 PARAMETER Experiment Name: At_Drought_Soil_Dry_P Parameter: Plant Line Value: WS
  misc_feature: MA Experiment 20001554 PARAMETER Experiment Name: At_Drought_Soil_Dry_P Parameter: Post Timepoint (hr) Value: None
  misc_feature: MA Experiment 20001554 PARAMETER Experiment Name: At_Drought_Soil_Dry_P Parameter: Post-Treatment Value: None
  misc_feature: MA Experiment 20001554 PARAMETER Experiment Name: At_Drought_Soil_Dry_P Parameter: Timepoint (day) Value: 7
  misc_feature: MA Experiment 20001554 PARAMETER Experiment Name: At_Drought_Soil_Dry_P Parameter: Treatment Value: Drought vs. No Drought
  misc_feature: MA Experiment ID: 20001555 Result: Up-regulated in Transcription
  misc_feature: MA Experiment 20001555 PARAMETER Experiment Name: At_Drought_Soil_Dry_P Parameter: Age (day) Value: 24
  misc_feature: MA Experiment 20001555 PARAMETER Experiment Name: At_Drought_Soil_Dry_P Parameter: Organism Value: A. thaliana
  misc_feature: MA Experiment 20001555 PARAMETER Experiment Name: At_Drought_Soil_Dry_P Parameter: Plant Line Value: WS
  misc_feature: MA Experiment 20001555 PARAMETER Experiment Name: At_Drought_Soil_Dry_P Parameter: Post Timepoint (hr) Value: None
  misc_feature: MA Experiment 20001555 PARAMETER Experiment Name: At_Drought_Soil_Dry_P Parameter: Post-Treatment Value: None
  misc_feature: MA Experiment 20001555 PARAMETER Experiment Name: At_Drought_Soil_Dry_P Parameter: Timepoint (day) Value: 10
  misc_feature: MA Experiment 20001555 PARAMETER Experiment Name: At_Drought_Soil_Dry_P Parameter: Treatment Value: Drought vs. No Drought
  misc_feature: MA Experiment ID: 20001556 Result: Up-regulated in Transcription
  misc_feature: MA Experiment 20001556 PARAMETER Experiment Name: At_Drought_Soil_Dry_P Parameter: Age (day) Value: 26
  misc_feature: MA Experiment 20001556 PARAMETER Experiment Name: At_Drought_Soil_Dry_P Parameter: Organism Value: A. thaliana
  misc_feature: MA Experiment 20001556 PARAMETER Experiment Name: At_Drought_Soil_Dry_P Parameter: Plant Line Value: WS
  misc_feature: MA Experiment 20001556 PARAMETER Experiment Name: At_Drought_Soil_Dry_P Parameter: Post Timepoint (hr) Value: None
  misc_feature: MA Experiment 20001556 PARAMETER Experiment Name: At_Drought_Soil_Dry_P Parameter: Post-Treatment Value: None
  misc_feature: MA Experiment 20001556 PARAMETER Experiment Name: At_Drought_Soil_Dry_P Parameter: Timepoint (day) Value: 12
  misc_feature: MA Experiment 20001556 PARAMETER Experiment Name: At_Drought_Soil_Dry_P Parameter: Treatment Value: Drought vs. No Drought
  misc_feature: MA Experiment ID: 20001757 Result: Down-regulated in Transcription
  misc_feature: MA Experiment 20001757 PARAMETER Experiment Name: At_50mM_NH4NO3_L-to-H_P Parameter: Timepoint (hr) Value: 6
  misc_feature: MA Experiment 20001757 PARAMETER Experiment Name: At_50mM_NH4NO3_L-to-H_P Parameter: Tissue Value: Leaf
  misc_feature: MA Experiment 20001757 PARAMETER Experiment Name: At_50mM_NH4NO3_L-to-H_P Parameter: Treatment Value: 50mM NH4NO3 vs 100mM Mannitol
  misc_feature: MA Experiment ID: 20001904 Result: Up-regulated in Transcription
  misc_feature: MA Experiment 20001904 PARAMETER Experiment Name: At_Drought_Reproduction_P Parameter: Age (day) Value: 37
  misc_feature: MA Experiment 20001904 PARAMETER Experiment Name: At_Drought_Reproduction_P Parameter: Organism Value: A. thaliana
  misc_feature: MA Experiment 20001904 PARAMETER Experiment Name: At_Drought_Reproduction_P Parameter: Plant Line Value: WS
  misc_feature: MA Experiment 20001904 PARAMETER Experiment Name: At_Drought_Reproduction_P Parameter: Timepoint (day) Value: 7
  misc_feature: MA Experiment 20001904 PARAMETER Experiment Name: At_Drought_Reproduction_P Parameter: Tissue Value: Rosettes
  misc_feature: MA Experiment 20001904 PARAMETER Experiment Name: At_Drought_Reproduction_P Parameter: Treatment Value: Drought vs. No Drought
  misc_feature: MA Experiment ID: 20001905 Result: Up-regulated in Transcription
  misc_feature: MA Experiment 20001905 PARAMETER Experiment Name: At_Drought_Reproduction_P Parameter: Age (day) Value: 40
  misc_feature: MA Experiment 20001905 PARAMETER Experiment Name: At_Drought_Reproduction_P Parameter: Organism Value: A. thaliana
  misc_feature: MA Experiment 20001905 PARAMETER Experiment Name: At_Drought_Reproduction_P Parameter: Plant Line Value: WS
  misc_feature: MA Experiment 20001905 PARAMETER Experiment Name: At_Drought_Reproduction_P Parameter: Timepoint (day) Value: 10
  misc_feature: MA Experiment 20001905 PARAMETER Experiment Name: At_Drought_Reproduction_P Parameter: Tissue Value: Rosettes
  misc_feature: MA Experiment 20001905 PARAMETER Experiment Name: At_Drought_Reproduction_P Parameter: Treatment Value: Drought vs. No Drought
atgttcgtgaagaagttggtcgagatagcagccaagaagcctggaggaagttcatcagaaggactgagagctaatgacgttgagccacgtatcgctctgcattacggaatcccttcaggttctcacttgtttgcttatgatccatttcagaagatcctcgccgtttccaccaattatgttggagattcttctggtaatgtatcagtgtttaagatcgaacaagattctaatcaagttatacaactggagtacaccataccttacctagcatcaaatggaagcagagtttcagttggctatagcaatggagatattctaatatggagcattccttccaaaggagaatgctcgccagagagttctgctatgatttgcaagcttaacctcggatacaaatccgaaaagataccaatagcttctctgaaatgggtttatgctgaagggaaggcaagccgggtttatgtcattggatcatcctcaaactcgttgcaggtggttttgttgaatgagcaaaccgaaactcggatgattaagctgggacttcatgtttctgagccttgtgctgatatggagatgatcatagctgatgttaatgaacagagcaagcataaacaagattttctgtttgttcttggaaagtctggacgtgtctatgcttacgatgattatatgattgagaagtatctgattcagtctcagtccaaatcatctccttccctcccaaaggaaactgtggttaagctgccattttcagattcaagcagcattaccgtaggaaaattcctcacaaatccttcacacttactcaatctatcagatgaggattatgctcagctggcgaaagatgctgtgccgtttcttccttttcatacagttccaaaggaaagttcccgttctgcacattttcctggtttcacaaaggttaagaatgtttacatcacaggacactgtgacggaaccattagtgtatgggacatgacctgttcttttcccattcttgtcttgtttctgaaagaacagatagatcaagatgtatcttcacgcggaaatgcggcattgacagctttacattatgacagcaactcaagacttcttgtttctggtgatcataacggaatggttcgcctttataggttcaaacctgagccatacctaacagaaaacagttttatccctttccaaggaagcttaaagaaaggaaataaccatattgttcaaagtgttaagtacatcaagcttactggttccataacctgtattcagaagagccaaaactcaaaacatctcgctattggatcagatcaaggacatgattctttagttgaggtgattgatgcgttaacaccggtttacttacaggtttctctggttgacattgaggaagcaaatgtgttatacacaaaacacattgcaagtgatatatgtccagggatcatctccttgcaattcgagagttgcattgtgcaaggcttcgagaagaacgtgttagtggttgctatgagagactcgtcggtttttgctctggacagcgacacgggaaatatgattggaaccaacatgattaagcctaaaaagccattcaaggttctgtatatgcagatcctagatggaaagcaagatacttcaggaaatggatttgatacgagcagagagagcacagttgaggagatctcgataaggcagccttcggttttggtttgttcggagaaagctatatatatctactccttggctcacgttgtccagggagtgaagaaggtcctccacaagaaaaagttcagttcttcacccatttgctcagcttccacattctatggaacctctggtgttggtcttacacttgttttcacagatggaactgttgagataaggtctttgccagaactctcccagctaaaacaaacttccattagaggcttcacatattcttcaccaaaaccaaactcgttaccagagattaccatatccgcttcttgggatggagatctagtcatggtgaatggagatgatgaacttattgttagctcagttttacctcaaaaggaaacttttaggcttgtcgagtccatgaatcgagtttacaagaaagataactcggtttgtcacgaaggaatcatcacatcatcatctccaagggaaaagaagagtatgtttggttctgttttcaagactaaatcaaagcgcacaactgatacagaaccagaaagctccaaggaaacgatcgaggagctgtctaaaatcttctctacagctaatttcccctggaacaacaatgttgagaatagtagagagatcaatacaattactagggtggaagatgaagaagagttggacatagatgacattgacattgacgatcatcatcctaatcaacaacaacaagagaagcctaaagaacaagggatattgtcagggcttagtaaacagaagatggcgaataggtttagtaatttcaaaggtaagctgaaacagatggcagctaagaatgagaagagtgttgtaaccaatgacgagaagcatgaggagaaaaacggcgccacagttgatcagatcaagaagaaatacgggtttacctcgtccgatgaaatgggagctgccaaaatggctcagagcaaacttcaagacaacctgaaaaagttacagggaattagcttgaggacgacggaaatggaagatactgcaaagtctttctcctctacggcaaaggaactactaaacgctgttgagttcaataaacagagctcaaaatcttag

SEQ ID NO: 69701 - protein, 917 aa, Arabidopsis thaliana
  peptide (1)..(917): Ceres Seq. ID no. 1823207
  misc_feature (436)..(915): Homolog of NCBI NO: 38345401 NR Description: OSJNBa0017B10.7 [Oryza sativa (japonica
  misc_feature (47)..(258): Homolog of NCBI NO: 38345401 NR Description: OSJNBa0017B10.7 [Oryza sativa (japonica
  misc_feature (1)..(96): Homolog of NCBI NO: 38345401 NR Description: OSJNBa0017B10.7 [Oryza sativa (japonica
  misc_feature (26)..(99): Homolog of NCBI NO: 38345401 NR Description: OSJNBa0017B10.7 [Oryza sativa (japonica
  misc_feature (250)..(446): Homolog of NCBI NO: 38345401 NR Description: OSJNBa0017B10.7 [Oryza sativa (japonica
  misc_feature (51)..(378): Homolog of NCBI NO: 15239173 NR Description: putative protein; protein id: At5g05570.1 thaliana] >gi|10178134|dbj|BAB11546.1|
  misc_feature (3)..(110): Homolog of NCBI NO: 34898238 NR Description: P0034A04.30 [Oryza sativa (japonica >gi|29837189|dbj|BAC75571.1| hypothetical protein [Oryza sativa
  misc_feature (823)..(913): Homolog of NCBI NO: 34898238 NR Description: P0034A04.30 [Oryza sativa (japonica >gi|29837189|dbj|BAC75571.1| hypothetical protein [Oryza sativa
MFVKKLVEIAAKKPGGSSSEGLRANDVEPRIALHYGIPSGSHLFAYDPFQKILAVSTNYVGDSSGNVSVFKIEQDSNQVIQLEYTIPYLASNGSRVSVGYSNGDILIWSIPSKGECSPESSAMICKLNLGYKSEKIPIASLKWVYAEGKASRVYVIGSSSNSLQVVLLNEQTETRMIKLGLHVSEPCADMEMIIADVNEQSKHKQDFLFVLGKSGRVYAYDDYMIEKYLIQSQSKSSPSLPKETVVKLPFSDSSSITVGKFLTNPSHLLNLSDEDYAQLAKDAVPFLPFHTVPKESSRSAHFPGFTKVKNVYITGHCDGTISVWDMTCSFPILVLFLKEQIDQDVSSRGNAALTALHYDSNSRLLVSGDHNGMVRLYRFKPEPYLTENSFIPFQGSLKKGNNHIVQSVKYIKLTGSITCIQKSQNSKHLAIGSDQGHDSLVEVIDALTPVYLQVSLVDIEEANVLYTKHIASDICPGIISLQFESCIVQGFEKNVLVVAMRDSSVFALDSDTGNMIGTNMIKPKKPFKVLYMQILDGKQDTSGNGFDTSRESTVEEISIRQPSVLVCSEKAIYIYSLAHVVQGVKKVLHKKKFSSSPICSASTFYGTSGVGLTLVFTDGTVEIRSLPELSQLKQTSIRGFTYSSPKPNSLPEITISASWDGDLVMVNGDDELIVSSVLPQKETFRLVESMNRVYKKDNSVCHEGIITSSSPREKKSMFGSVFKTKSKRTTDTEPESSKETIEELSKIFSTANFPWNNNVENSREINTITRVEDEEELDIDDIDIDDHHPNQQQQEKPKEQGILSGLSKQKMANRFSNFKGKLKQMAAKNEKSVVTNDEKHEEKNGATVDQIKKKYGFTSSDEMGAAKMAQSKLQDNLKKLQGISLRTTEMEDTAKSFSSTAKELLNAVEFNKQSSKS

SEQ ID NO: 69702 - protein, 795 aa, Arabidopsis thaliana
  peptide (1)..(795): Ceres Seq. ID no. 1823208
  misc_feature (314)..(793): Homolog of NCBI NO: 38345401 NR Description: OSJNBa0017B10.7 [Oryza sativa (japonica
  misc_feature (1)..(136): Homolog of NCBI NO: 38345401 NR Description: OSJNBa0017B10.7 [Oryza sativa (japonica
  misc_feature (128)..(324): Homolog of NCBI NO: 38345401 NR Description: OSJNBa0017B10.7 [Oryza sativa (japonica
  misc_feature (1)..(256): Homolog of NCBI NO: 15239173 NR Description: putative protein; protein id: At5g05570.1 thaliana] >gi|10178134|dbj|BAB11546.1|
  misc_feature (701)..(791): Homolog of NCBI NO: 34898238 NR Description: P0034A04.30 [Oryza sativa (japonica >gi|29837189|dbj|BAC75571.1| hypothetical protein [Oryza sativa
MICKLNLGYKSEKIPIASLKWVYAEGKASRVYVIGSSSNSLQVVLLNEQTETRMIKLGLHVSEPCADMEMIIADVNEQSKHKQDFLFVLGKSGRVYAYDDYMIEKYLIQSQSKSSPSLPKETVVKLPFSDSSSITVGKFLTNPSHLLNLSDEDYAQLAKDAVPFLPFHTVPKESSRSAHFPGFTKVKNVYITGHCDGTISVWDMTCSFPILVLFLKEQIDQDVSSRGNAALTALHYDSNSRLLVSGDHNGMVRLYRFKPEPYLTENSFIPFQGSLKKGNNHIVQSVKYIKLTGSITCIQKSQNSKHLAIGSDQGHDSLVEVIDALTPVYLQVSLVDIEEANVLYTKHIASDICPGIISLQFESCIVQGFEKNVLVVAMRDSSVFALDSDTGNMIGTNMIKPKKPFKVLYMQILDGKQDTSGNGFDTSRESTVEEISIRQPSVLVCSEKAIYIYSLAHVVQGVKKVLHKKKFSSSPICSASTFYGTSGVGLTLVFTDGTVEIRSLPELSQLKQTSIRGFTYSSPKPNSLPEITISASWDGDLVMVNGDDELIVSSVLPQKETFRLVESMNRVYKKDNSVCHEGIITSSSPREKKSMFGSVFKTKSKRTTDTEPESSKETIEELSKIFSTANFPWNNNVENSREINTITRVEDEEELDIDDIDIDDHHPNQQQQEKPKEQGILSGLSKQKMANRFSNFKGKLKQMAAKNEKSVVTNDEKHEEKNGATVDQIKKKYGFTSSDEMGAAKMAQSKLQDNLKKLQGISLRTTEMEDTAKSFSSTAKELLNAVEFNKQSSKS

SEQ ID NO: 69703 - protein, 742 aa, Arabidopsis thaliana
  peptide (1)..(742): Ceres Seq. ID no. 1823209
  misc_feature (261)..(740): Homolog of NCBI NO: 38345401 NR Description: OSJNBa0017B10.7 [Oryza sativa (japonica
  misc_feature (1)..(83): Homolog of NCBI NO: 38345401 NR Description: OSJNBa0017B10.7 [Oryza sativa (japonica
  misc_feature (75)..(271): Homolog of NCBI NO: 38345401 NR Description: OSJNBa0017B10.7 [Oryza sativa (japonica
  misc_feature (1)..(203): Homolog of NCBI NO: 15239173 NR Description: putative protein; protein id: At5g05570.1 thaliana] >gi|10178134|dbj|BAB11546.1|
  misc_feature (648)..(738): Homolog of NCBI NO: 34898238 NR Description: P0034A04.30 [Oryza sativa (japonica >gi|29837189|dbj|BAC75571.1| hypothetical protein [Oryza sativa
MIKLGLHVSEPCADMEMIIADVNEQSKHKQDFLFVLGKSGRVYAYDDYMIEKYLIQSQSKSSPSLPKETVVKLPFSDSSSITVGKFLTNPSHLLNLSDEDYAQLAKDAVPFLPFHTVPKESSRSAHFPGFTKVKNVYITGHCDGTISVWDMTCSFPILVLFLKEQIDQDVSSRGNAALTALHYDSNSRLLVSGDHNGMVRLYRFKPEPYLTENSFIPFQGSLKKGNNHIVQSVKYIKLTGSITCIQKSQNSKHLAIGSDQGHDSLVEVIDALTPVYLQVSLVDIEEANVLYTKHIASDICPGIISLQFESCIVQGFEKNVLVVAMRDSSVFALDSDTGNMIGTNMIKPKKPFKVLYMQILDGKQDTSGNGFDTSRESTVEEISIRQPSVLVCSEKAIYIYSLAHVVQGVKKVLHKKKFSSSPICSASTFYGTSGVGLTLVFTDGTVEIRSLPELSQLKQTSIRGFTYSSPKPNSLPEITISASWDGDLVMVNGDDELIVSSVLPQKETFRLVESMNRVYKKDNSVCHEGIITSSSPREKKSMFGSVFKTKSKRTTDTEPESSKETIEELSKIFSTANFPWNNNVENSREINTITRVEDEEELDIDDIDIDDHHPNQQQQEKPKEQGILSGLSKQKMANRFSNFKGKLKQMAAKNEKSVVTNDEKHEEKNGATVDQIKKKYGFTSSDEMGAAKMAQSKLQDNLKKLQGISLRTTEMEDTAKSFSSTAKELLNAVEFNKQSSKS

SEQ ID NO: 69704 - DNA, 1545 bp, Arabidopsis thaliana
  misc_feature (1)..(1545): Ceres Seq. ID no. 1823437
  misc_feature: MA Experiment ID: 20000794 Result: Up-regulated in Transcription
  misc_feature: MA Experiment 20000794 PARAMETER Experiment Name: At_Petals_P Parameter: Age (day) Value: 23-25 days
  misc_feature: MA Experiment 20000794 PARAMETER Experiment Name: At_Petals_P Parameter: Plant Line Value: WS
  misc_feature: MA Experiment 20000794 PARAMETER Experiment Name: At_Petals_P Parameter: Tissue Value: Petals vs. Whole plant
  misc_feature: MA Experiment ID: 20001248 Result: Down-regulated in Transcription
  misc_feature: MA Experiment 20001248 PARAMETER Experiment Name: At_Far-red-induction_P Parameter: Age (day) Value: 7
  misc_feature: MA Experiment 20001248 PARAMETER Experiment Name: At_Far-red-induction_P Parameter: Light Value: Far-red vs. White
  misc_feature: MA Experiment 20001248 PARAMETER Experiment Name: At_Far-red-induction_P Parameter: Organism Value: A. thaliana
  misc_feature: MA Experiment 20001248 PARAMETER Experiment Name: At_Far-red-induction_P Parameter: Plant Line Value: Columbia
  misc_feature: MA Experiment 20001248 PARAMETER Experiment Name: At_Far-red-induction_P Parameter: Timepoint (hr) Value: 4
  misc_feature: MA Experiment 20001248 PARAMETER Experiment Name: At_Far-red-induction_P Parameter: Tissue Value: Whole Plant
atgcatctgattaatgcggtggcggcggcgaggattttatccggaatcggacaatctaacggtaataacggaggagaagcgattccgtttggatcgtttgagtggatcacttacgccggaatatcttgtttcctcgtactcttcgccgggattatgtctggtcttactttgggacttatgtctcttggtcttgtcgagcttgagattcttcaacgtagtggtactcctaatgagaagaaacaagccgctgcgatttttccggttgttcagaaacagcatcagcttttagtgacactgcttctgtgtaatgctatggctatggaggggcttcctatatatttggataagttattcaatgaatacgttgcgattattctttctgtcacattcgttcttgcttacggtgaggttattcctcaagcgatatgcactaggtatggactcgcggttggagcgaattttgtctggcttgtccgcattttaatgactctctgctatccgattgcctttcccattggcaaggtaaatatagtgtgtttggtcaagaatgttttggaatgtagtctgattttagatttggtgctgggacacaatgatgctttatttaggcgggctcagttgaaagctcttgtatccattcacagccaagaggctggtaagggaggtgagcttacacatgatgagacgacaatcattagtggagctcttgatttgactgagaagactgcacaagaagccatgacaccaattgagtctaccttctccttggatgtaaattcaaaattggattgggaagctatggggaagattctggcacgaggccatagccgcgttcctgtctactctgggaatccgaaaaacgttatcggacttctcttggtaatgttgctgactcttattttgcatgtttcaatggtggcttatcatgtttctgcaaactctaatcaagaaattgttctgttttctagggttccagctgatatgcctctctatgatatactgaatgagtttcaaaagggaagcagtcacatggctgcagttgtgaaggttaaggggaaaagcaaagtcccaccttcaactttgcttgaagaacacactgatgaaagcaatgactccgacttgactgcacctttgttactaaaacgagagggaaaccatgacaatgtcattgtcacaatcgacaaggctaatggacaatctttctttcaaaacaacgagagtggacctcacgggttttcacatacttcagaggctatcgaggatggtgaggtaattggtatcatcactttagaagatgtctttgaagaacttttgcaagaagagattgtggatgaaactgatgaatatgttgacgtacataaaaggattcgagtagcagcagcagcggctgcttcatcaatagcgagagctccttcaagccggaagttgcttgcgcaaaagggaactggaggacaaaataagcaagggcagacgaataaagttcctggtcaggaacaagataaaatgcttggaactattaccgagccgattcgaagaaacaactga

SEQ ID NO: 69705 - protein, 514 aa, Arabidopsis thaliana
  peptide (1)..(514): Ceres Seq. ID no. 1823438
  misc_feature (37)..(228): Pfam Name: Domain of unknown function DUF21 Pfam Description: Domain of unknown function DUF21
  misc_feature (1)..(514): Homolog of NCBI NO: 15236442 NR Description: hypothetical protein; protein id: At4g14240.1
  misc_feature (323)..(514): Homolog of NCBI NO: 30682755 NR Description: expressed protein [Arabidopsis thaliana]
  misc_feature (1)..(158): Homolog of NCBI NO: 30682755 NR Description: expressed protein [Arabidopsis thaliana]
  misc_feature (189)..(263): Homolog of NCBI NO: 30682755 NR Description: expressed protein [Arabidopsis thaliana]
  misc_feature (323)..(514): Homolog of NCBI NO: 7485191 NR Description: hypothetical protein - Arabidopsis thaliana hypothetical protein [Arabidopsis thaliana]
  misc_feature (1)..(158): Homolog of NCBI NO: 7485191 NR Description: hypothetical protein - Arabidopsis thaliana hypothetical protein [Arabidopsis thaliana]
  misc_feature (189)..(263): Homolog of NCBI NO: 7485191 NR Description: hypothetical protein - Arabidopsis thaliana hypothetical protein [Arabidopsis thaliana]
  misc_feature (26)..(510): Homolog of NCBI NO: 15218765 NR Description: unknown protein; protein id: At1g03270.1
  misc_feature (38)..(451): Homolog of NCBI NO: 22329131 NR Description: putative protein; protein id: At4g33700.1, by cDNA: gi_17381275, supported by cDNA: gi_20856057 [Arabidopsis >gi|17381276|gb|AAL36056.1| AT4g33700/T16L1_190 [Arabidopsis
  misc_feature (38)..(451): Homolog of NCBI NO: 30679136 NR Description: CBS domain containing protein [Arabidopsis
MHLINAVAAARILSGIGQSNGNNGGEAIPFGSFEWITYAGISCFLVLFAGIMSGLTLGLMSLGLVELEILQRSGTPNEKKQAAAIFPVVQKQHQLLVTLLLCNAMAMEGLPIYLDKLFNEYVAIILSVTFVLAYGEVIPQAICTRYGLAVGANFVWLVRILMTLCYPIAFPIGKVNIVCLVKNVLECSLILDLVLGHNDALFRRAQLKALVSIHSQEAGKGGELTHDETTIISGALDLTEKTAQEAMTPIESTFSLDVNSKLDWEAMGKILARGHSRVPVYSGNPKNVIGLLLVMLLTLILHVSMVAYHVSANSNQEIVLFSRVPADMPLYDILNEFQKGSSHMAAVVKVKGKSKVPPSTLLEEHTDESNDSDLTAPLLLKREGNHDNVIVTIDKANGQSFFQNNESGPHGFSHTSEAIEDGEVIGIITLEDVFEELLQEEIVDETDEYVDVHKRIRVAAAAAASSIARAPSSRKLLAQKGTGGQNKQGQTNKVPGQEQDKMLGTITEPIRRNN

SEQ ID NO: 69706 - protein, 463 aa, Arabidopsis thaliana
  peptide (1)..(463): Ceres Seq. ID no. 1823439
  misc_feature (1)..(177): Pfam Name: Domain of unknown function DUF21 Pfam Description: Domain of unknown function DUF21
  misc_feature (1)..(463): Homolog of NCBI NO: 15236442 NR Description: hypothetical protein; protein id: At4g14240.1
  misc_feature (272)..(463): Homolog of NCBI NO: 30682755 NR Description: expressed protein [Arabidopsis thaliana]
  misc_feature (1)..(107): Homolog of NCBI NO: 30682755 NR Description: expressed protein [Arabidopsis thaliana]
  misc_feature (138)..(212): Homolog of NCBI NO: 30682755 NR Description: expressed protein [Arabidopsis thaliana]
  misc_feature (272)..(463): Homolog of NCBI NO: 7485191 NR Description: hypothetical protein - Arabidopsis thaliana hypothetical protein [Arabidopsis thaliana]
  misc_feature (1)..(107): Homolog of NCBI NO: 7485191 NR Description: hypothetical protein - Arabidopsis thaliana hypothetical protein [Arabidopsis thaliana]
  misc_feature (138)..(212): Homolog of NCBI NO: 7485191 NR Description: hypothetical protein - Arabidopsis thaliana hypothetical protein [Arabidopsis thaliana]
  misc_feature (1)..(459): Homolog of NCBI NO: 15218765 NR Description: unknown protein; protein id: At1g03270.1
  misc_feature (1)..(400): Homolog of NCBI NO: 22329131 NR Description: putative protein; protein id: At4g33700.1, by cDNA: gi_17381275, supported by cDNA: gi_20856057 [Arabidopsis >gi|17381276|gb|AAL36056.1| AT4g33700/T16L1_190 [Arabidopsis
  misc_feature (1)..(400): Homolog of NCBI NO: 30679136 NR Description: CBS domain containing protein [Arabidopsis
MSGLTLGLMSLGLVELEILQRSGTPNEKKQAAAIFPVVQKQHQLLVTLLLCNAMAMEGLPIYLDKLFNEYVAIILSVTFVLAYGEVIPQAICTRYGLAVGANFVWLVRILMTLCYPIAFPIGKVNIVCLVKNVLECSLILDLVLGHNDALFRRAQLKALVSIHSQEAGKGGELTHDETTIISGALDLTEKTAQEAMTPIESTFSLDVNSKLDWEAMGKILARGHSRVPVYSGNPKNVIGLLLVMLLTLILHVSMVAYHVSANSNQEIVLFSRVPADMPLYDILNEFQKGSSHMAAVVKVKGKSKVPPSTLLEEHTDESNDSDLTAPLLLKREGNHDNVIVTIDKANGQSFFQNNESGPHGFSHTSEAIEDGEVIGIITLEDVFEELLQEEIVDETDEYVDVHKRIRVAAAAAASSIARAPSSRKLLAQKGTGGQNKQGQTNKVPGQEQDKMLGTITEPIRRNN

SEQ ID NO: 69707 - protein, 455 aa, Arabidopsis thaliana
  peptide (1)..(455): Ceres Seq. ID no. 1823440
  misc_feature (1)..(169): Pfam Name: Domain of unknown function DUF21 Pfam Description: Domain of unknown function DUF21
  misc_feature (1)..(455): Homolog of NCBI NO: 15236442 NR Description: hypothetical protein; protein id: At4g14240.1
  misc_feature (264)..(455): Homolog of NCBI NO: 30682755 NR Description: expressed protein [Arabidopsis thaliana]
  misc_feature (1)..(99): Homolog of NCBI NO: 30682755 NR Description: expressed protein [Arabidopsis thaliana]
  misc_feature (130)..(204): Homolog of NCBI NO: 30682755 NR Description: expressed protein [Arabidopsis thaliana]
  misc_feature (264)..(455): Homolog of NCBI NO: 7485191 NR Description: hypothetical protein - Arabidopsis thaliana hypothetical protein [Arabidopsis thaliana]
  misc_feature (1)..(99): Homolog of NCBI NO: 7485191 NR Description: hypothetical protein - Arabidopsis thaliana hypothetical protein [Arabidopsis thaliana]
  misc_feature (130)..(204): Homolog of NCBI NO: 7485191 NR Description: hypothetical protein - Arabidopsis thaliana hypothetical protein [Arabidopsis thaliana]
  misc_feature (1)..(451): Homolog of NCBI NO: 15218765 NR Description: unknown protein; protein id: At1g03270.1
  misc_feature (1)..(392): Homolog of NCBI NO: 22329131 NR Description: putative protein; protein id: At4g33700.1, by cDNA: gi_17381275, supported by cDNA: gi_20856057 [Arabidopsis >gi|17381276|gb|AAL36056.1| AT4g33700/T16L1_190 [Arabidopsis
  misc_feature (1)..(392): Homolog of NCBI NO: 30679136 NR Description: CBS domain containing protein [Arabidopsis
MSLGLVELEILQRSGTPNEKKQAAAIFPVVQKQHQLLVTLLLCNAMAMEGLPIYLDKLFNEYVAIILSVTFVLAYGEVIPQAICTRYGLAVGANFVWLVRILMTLCYPIAFPIGKVNIVCLVKNVLECSLILDLVLGHNDALFRRAQLKALVSIHSQEAGKGGELTHDETTIISGALDLTEKTAQEAMTPIESTFSLDVNSKLDWEAMGKILARGHSRVPVYSGNPKNVIGLLLVMLLTLILHVSMVAYHVSANSNQEIVLFSRVPADMPLYDILNEFQKGSSHMAAVVKVKGKSKVPPSTLLEEHTDESNDSDLTAPLLLKREGNHDNVIVTIDKANGQSFFQNNESGPHGFSHTSEAIEDGEVIGIITLEDVFEELLQEEIVDETDEYVDVHKRIRVAAAAAASSIARAPSSRKLLAQKGTGGQNKQGQTNKVPGQEQDKMLGTITEPIRRNN

SEQ ID NO: 69708 - DNA, 1449 bp, Arabidopsis thaliana
  misc_feature (1)..(1449): Ceres Seq. ID no. 1823509
  misc_feature: MA Experiment ID: 20000355 Result: Up-regulated in Transcription
  misc_feature: MA Experiment 20000355 PARAMETER Experiment Name: At_Siliques_Sub_P Parameter: Age (day) Value: 21
  misc_feature: MA Experiment 20000355 PARAMETER Experiment Name: At_Siliques_Sub_P Parameter: Organism Value: A. thaliana
  misc_feature: MA Experiment 20000355 PARAMETER Experiment Name: At_Siliques_Sub_P Parameter: Plant Line Value: WS
  misc_feature: MA Experiment 20000355 PARAMETER Experiment Name: At_Siliques_Sub_P Parameter: Tissue Value: Less Than 5mm Siliques vs. Whole Plant
  misc_feature: MA Experiment ID: 20000440 Result: Up-regulated in Transcription
  misc_feature: MA Experiment 20000440 PARAMETER Experiment Name: At_Closed-Flower__Sub_P Parameter: Tissue Value: Closed Flower vs. Whole Plant
atggagaaacccatctccatcacgacggggaagtttcggaccaacaacaacaacaatcataacaatgtctggttcgttgttccactcttctttatcctctgtttcgttctcctctgtttcgactactctgctctcttcaccgacacagacgaaaccgctttctcaattcccgacgttacccagaaatcaacatcctctgaattcacgaaagatgacaacttttctcgatttcccgacgacccatctcctgattcttcctgctccggtcggtatatttacgttcatgaacttccgtatagattcaatggtgatttgcttgataattgctttaagattactagaggaaccgagaaagatatttgtccttacatcgaaaactatggttttggtcctgtcattaagaattacgagaatgtgttgttgaaacaaagttggtttacgaccaatcagttcatgctcgaggtgatattccacaacaagatgataaattacagatgtttgactaatgattcgtcactagcgtctgcggttttcgtgccgttttacgcaggtcttgatatgagtaggtatctttggggtttcaacattacgaaagagtggggtcgaatgtctggtagagaccatttcttggtttcaggaaggattgcttgggatttcaggagacagactgataacgaatctgattggggaagcaagcttcggttcttacccgagtcgcggaacatgtcgatgttgtccatcgaatcgagttcttggaagaatgattacgctattccgtatccgacttgtttccatccaagatcagtggatgagattgtggagtggcaggagctaatgaggtctcgaaaacgcgagtatctattcacctttgcgggtgctccaaggcctgaatataaagactcggttcgagggaagattatagatgagtgtttggagtcaaagaagcaatgttacttgctagactgtaactatgggaatgtgaattgtgacaaccctgtcaatgtgatgaaggttttcaggaactcggtgttttgtcttcagccaccgggctgcattccggtgttcttccatccagggacagcgtacgctcaatacaagtggcatttgcccaagaatcactcgagttactcggtttatctaccggttaaggatgtgaaggagtggaatatcaaaatcaaggagaggttgattgagattccagaggaaagagtggtgaggttgagagaagaggttataaggttgataccgaaggttgtctacgctgatccgaagtacggatcggatgggagtgaagatgcatttgagttggctgtgaagggaatgttggagaggattgaagaagtgagagagatgatgagacaagggaaagatggtagtgatgggtttgatgatagagatgattataagtatactttttctccatatgaagaacctcaagttttggcttaa

SEQ ID NO: 69709 - protein, 482 aa, Arabidopsis thaliana
  peptide (1)..(482): Ceres Seq. ID no. 1823510
  misc_feature (92)..(411): Pfam Name: Exostosin family Pfam Description: Exostosin family
  misc_feature (1)..(482): Homolog of NCBI NO: 15236381 NR Description: hypothetical protein; protein id: At4g13990.1
  misc_feature (1)..(350): Homolog of NCBI NO: 29824391 NR Description: unknown protein [Arabidopsis thaliana]
  misc_feature (196)..(482): Homolog of NCBI NO: 29824391 NR Description: unknown protein [Arabidopsis thaliana]
  misc_feature (144)..(469): Homolog of NCBI NO: 15225735 NR Description: hypothetical protein; protein id: At2g32750.1
  misc_feature (144)..(445): Homolog of NCBI NO: 15225734 NR Description: Exostosin family; protein id: At2g32740.1
  misc_feature (15)..(250): Homolog of NCBI NO: 15225165 NR Description: Exostosin family; protein id: At2g31990.1
  misc_feature (286)..(449): Homolog of NCBI NO: 15225165 NR Description: Exostosin family; protein id: At2g31990.1
  misc_feature (78)..(475): Homolog of NCBI NO: 15227020 NR Description: hypothetical protein; protein id: At2g29040.1
  misc_feature (199)..(479): Homolog of NCBI NO: 25411977 NR Description: hypothetical protein At2g20370 [imported] - thaliana >gi|4512698|gb|AAD21751.1| unknown protein [Arabidopsis
  misc_feature (199)..(479): Homolog of NCBI NO: 30680972 NR Description: expressed protein [Arabidopsis thaliana]
MEKPISITTGKFRTNNNNNHNNVWFVVPLFFILCFVLLCFDYSALFTDTDETAFSIPDVTQKSTSSEFTKDDNFSRFPDDPSPDSSCSGRYIYVHELPYRFNGDLLDNCFKITRGTEKDICPYIENYGFGPVIKNYENVLLKQSWFTTNQFMLEVIFHNKMINYRCLTNDSSLASAVFVPFYAGLDMSRYLWGFNITKEWGRMSGRDHFLVSGRIAWDFRRQTDNESDWGSKLRFLPESRNMSMLSIESSSWKNDYAIPYPTCFHPRSVDEIVEWQELMRSRKREYLFTFAGAPRPEYKDSVRGKIIDECLESKKQCYLLDCNYGNVNCDNPVNVMKVFRNSVFCLQPPGCIPVFFHPGTAYAQYKWHLPKNHSSYSVYLPVKDVKEWNIKIKERLIEIPEERVVRLREEVIRLIPKVVYADPKYGSDGSEDAFELAVKGMLERIEEVREMMRQGKDGSDGFDDRDDYKYTFSPYEEPQVLA

SEQ ID NO: 69710 - protein, 331 aa, Arabidopsis thaliana
  peptide (1)..(331): Ceres Seq. ID no. 1823511
  misc_feature (1)..(260): Pfam Name: Exostosin family Pfam Description: Exostosin family
  misc_feature (48)..(328): Homolog of NCBI NO: 25411977 NR Description: hypothetical protein At2g20370 [imported] - thaliana >gi|4512698|gb|AAD21751.1| unknown protein [Arabidopsis
  misc_feature (1)..(331): Homolog of NCBI NO: 15236381 NR Description: hypothetical protein; protein id: At4g13990.1
  misc_feature (45)..(331): Homolog of NCBI NO: 29824391 NR Description: unknown protein [Arabidopsis thaliana]
  misc_feature (1)..(294): Homolog of NCBI NO: 15225734 NR Description: Exostosin family; protein id: At2g32740.1
  misc_feature (135)..(298): Homolog of NCBI NO: 15225165 NR Description: Exostosin family; protein id: At2g31990.1
  misc_feature (1)..(324): Homolog of NCBI NO: 15227020 NR Description: hypothetical protein; protein id: At2g29040.1
  misc_feature (1)..(99): Homolog of NCBI NO: 15225165 NR Description: Exostosin family; protein id: At2g31990.1
  misc_feature (1)..(318): Homolog of NCBI NO: 15225735 NR Description: hypothetical protein; protein id: At2g32750.1
  misc_feature (1)..(199): Homolog of NCBI NO: 29824391 NR Description: unknown protein [Arabidopsis thaliana]
  misc_feature (48)..(328): Homolog of NCBI NO: 30680972 NR Description: expressed protein [Arabidopsis thaliana]
MLEVIFHNKMINYRCLTNDSSLASAVFVPFYAGLDMSRYLWGFNITKEWGRMSGRDHFLVSGRIAWDFRRQTDNESDWGSKLRFLPESRNMSMLSIESSSWKNDYAIPYPTCFHPRSVDEIVEWQELMRSRKREYLFTFAGAPRPEYKDSVRGKIIDECLESKKQCYLLDCNYGNVNCDNPVNVMKVFRNSVFCLQPPGCIPVFFHPGTAYAQYKWHLPKNHSSYSVYLPVKDVKEWNIKIKERLIEIPEERVVRLREEVIRLIPKVVYADPKYGSDGSEDAFELAVKGMLERIEEVREMMRQGKDGSDGFDDRDDYKYTFSPYEEPQVLA

SEQ ID NO: 69711 - protein, 322 aa, Arabidopsis thaliana
  peptide (1)..(322): Ceres Seq. ID no. 1823512
  misc_feature (1)..(251): Pfam Name: Exostosin family Pfam Description: Exostosin family
  misc_feature (1)..(322): Homolog of NCBI NO: 15236381 NR Description: hypothetical protein; protein id: At4g13990.1
  misc_feature (1)..(190): Homolog of NCBI NO: 29824391 NR Description: unknown protein [Arabidopsis thaliana]
  misc_feature (36)..(322): Homolog of NCBI NO: 29824391 NR Description: unknown protein [Arabidopsis thaliana]
  misc_feature (1)..(309): Homolog of NCBI NO: 15225735 NR Description: hypothetical protein; protein id: At2g32750.1
  misc_feature (1)..(285): Homolog of NCBI NO: 15225734 NR Description: Exostosin family; protein id: At2g32740.1
  misc_feature (1)..(90): Homolog of NCBI NO: 15225165 NR Description: Exostosin family; protein id: At2g31990.1
  misc_feature (126)..(289): Homolog of NCBI NO: 15225165 NR Description: Exostosin family; protein id: At2g31990.1
  misc_feature (1)..(315): Homolog of NCBI NO: 15227020 NR Description: hypothetical protein; protein id: At2g29040.1
  misc_feature (39)..(319): Homolog of NCBI NO: 25411977 NR Description: hypothetical protein At2g20370 [imported] - thaliana >gi|4512698|gb|AAD21751.1| unknown protein [Arabidopsis
  misc_feature (39)..(319): Homolog of NCBI NO: 30680972 NR Description: expressed protein [Arabidopsis thaliana]
MINYRCLTNDSSLASAVFVPFYAGLDMSRYLWGFNITKEWGRMSGRDHFLVSGRIAWDFRRQTDNESDWGSKLRFLPESRNMSMLSIESSSWKNDYAIPYPTCFHPRSVDEIVEWQELMRSRKREYLFTFAGAPRPEYKDSVRGKIIDECLESKKQCYLLDCNYGNVNCDNPVNVMKVFRNSVFCLQPPGCIPVFFHPGTAYAQYKWHLPKNHSSYSVYLPVKDVKEWNIKIKERLIEIPEERVVRLREEVIRLIPKVVYADPKYGSDGSEDAFELAVKGMLERIEEVREMMRQGKDGSDGFDDRDDYKYTFSPYEEPQVLA

SEQ ID NO: 69712 - DNA, 1386 bp, Arabidopsis thaliana
  misc_feature (1)..(1386): Ceres Seq. ID no. 1823594
  misc_feature: MA Experiment ID: 20000314 Result: Up-regulated in Transcription
  misc_feature: MA Experiment 20000314 PARAMETER Experiment Name: At_14day_Shoots-Roots_Sub_P Parameter: Age (day) Value: 14
  misc_feature: MA Experiment 20000314 PARAMETER Experiment Name: At_14day_Shoots-Roots_Sub_P Parameter: Organism Value: A. thaliana
  misc_feature: MA Experiment 20000314 PARAMETER Experiment Name: At_14day_Shoots-Roots_Sub_P Parameter: Plant Line Value: WS
  misc_feature: MA Experiment 20000314 PARAMETER Experiment Name: At_14day_Shoots-Roots_Sub_P Parameter: Tissue Value: Roots vs. Whole Plant
  misc_feature: MA Experiment ID: 20001807 Result: Down-regulated in Transcription
  misc_feature: MA Experiment 20001807 PARAMETER Experiment Name: At_50mM_NH4NO3_L-to-H_Sub_P Parameter: Timepoint (hr) Value: 6
  misc_feature: MA Experiment 20001807 PARAMETER Experiment Name: At_50mM_NH4NO3_L-to-H_Sub_P Parameter: Tissue Value: Leaf
  misc_feature: MA Experiment 20001807 PARAMETER Experiment Name: At_50mM_NH4NO3_L-to-H_Sub_P Parameter: Treatment Value: 50mM NH4NO3 vs 100mM Mannitol
  misc_feature: Pfam Name: Pkinase Pfam Description: Protein kinase domain
atgggtgaagaaaagaggagaatttcaggaagatcagtttcacttccatcgatagacatattactagacgagaaaccaggttggccatttcttaaaagagcaagtttagggacaccacaacaagttcacaaatggcacacacgaaaagtctcagtggtcaattgggtcatgagcttacctgaacggtttccaaatcatcaacagactctaaactatgagacaagcttgataaagaaacaaatcaaggacatattgagagacaataacaaatggttcaactacaatgttcttaggaaagcaacatcagatttctctcaagagaatgtgattgggaaaggaggatgcaacgaagtgtaccgagggattcttgaagatggaaaaggcattgcagtgaaaatcttgaagtcatcatctaaagaagcaatgacaaatttcgttcatgaaatcaacattatctcttctttgagtcaccaaaacatctcaccgttacttggtgtttgtgtccaagacaatgaactaatctccgtttacaatctttcaaacacaggaagtttagaagaaacccttcacggtaagcaaaagggaaagtatgtattatcatgggaagagagattcaagatagctatcgggttggcggaagcattagactatcttcataaccgatgttctaagccagtgattcatagagatgtcaaaacttctaacgtccttctatcacttgagctccaacctcagctgtcagattttggtctgtcgatgtggggaccgacaacatcttctcgatattcgatacaaggtgatgtggtgggaacatttggatatcttgcaccggagtacttcatgtatggaaaagtcagtgataaagttgatgtttacgcctttggagtggttctgcttgaactcatttctggaagaaatcctatttcacctcagaatcctagaggacaagagagtttgcataagcaacacttcgtgaaacctaagaaaagataccttggaatgcaggcaaagcctttgattgataccggaaatttaaaagtactgttggatccagacgttacagatatattcgacgagtctcagtttcaaagaatggtacttgctgcttcacattgcctcacaagatcagccacacatcgtcccaatataagacaaatactgaggctactaagagatgaaaacgaagccgggaaatggattatggaagaagaaggaaatgaagattgcttcgatgacgaggtttacccgaattccagcacagaattacacttaaaccttgcgatgcttgaggtggaagacgatgaaactgcatcaatcagcagcatggagagaagtaacaacagccttttttcttctacttgttcatctagggagcttcaaacataa

SEQ ID NO: 69713 - protein, 461 aa, Arabidopsis thaliana
  peptide (1)..(461): Ceres Seq. ID no. 1823595
  misc_feature: Pfam Name: Pkinase Pfam Description: Protein kinase domain
  misc_feature (1)..(461): Homolog of NCBI NO: 15236248 NR Description: protein kinase - like; protein id: At4g35030.1
  misc_feature (1)..(246): Homolog of NCBI NO: 27754592 NR Description: putative protein kinase [Arabidopsis thaliana]
  misc_feature (2)..(461): Homolog of NCBI NO: 15227291 NR Description: putative protein kinase; protein id: At2g16750.1
  misc_feature (9)..(373): Homolog of NCBI NO: 15223890 NR Description: hypothetical protein; protein id: At1g77280.1
  misc_feature (334)..(444): Homolog of NCBI NO: 15223890 NR Description: hypothetical protein; protein id: At1g77280.1
  misc_feature (90)..(444): Homolog of NCBI NO: 22329713 NR Description: hypothetical protein; protein id: At1g21590.1, by cDNA: gi_18086337 [Arabidopsis thaliana] At1g21590/F24J8_9 [Arabidopsis thaliana]
  misc_feature (92)..(455): Homolog of NCBI NO: 15237563 NR Description: putative protein; protein id: At5g63940.1, by cDNA: gi_20260317 [Arabidopsis thaliana] contains similarity to protein kinase~gene_id:MBM17.4
  misc_feature (92)..(445): Homolog of NCBI NO: 28376688 NR Description: putative serine/threonine kinase [Oryza sativa
  misc_feature (16)..(444): Homolog of NCBI NO: 25518708 NR Description: hypothetical protein F24J8.18 - Arabidopsis >gi|9454581|gb|AAF87904.1|AC015447_14 Similar to protein kinases
  misc_feature (90)..(320): Homolog of NCBI NO: 15224251 NR Description: putative protein kinase; protein id: At2g18890.1
MGEEKRRISGRSVSLPSIDILLDEKPGWPFLKRASLGTPQQVHKWHTRKVSVVNWVMSLPERFPNHQQTLNYETSLIKKQIKDILRDNNKWFNYNVLRKATSDFSQENVIGKGGCNEVYRGILEDGKGIAVKILKSSSKEAMTNFVHEINIISSLSHQNISPLLGVCVQDNELISVYNLSNTGSLEETLHGKQKGKYVLSWEERFKIAIGLAEALDYLHNRCSKPVIHRDVKTSNVLLSLELQPQLSDFGLSMWGPTTSSRYSIQGDVVGTFGYLAPEYFMYGKVSDKVDVYAFGVVLLELISGRNPISPQNPRGQESLHKQHFVKPKKRYLGMQAKPLIDTGNLKVLLDPDVTDIFDESQFQRMVLAASHCLTRSATHRPNIRQILRLLRDENEAGKWIMEEEGNEDCFDDEVYPNSSTELHLNLAMLEVEDDETASISSMERSNNSLFSSTCSSRELQT

SEQ ID NO: 69714 - protein, 405 aa, Arabidopsis thaliana
  peptide (1)..(405): Ceres Seq. ID no. 1823596
  misc_feature: Pfam Name: Pkinase Pfam Description: Protein kinase domain
  misc_feature (1)..(405): Homolog of NCBI NO: 15236248 NR Description: protein kinase - like; protein id: At4g35030.1
  misc_feature (1)..(190): Homolog of NCBI NO: 27754592 NR Description: putative protein kinase [Arabidopsis thaliana]
  misc_feature (1)..(405): Homolog of NCBI NO: 15227291 NR Description: putative protein kinase; protein id: At2g16750.1
  misc_feature (1)..(317): Homolog of NCBI NO: 15223890 NR Description: hypothetical protein; protein id: At1g77280.1
  misc_feature (278)..(388): Homolog of NCBI NO: 15223890 NR Description: hypothetical protein; protein id: At1g77280.1
  misc_feature (34)..(388): Homolog of NCBI NO: 22329713 NR Description: hypothetical protein; protein id: At1g21590.1, by cDNA: gi_18086337 [Arabidopsis thaliana] At1g21590/F24J8_9 [Arabidopsis thaliana]
  misc_feature (36)..(399): Homolog of NCBI NO: 15237563 NR Description: putative protein; protein id: At5g63940.1, by cDNA: gi_20260317 [Arabidopsis thaliana] contains similarity to protein kinase~gene_id:MBM17.4
  misc_feature (36)..(389): Homolog of NCBI NO: 28376688 NR Description: putative serine/threonine kinase [Oryza sativa
  misc_feature (1)..(388): Homolog of NCBI NO: 25518708 NR Description: hypothetical protein F24J8.18 - Arabidopsis >gi|9454581|gb|AAF87904.1|AC015447_14 Similar to protein kinases
  misc_feature (34)..(264): Homolog of NCBI NO: 15224251 NR Description: putative protein kinase; protein id: At2g18890.1
MSLPERFPNHQQTLNYETSLIKKQIKDILRDNNKWFNYNVLRKATSDFSQENVIGKGGCNEVYRGILEDGKGIAVKILKSSSKEAMTNFVHEINIISSLSHQNISPLLGVCVQDNELISVYNLSNTGSLEETLHGKQKGKYVLSWEERFKIAIGLAEALDYLHNRCSKPVIHRDVKTSNVLLSLELQPQLSDFGLSMWGPTTSSRYSIQGDVVGTFGYLAPEYFMYGKVSDKVDVYAFGVVLLELISGRNPISPQNPRGQESLHKQHFVKPKKRYLGMQAKPLIDTGNLKVLLDPDVTDIFDESQFQRMVLAASHCLTRSATHRPNIRQILRLLRDENEAGKWIMEEEGNEDCFDDEVYPNSSTELHLNLAMLEVEDDETASISSMERSNNSLFSSTCSSRELQT

SEQ ID NO: 69715 - protein, 320 aa, Arabidopsis thaliana
  peptide (1)..(320): Ceres Seq. ID no. 1823597
  misc_feature: Pfam Name: Pkinase Pfam Description: Protein kinase domain
  misc_feature (1)..(320): Homolog of NCBI NO: 15236248 NR Description: protein kinase - like; protein id: At4g35030.1
  misc_feature (1)..(105): Homolog of NCBI NO: 27754592 NR Description: putative protein kinase [Arabidopsis thaliana]
  misc_feature (1)..(320): Homolog of NCBI NO: 15227291 NR Description: putative protein kinase; protein id: At2g16750.1
  misc_feature (1)..(232): Homolog of NCBI NO: 15223890 NR Description: hypothetical protein; protein id: At1g77280.1
  misc_feature (193)..(303): Homolog of NCBI NO: 15223890 NR Description: hypothetical protein; protein id: At1g77280.1
  misc_feature (1)..(303): Homolog of NCBI NO: 22329713 NR Description: hypothetical protein; protein id: At1g21590.1, by cDNA: gi_18086337 [Arabidopsis thaliana] At1g21590/F24J8_9 [Arabidopsis thaliana]
  misc_feature (1)..(314): Homolog of NCBI NO: 15237563 NR Description: putative protein; protein id: At5g63940.1, by cDNA: gi_20260317 [Arabidopsis thaliana] contains similarity to protein kinase~gene_id:MBM17.4
  misc_feature (1)..(304): Homolog of NCBI NO: 28376688 NR Description: putative serine/threonine kinase [Oryza sativa
  misc_feature (1)..(303): Homolog of NCBI NO: 25518708 NR Description: hypothetical protein F24J8.18 - Arabidopsis >gi|9454581|gb|AAF87904.1|AC015447_14 Similar to protein kinases
  misc_feature (1)..(179): Homolog of NCBI NO: 15224251 NR Description: putative protein kinase; protein id: At2g18890.1
MTNFVHEINIISSLSHQNISPLLGVCVQDNELISVYNLSNTGSLEETLHGKQKGKYVLSWEERFKIAIGLAEALDYLHNRCSKPVIHRDVKTSNVLLSLELQPQLSDFGLSMWGPTTSSRYSIQGDVVGTFGYLAPEYFMYGKVSDKVDVYAFGVVLLELISGRNPISPQNPRGQESLHKQHFVKPKKRYLGMQAKPLIDTGNLKVLLDPDVTDIFDESQFQRMVLAASHCLTRSATHRPNIRQILRLLRDENEAGKWIMEEEGNEDCFDDEVYPNSSTELHLNLAMLEVEDDETASISSMERSNNSLFSSTCSSRELQT

SEQ ID NO: 69716 - DNA, 636 bp, Arabidopsis thaliana
  misc_feature (1)..(636): Ceres Seq. ID no. 1823640
  misc_feature: MA Experiment ID: 20000307 Result: Up-regulated in Transcription
  misc_feature: MA Experiment 20000307 PARAMETER Experiment Name: At_Germinating_Seeds_Sub_P Parameter: Age (hr) Value: 24 vs. 0
  misc_feature: MA Experiment 20000307 PARAMETER Experiment Name: At_Germinating_Seeds_Sub_P Parameter: Organism Value: A. thaliana
  misc_feature: MA Experiment 20000307 PARAMETER Experiment Name: At_Germinating_Seeds_Sub_P Parameter: Plant Line Value: WS
  misc_feature: MA Experiment 20000307 PARAMETER Experiment Name: At_Germinating_Seeds_Sub_P Parameter: Tissue Value: Germinating Seeds
  misc_feature: MA Experiment ID: 20000355 Result: Down-regulated in Transcription
  misc_feature: MA Experiment 20000355 PARAMETER Experiment Name: At_Siliques_Sub_P Parameter: Age (day) Value: 21
  misc_feature: MA Experiment 20000355 PARAMETER Experiment Name: At_Siliques_Sub_P Parameter: Organism Value: A. thaliana
  misc_feature: MA Experiment 20000355 PARAMETER Experiment Name: At_Siliques_Sub_P Parameter: Plant Line Value: WS
  misc_feature: MA Experiment 20000355 PARAMETER Experiment Name: At_Siliques_Sub_P Parameter: Tissue Value: Less Than 5mm Siliques vs. Whole Plant
  misc_feature: MA Experiment ID: 20000440 Result: Down-regulated in Transcription
  misc_feature: MA Experiment 20000440 PARAMETER Experiment Name: At_Closed-Flower__Sub_P Parameter: Tissue Value: Closed Flower vs. Whole Plant
atggcgaccaaagtttacatagtgtatgtgaaaattatcttctgtctgagtggtgccattgacaatttgaaattagctcaagagattaggaaaggtgctgcttctgttgatggtgttgaagccatactctggcaggtacccgaaacgctccaagaagatgtgctctctaaaatgagtgcaccaccaaagagtgatgctcctattatcaccccaaacgagctcgctgaggctgatggatttatcttcggcttcccaacgaggtttggtatgatggctgctcagttcaaggcatttttagatgcgaccggcggcctttggaggactcagcaactcgccggtaaaccagccggaatcttctacagcacagggtcccaaggtggtggtcaagaaaccaccgcattaactgccattactcagctggttcatcacgggatgatctttgtcccgattggctacacatttggtgccggaatgtttgagatggaaaatgtgaaaggtggaagcccgtacggggcgggaacatttgccggagatgggtcgagacagccaacggaactggagttggggcaagcatttcaccaagggaagtacattgccgccataagtaagaagctcaagggacctgctgctgcttag

SEQ ID NO: 69717 - protein, 211 aa, Arabidopsis thaliana
  peptide (1)..(211): Ceres Seq. ID no. 1823641
  misc_feature (73)..(158): Pfam Name: NADPH-dependent FMN reductase Pfam Description: NADPH-dependent FMN reductase
  misc_feature (1)..(211): Homolog of NCBI NO: 7445353 NR Description: hypothetical protein M4I22.80 - Arabidopsis >gi|3269288|emb|CAA19721.1| putative protein [Arabidopsis >gi|7269580|emb|CAB79582.1| putative protein [Arabidopsis
  misc_feature (1)..(211): Homolog of NCBI NO: 30687535 NR Description: quinone reductase family [Arabidopsis thaliana]
  misc_feature (1)..(210): Homolog of NCBI NO: 15239652 NR Description: quinone reductase, putative; protein id:
  misc_feature (3)..(207): Homolog of NCBI NO: 21068664 NR Description: putative quinone oxidoreductase [Cicer arietinum]
  misc_feature (1)..(207): Homolog of NCBI NO: 5031275 NR Description: unknown [Prunus armeniaca]
  misc_feature (1)..(209): Homolog of NCBI NO: 38636776 NR Description: putative quinone-oxidoreductase QR2 [Oryza sativa
  misc_feature (44)..(209): Homolog of NCBI NO: 37724581 NR Description: putative quinone reductase [Vitis vinifera]
  misc_feature (1)..(210): Homolog of NCBI NO: 12484052 NR Description: quinone-oxidoreductase QR2 [Triphysaria
  misc_feature (1)..(209): Homolog of NCBI NO: 34910128 NR Description: putative 1,4-benzoquinone reductase [Oryza sativa
  misc_feature (1)..(206): Homolog of NCBI NO: 2564066 NR Description: LEDI-3 protein [Lithospermum erythrorhizon]
MATKVYIVYVKIIFCLSGAIDNLKLAQEIRKGAASVDGVEAILWQVPETLQEDVLSKMSAPPKSDAPIITPNELAEADGFIFGFPTRFGMMAAQFKAFLDATGGLWRTQQLAGKPAGIFYSTGSQGGGQETTALTAITQLVHHGMIFVPIGYTFGAGMFEMENVKGGSPYGAGTFAGDGSRQPTELELGQAFHQGKYIAAISKKLKGPAAA

SEQ ID NO: 69718 - protein, 154 aa, Arabidopsis thaliana
  peptide (1)..(154): Ceres Seq. ID no. 1823642
  misc_feature (16)..(101): Pfam Name: NADPH-dependent FMN reductase Pfam Description: NADPH-dependent FMN reductase
  misc_feature (1)..(154): Homolog of NCBI NO: 7445353 NR Description: hypothetical protein M4I22.80 - Arabidopsis >gi|3269288|emb|CAA19721.1| putative protein [Arabidopsis >gi|7269580|emb|CAB79582.1| putative protein [Arabidopsis
  misc_feature (1)..(154): Homolog of NCBI NO: 30687535 NR Description: quinone reductase family [Arabidopsis thaliana]
  misc_feature (1)..(153): Homolog of NCBI NO: 15239652 NR Description: quinone reductase, putative; protein id:
  misc_feature (1)..(150): Homolog of NCBI NO: 21068664 NR Description: putative quinone oxidoreductase [Cicer arietinum]
  misc_feature (1)..(150): Homolog of NCBI NO: 5031275 NR Description: unknown [Prunus armeniaca]
  misc_feature (1)..(152): Homolog of NCBI NO: 38636776 NR Description: putative quinone-oxidoreductase QR2 [Oryza sativa
  misc_feature (1)..(152): Homolog of NCBI NO: 37724581 NR Description: putative quinone reductase [Vitis vinifera]
  misc_feature (1)..(153): Homolog of NCBI NO: 12484052 NR Description: quinone-oxidoreductase QR2 [Triphysaria
  misc_feature (1)..(152): Homolog of NCBI NO: 34910128 NR Description: putative 1,4-benzoquinone reductase [Oryza sativa
  misc_feature (1)..(149): Homolog of NCBI NO: 2564066 NR Description: LEDI-3 protein [Lithospermum erythrorhizon]
MSAPPKSDAPIITPNELAEADGFIFGFPTRFGMMAAQFKAFLDATGGLWRTQQLAGKPAGIFYSTGSQGGGQETTALTAITQLVHHGMIFVPIGYTFGAGMFEMENVKGGSPYGAGTFAGDGSRQPTELELGQAFHQGKYIAAISKKLKGPAAA

SEQ ID NO: 69719 - protein, 122 aa, Arabidopsis thaliana
  peptide (1)..(122): Ceres Seq. ID no. 1823643
  misc_feature (1)..(69): Pfam Name: NADPH-dependent FMN reductase Pfam Description: NADPH-dependent FMN reductase
  misc_feature (1)..(122): Homolog of NCBI NO: 7445353 NR Description: hypothetical protein M4I22.80 - Arabidopsis >gi|3269288|emb|CAA19721.1| putative protein [Arabidopsis >gi|7269580|emb|CAB79582.1| putative protein [Arabidopsis
  misc_feature (1)..(122): Homolog of NCBI NO: 30687535 NR Description: quinone reductase family [Arabidopsis thaliana]
  misc_feature (1)..(121): Homolog of NCBI NO: 15239652 NR Description: quinone reductase, putative; protein id:
  misc_feature (1)..(118): Homolog of NCBI NO: 21068664 NR Description: putative quinone oxidoreductase [Cicer arietinum]
  misc_feature (1)..(118): Homolog of NCBI NO: 5031275 NR Description: unknown [Prunus armeniaca]
  misc_feature (1)..(120): Homolog of NCBI NO: 38636776 NR Description: putative quinone-oxidoreductase QR2 [Oryza sativa
  misc_feature (1)..(120): Homolog of NCBI NO: 37724581 NR Description: putative quinone reductase [Vitis vinifera]
  misc_feature (1)..(121): Homolog of NCBI NO: 12484052 NR Description: quinone-oxidoreductase QR2 [Triphysaria
  misc_feature (1)..(120): Homolog of NCBI NO: 34910128 NR Description: putative 1,4-benzoquinone reductase [Oryza sativa
  misc_feature (1)..(117): Homolog of NCBI NO: 2564066 NR Description: LEDI-3 protein [Lithospermum erythrorhizon]
MMAAQFKAFLDATGGLWRTQQLAGKPAGIFYSTGSQGGGQETTALTAITQLVHHGMIFVPIGYTFGAGMFEMENVKGGSPYGAGTFAGDGSRQPTELELGQAFHQGKYIAAISKKLKGPAAA

SEQ ID NO: 69720 - DNA, 2061 bp, Arabidopsis thaliana
  misc_feature (1)..(2061): Ceres Seq. ID no. 1823746
  misc_feature: MA Experiment ID: 20000180 Result: Down-regulated in Transcription
  misc_feature: MA Experiment 20000180 PARAMETER Experiment Name: At_Germinating_Seeds_P Parameter: Age (hr) Value: 24 vs. 0
  misc_feature: MA Experiment 20000180 PARAMETER Experiment Name: At_Germinating_Seeds_P Parameter: Tissue Value: Germinating Seeds
atggttatggacttgaagcttatagcagcaggattacgtcattgtgggaaagtacaagcctttaagcgtggagaatcaattcaagctcatgtaatcaagcaagggatctctcaaaatgtgtttatagcgaataacgtgatctcaatgtatgtggatttcaggttgttgagtgatgcacataaagtgttcgatgaaatgtctgagagaaatattgtaacttggacaacgatggtttctgggtatacgagtgatggaaaacccaataaagctattgagttatacagaagaatgttagactccgaagaagaagcggcgaacgagtttatgtattctgcggttttgaaagcttgtgggttagtgggtgatattcagctggggattttggtttatgaaagaattggtaaagagaatttgagaggtgatgttgttttgatgaatagtgttgttgatatgtatgttaagaatgggagacttatcgaagctaatagcagttttaaggagattttacggcctagttcgacttcgtggaacactcttatttctggttattgtaaagctggtttgatggatgaagcggttactttgttccatcgaatgccgcagccaaatgtcgtgtcttggaactgtttgatatcgggatttgtcgataagggtagtcctcgtgcgttggagtttttagttaggatgcagagagaaggacttgtgttagacggttttgctttaccatgtggtcttaaagcttgtagttttggtggcttattaacaatgggtaaacagctgcattgttgtgtcgtaaagtcgggtctagagtctagcccgttcgcaatatctgctcttattgatatgtactcgaactgtggctctctaatatatgcagctgatgtttttcatcaggaaaaactggccgttaatagtagtgtcgcggtttggaattctatgctctctggatttttgataaatgaggagaatgaagcagcattatggctgcttttgcagatatatcagtcagatttgtgttttgattcctacactctaagtggtgccttaaagatatgtatcaactatgtcaacttaagactcgggcttcaagtacatagtttagttgtagtaagtggttatgagttggattacatcgtaggaagtattcttgttgatttacatgcaaatgttgggaatatacaagatgcacataaactgtttcataggcttccaaataaagatatcatcgctttctctggcttgatacgaggctgtgtgaaatcagggttcaattctttagcattttatctgttcagggaattaatcaagttgggactcgatgctgaccagttcatcgtctcaaatattcttaaagtttgttcaagtttagcatctcttggatggggtaagcaaattcatgggttgtgtataaagaaaggttatgaatcagaacctgtcacagcgacagcactagtagatatgtatgtaaaatgtggtgagatagataatggtgtagtgttgtttgatggtatgttagaaagagatgttgtctcttggacagggataattgttggattcggacaaaacggacgagtcgaagaagcgtttcggtatttccacaagatgataaatattggaattgaaccaaataaggtaacttttttggggcttctttctgcttgccgacattctggactacttgaagaagcaagatcaaccctcgaaacgatgaaatctgaatatggtcttgaaccgtatctagagcattattattgtgtagttgatcttcttggtcaagccgggctgttccaagaggctaacgaattgataaataaaatgccgttggagcccgacaaaacaatatggacgtctctgctcactgcttgcggaactcacaagaatgccggactggttactgtaattgctgagaaattactcaaggggtttccggatgatccatcggtttatacatctctttcgaatgcttatgctacgttaggcatgtgggatcagttaagtaaagtgagagaagctgctaagaagctaggggcaaaagaatctggaatgagttggataatttag

SEQ ID NO: 69721 - protein, 686 aa, Arabidopsis thaliana
  peptide (1)..(686): Ceres Seq. ID no. 1823747
  misc_feature (174)..(208): Pfam Name: PPR repeat Pfam Description: PPR repeat
  misc_feature (177)..(685): Homolog of NCBI NO: 15219258 NR Description: hypothetical protein; protein id: At1g16480.1
  misc_feature (7)..(199): Homolog of NCBI NO: 15219258 NR Description: hypothetical protein; protein id: At1g16480.1
  misc_feature (177)..(685): Homolog of NCBI NO: 34897084 NR Description: hypothetical protein [Oryza sativa (japonica group)] >gi|12957718|gb|AAK09236.1| hypothetical protein [Oryza
  misc_feature (12)..(204): Homolog of NCBI NO: 34897084 NR Description: hypothetical protein [Oryza sativa (japonica group)] >gi|12957718|gb|AAK09236.1| hypothetical protein [Oryza
  misc_feature (177)..(685): Homolog of NCBI NO: 15234095 NR Description: putative protein; protein id: At4g33170.1
  misc_feature (24)..(213): Homolog of NCBI NO: 15234095 NR Description: putative protein; protein id: At4g33170.1
  misc_feature (177)..(685): Homolog of NCBI NO: 18394615 NR Description: hypothetical protein; protein id: At1g18485.1
  misc_feature (12)..(187): Homolog of NCBI NO: 18394615 NR Description: hypothetical protein; protein id: At1g18485.1
  misc_feature (158)..(685): Homolog of NCBI NO: 15226150 NR Description: hypothetical protein; protein id: At2g33680.1
  misc_feature (12)..(197): Homolog of NCBI NO: 15226150 NR Description: hypothetical protein; protein id: At2g33680.1
MVMDLKLIAAGLRHCGKVQAFKRGESIQAHVIKQGISQNVFIANNVISMYVDFRLLSDAHKVFDEMSERNIVTWTTMVSGYTSDGKPNKAIELYRRMLDSEEEAANEFMYSAVLKACGLVGDIQLGILVYERIGKENLRGDVVLMNSVVDMYVKNGRLIEANSSFKEILRPSSTSWNTLISGYCKAGLMDEAVTLFHRMPQPNVVSWNCLISGFVDKGSPRALEFLVRMQREGLVLDGFALPCGLKACSFGGLLTMGKQLHCCVVKSGLESSPFAISALIDMYSNCGSLIYAADVFHQEKLAVNSSVAVWNSMLSGFLINEENEAALWLLLQIYQSDLCFDSYTLSGALKICINYVNLRLGLQVHSLVVVSGYELDYIVGSILVDLHANVGNIQDAHKLFHRLPNKDIIAFSGLIRGCVKSGFNSLAFYLFRELIKLGLDADQFIVSNILKVCSSLASLGWGKQIHGLCIKKGYESEPVTATALVDMYVKCGEIDNGVVLFDGMLERDVVSWTGIIVGFGQNGRVEEAFRYFHKMINIGIEPNKVTFLGLLSACRHSGLLEEARSTLETMKSEYGLEPYLEHYYCVVDLLGQAGLFQEANELINKMPLEPDKTIWTSLLTACGTHKNAGLVTVIAEKLLKGFPDDPSVYTSLSNAYATLGMWDQLSKVREAAKKLGAKESGMSWII

SEQ ID NO: 69722 - protein, 684 aa, Arabidopsis thaliana
  peptide (1)..(684): Ceres Seq. ID no. 1823748
  misc_feature (172)..(206): Pfam Name: PPR repeat Pfam Description: PPR repeat
  misc_feature (175)..(683): Homolog of NCBI NO: 15219258 NR Description: hypothetical protein; protein id: At1g16480.1
  misc_feature (5)..(197): Homolog of NCBI NO: 15219258 NR Description: hypothetical protein; protein id: At1g16480.1
  misc_feature (175)..(683): Homolog of NCBI NO: 34897084 NR Description: hypothetical protein [Oryza sativa (japonica group)] >gi|12957718|gb|AAK09236.1| hypothetical protein [Oryza
  misc_feature (10)..(202): Homolog of NCBI NO: 34897084 NR Description: hypothetical protein [Oryza sativa (japonica group)] >gi|12957718|gb|AAK09236.1| hypothetical protein [Oryza
  misc_feature (175)..(683): Homolog of NCBI NO: 15234095 NR Description: putative protein; protein id: At4g33170.1
  misc_feature (22)..(211): Homolog of NCBI NO: 15234095 NR Description: putative protein; protein id: At4g33170.1
  misc_feature (175)..(683): Homolog of NCBI NO: 18394615 NR Description: hypothetical protein; protein id: At1g18485.1
  misc_feature (10)..(185): Homolog of NCBI NO: 18394615 NR Description: hypothetical protein; protein id: At1g18485.1
  misc_feature (156)..(683): Homolog of NCBI NO: 15226150 NR Description: hypothetical protein; protein id: At2g33680.1
  misc_feature (10)..(195): Homolog of NCBI NO: 15226150 NR Description: hypothetical protein; protein id: At2g33680.1
MDLKLIAAGLRHCGKVQAFKRGESIQAHVIKQGISQNVFIANNVISMYVDFRLLSDAHKVFDEMSERNIVTWTTMVSGYTSDGKPNKAIELYRRMLDSEEEAANEFMYSAVLKACGLVGDIQLGILVYERIGKENLRGDVVLMNSVVDMYVKNGRLIEANSSFKEILRPSSTSWNTLISGYCKAGLMDEAVTLFHRMPQPNVVSWNCLISGFVDKGSPRALEFLVRMQREGLVLDGFALPCGLKACSFGGLLTMGKQLHCCVVKSGLESSPFAISALIDMYSNCGSLIYAADVFHQEKLAVNSSVAVWNSMLSGFLINEENEAALWLLLQIYQSDLCFDSYTLSGALKICINYVNLRLGLQVHSLVVVSGYELDYIVGSILVDLHANVGNIQDAHKLFHRLPNKDIIAFSGLIRGCVKSGFNSLAFYLFRELIKLGLDADQFIVSNILKVCSSLASLGWGKQIHGLCIKKGYESEPVTATALVDMYVKCGEIDNGVVLFDGMLERDVVSWTGIIVGFGQNGRVEEAFRYFHKMINIGIEPNKVTFLGLLSACRHSGLLEEARSTLETMKSEYGLEPYLEHYYCVVDLLGQAGLFQEANELINKMPLEPDKTIWTSLLTACGTHKNAGLVTVIAEKLLKGFPDDPSVYTSLSNAYATLGMWDQLSKVREAAKKLGAKESGMSWII

SEQ ID NO: 69723 - protein, 638 aa, Arabidopsis thaliana
  peptide (1)..(638): Ceres Seq. ID no. 1823749
  misc_feature (126)..(160): Pfam Name: PPR repeat Pfam Description: PPR repeat
  misc_feature (129)..(637): Homolog of NCBI NO: 15219258 NR Description: hypothetical protein; protein id: At1g16480.1
  misc_feature (1)..(151): Homolog of NCBI NO: 15219258 NR Description: hypothetical protein; protein id: At1g16480.1
  misc_feature (129)..(637): Homolog of NCBI NO: 34897084 NR Description: hypothetical protein [Oryza sativa (japonica group)] >gi|12957718|gb|AAK09236.1| hypothetical protein [Oryza
  misc_feature (1)..(156): Homolog of NCBI NO: 34897084 NR Description: hypothetical protein [Oryza sativa (japonica group)] >gi|12957718|gb|AAK09236.1| hypothetical protein [Oryza
  misc_feature (129)..(637): Homolog of NCBI NO: 15234095 NR Description: putative protein; protein id: At4g33170.1
  misc_feature (1)..(165): Homolog of NCBI NO: 15234095 NR Description: putative protein; protein id: At4g33170.1
  misc_feature (129)..(637): Homolog of NCBI NO: 18394615 NR Description: hypothetical protein; protein id: At1g18485.1
  misc_feature (1)..(139): Homolog of NCBI NO: 18394615 NR Description: hypothetical protein; protein id: At1g18485.1
  misc_feature (110)..(637): Homolog of NCBI NO: 15226150 NR Description: hypothetical protein; protein id: At2g33680.1
  misc_feature (1)..(149): Homolog of NCBI NO: 15226150 NR Description: hypothetical protein; protein id: At2g33680.1
MYVDFRLLSDAHKVFDEMSERNIVTWTTMVSGYTSDGKPNKAIELYRRMLDSEEEAANEFMYSAVLKACGLVGDIQLGILVYERIGKENLRGDVVLMNSVVDMYVKNGRLIEANSSFKEILRPSSTSWNTLISGYCKAGLMDEAVTLFHRMPQPNVVSWNCLISGFVDKGSPRALEFLVRMQREGLVLDGFALPCGLKACSFGGLLTMGKQLHCCVVKSGLESSPFAISALIDMYSNCGSLIYAADVFHQEKLAVNSSVAVWNSMLSGFLINEENEAALWLLLQIYQSDLCFDSYTLSGALKICINYVNLRLGLQVHSLVVVSGYELDYIVGSILVDLHANVGNIQDAHKLFHRLPNKDIIAFSGLIRGCVKSGFNSLAFYLFRELIKLGLDADQFIVSNILKVCSSLASLGWGKQIHGLCIKKGYESEPVTATALVDMYVKCGEIDNGVVLFDGMLERDVVSWTGIIVGFGQNGRVEEAFRYFHKMINIGIEPNKVTFLGLLSACRHSGLLEEARSTLETMKSEYGLEPYLEHYYCVVDLLGQAGLFQEANELINKMPLEPDKTIWTSLLTACGTHKNAGLVTVIAEKLLKGFPDDPSVYTSLSNAYATLGMWDQLSKVREAAKKLGAKESGMSWII

SEQ ID NO: 69724 - DNA, 1005 bp, Arabidopsis thaliana
  misc_feature (1)..(1005): Ceres Seq. ID no. 1823895
  misc_feature: MA Experiment ID: 20000227 Result: Up-regulated in Transcription
  misc_feature: MA Experiment 20000227 PARAMETER Experiment Name: At_Root-Tips-vs-Tops_P Parameter: Tissue Value: Root Tips vs. Root Tops
  misc_feature: MA Experiment ID: 20000451 Result: Up-regulated in Transcription
  misc_feature: MA Experiment 20000451 PARAMETER Experiment Name: At_CS6879_Shoots-Roots_P Parameter: Age (day) Value: 14
  misc_feature: MA Experiment 20000451 PARAMETER Experiment Name: At_CS6879_Shoots-Roots_P Parameter: Organism Value: A. thaliana
  misc_feature: MA Experiment 20000451 PARAMETER Experiment Name: At_CS6879_Shoots-Roots_P Parameter: Plant Line Value: CS6879 vs. WS
  misc_feature: MA Experiment 20000451 PARAMETER Experiment Name: At_CS6879_Shoots-Roots_P Parameter: Tissue Value: Roots
  misc_feature: MA Experiment ID: 20000709 Result: Up-regulated in Transcription
  misc_feature: MA Experiment 20000709 PARAMETER Experiment Name: At_15mM_NH4NO3_L-to-H_P Parameter: Age (hr) Value: 14
  misc_feature: MA Experiment 20000709 PARAMETER Experiment Name: At_15mM_NH4NO3_L-to-H_P Parameter: Organism Value: A. thaliana
  misc_feature: MA Experiment 20000709 PARAMETER Experiment Name: At_15mM_NH4NO3_L-to-H_P Parameter: Plant Line Value: WS
  misc_feature: MA Experiment 20000709 PARAMETER Experiment Name: At_15mM_NH4NO3_L-to-H_P Parameter: Timepoint (hr) Value: 4
  misc_feature: MA Experiment 20000709 PARAMETER Experiment Name: At_15mM_NH4NO3_L-to-H_P Parameter: Tissue Value: Aerial
  misc_feature: MA Experiment 20000709 PARAMETER Experiment Name: At_15mM_NH4NO3_L-to-H_P Parameter: Treatment Value: 15mM NH4NO3 vs. 30mM Mannitol
  misc_feature: MA Experiment ID: 20001248 Result: Up-regulated in Transcription
  misc_feature: MA Experiment 20001248 PARAMETER Experiment Name: At_Far-red-induction_P Parameter: Age (day) Value: 7
  misc_feature: MA Experiment 20001248 PARAMETER Experiment Name: At_Far-red-induction_P Parameter: Light Value: Far-red vs. White
  misc_feature: MA Experiment 20001248 PARAMETER Experiment Name: At_Far-red-induction_P Parameter: Organism Value: A. thaliana
  misc_feature: MA Experiment 20001248 PARAMETER Experiment Name: At_Far-red-induction_P Parameter: Plant Line Value: Columbia
  misc_feature: MA Experiment 20001248 PARAMETER Experiment Name: At_Far-red-induction_P Parameter: Timepoint (hr) Value: 4
  misc_feature: MA Experiment 20001248 PARAMETER Experiment Name: At_Far-red-induction_P Parameter: Tissue Value: Whole Plant
  misc_feature: MA Experiment ID: 20001557 Result: Up-regulated in Transcription
  misc_feature: MA Experiment 20001557 PARAMETER Experiment Name: At_Drought_Soil_Dry_P Parameter: Age (day) Value: 27
  misc_feature: MA Experiment 20001557 PARAMETER Experiment Name: At_Drought_Soil_Dry_P Parameter: Organism Value: A. thaliana
  misc_feature: MA Experiment 20001557 PARAMETER Experiment Name: At_Drought_Soil_Dry_P Parameter: Plant Line Value: WS
  misc_feature: MA Experiment 20001557 PARAMETER Experiment Name: At_Drought_Soil_Dry_P Parameter: Post Timepoint (hr) Value: 3
  misc_feature: MA Experiment 20001557 PARAMETER Experiment Name: At_Drought_Soil_Dry_P Parameter: Post-Treatment Value: Re-Water vs. No Drought
  misc_feature: MA Experiment 20001557 PARAMETER Experiment Name: At_Drought_Soil_Dry_P Parameter: Timepoint (day) Value: 13
  misc_feature: MA Experiment 20001557 PARAMETER Experiment Name: At_Drought_Soil_Dry_P Parameter: Treatment Value: Drought vs. No Drought
atgatggatgagtttatggatcttagaccagtgaagtacacagagcacaagactgttatcagaaagtacactaaaaagtcgtctatggagaggaagaccagtgttcgtgactcggccaggttggttcgggtctcaatgacggatcgtgacgccactgattcatcaagcgacgaggaagagtttctgttccctcgaagacgtgtcaagagattgattaacgagatcagagtcgagcctagcagctcttccaccggcgacgtctctgcttctccgacgaaggaccggaaaagaatcaacgttgattctacggttcaaaagccctctgtttccggccaaaaccagaagaagtaccgcggcgtgagacagcgaccatggggaaaatgggcggcggagattcgtgatcctgagcaacgccggagaatctggctcggtacttttgcaacggcggaggaagctgccatcgtctacgacaacgcagcaatcaaacttcgtggccctgatgctcttaccaacttcaccgtacaaccagaaccagaaccggtacaagaacaagaacaagaaccggagagcaacatgtcggtttcgatatcagaatcaatggacgattctcaacatctatcatctccgacatcggttctcaactaccaaacatatgtctcggaggaaccaatcgatagtcttatcaaaccggttaaacaagagtttcttgaaccagaacaagagccaataagctggcatcttggagaaggtaatactaatactaatgatgattcatttccattggacattacatttctcgacaactatttcaatgaatcattaccagacatctccatcttcgatcaacctatgtctcctattcaaccaacagagaatgatttcttcaacgaccttatgttattcgatagcaacgcagaagaatactactcctccgagatcaaagagattggttcatcgttcaacgatcttgatgattctttgatatccgatctcttacttgtgtga

SEQ ID NO: 69725 - protein, 334 aa, Arabidopsis thaliana
  peptide (1)..(334): Ceres Seq. ID no. 1823896
  misc_feature (114)..(178): Pfam Name: AP2 domain Pfam Description: AP2 domain
  misc_feature (1)..(334): Homolog of NCBI NO: 15234337 NR Description: putative protein; protein id: At4g27950.1
  misc_feature (2)..(333): Homolog of NCBI NO: 15238705 NR Description: putative protein; protein id: At5g53290.1
  misc_feature (6)..(329): Homolog of NCBI NO: 15236595 NR Description: putative Ap2 domain protein; protein id: supported by cDNA: gi_15982736 [Arabidopsis thaliana]
  misc_feature (6)..(329): Homolog of NCBI NO: 22655200 NR Description: putative Ap2 domain protein [Arabidopsis thaliana]
  misc_feature (9)..(290): Homolog of NCBI NO: 15233169 NR Description: putative protein; protein id: At3g61630.1, by cDNA: 100688. [Arabidopsis thaliana] >gi|11281604|pir||T47955
  misc_feature (30)..(261): Homolog of NCBI NO: 15237053 NR Description: putative Ap2 domain protein; protein id:
  misc_feature (28)..(227): Homolog of NCBI NO: 7531181 NR Description: PATHOGENESIS-RELATED GENES TRANSCRIPTIONAL
  misc_feature (17)..(278): Homolog of NCBI NO: 15225959 NR Description: putative AP2 domain transcription factor; protein At2g46310.1, supported by cDNA: gi_18491258 [Arabidopsis >gi|25347738|pir||C84901 probable AP2 domain transcription factor
  misc_feature (9)..(224): Homolog of NCBI NO: 7489208 NR Description: Tsi1 protein - common tobacco
  misc_feature (40)..(213): Homolog of NCBI NO: 34898320 NR Description: Similar to Nicotiana tabacum mRNA for ERF1,
MMDEFMDLRPVKYTEHKTVIRKYTKKSSMERKTSVRDSARLVRVSMTDRDATDSSSDEEEFLFPRRRVKRLINEIRVEPSSSSTGDVSASPTKDRKRINVDSTVQKPSVSGQNQKKYRGVRQRPWGKWAAEIRDPEQRRRIWLGTFATAEEAAIVYDNAAIKLRGPDALTNFTVQPEPEPVQEQEQEPESNMSVSISESMDDSQHLSSPTSVLNYQTYVSEEPIDSLIKPVKQEFLEPEQEPISWHLGEGNTNTNDDSFPLDITFLDNYFNESLPDISIFDQPMSPIQPTENDFFNDLMLFDSNAEEYYSSEIKEIGSSFNDLDDSLISDLLLV

SEQ ID NO: 69726 - protein, 333 aa, Arabidopsis thaliana
  peptide (1)..(333): Ceres Seq. ID no. 1823897
  misc_feature (113)..(177): Pfam Name: AP2 domain Pfam Description: AP2 domain
  misc_feature (8)..(289): Homolog of NCBI NO: 15233169 NR Description: putative protein; protein id: At3g61630.1, by cDNA: 100688. [Arabidopsis thaliana] >gi|11281604|pir||T47955
  misc_feature (29)..(260): Homolog of NCBI NO: 15237053 NR Description: putative Ap2 domain protein; protein id:
  misc_feature (27)..(226): Homolog of NCBI NO: 7531181 NR Description: PATHOGENESIS-RELATED GENES TRANSCRIPTIONAL
  misc_feature (1)..(333): Homolog of NCBI NO: 15234337 NR Description: putative protein; protein id: At4g27950.1
  misc_feature (5)..(328): Homolog of NCBI NO: 15236595 NR Description: putative Ap2 domain protein; protein id: supported by cDNA: gi_15982736 [Arabidopsis thaliana]
  misc_feature (5)..(328): Homolog of NCBI NO: 22655200 NR Description: putative Ap2 domain protein [Arabidopsis thaliana]
  misc_feature (1)..(332): Homolog of NCBI NO: 15238705 NR Description: putative protein; protein id: At5g53290.1
  misc_feature (16)..(277): Homolog of NCBI NO: 15225959 NR Description: putative AP2 domain transcription factor; protein At2g46310.1, supported by cDNA: gi_18491258 [Arabidopsis >gi|25347738|pir||C84901 probable AP2 domain transcription factor
  misc_feature (8)..(223): Homolog of NCBI NO: 7489208 NR Description: Tsi1 protein - common tobacco
  misc_feature (39)..(212): Homolog of NCBI NO: 34898320 NR Description: Similar to Nicotiana tabacum mRNA for ERF1,
MDEFMDLRPVKYTEHKTVIRKYTKKSSMERKTSVRDSARLVRVSMTDRDATDSSSDEEEFLFPRRRVKRLINEIRVEPSSSSTGDVSASPTKDRKRINVDSTVQKPSVSGQNQKKYRGVRQRPWGKWAAEIRDPEQRRRIWLGTFATAEEAAIVYDNAAIKLRGPDALTNFTVQPEPEPVQEQEQEPESNMSVSISESMDDSQHLSSPTSVLNYQTYVSEEPIDSLIKPVKQEFLEPEQEPISWHLGEGNTNTNDDSFPLDITFLDNYFNESLPDISIFDQPMSPIQPTENDFFNDLMLFDSNAEEYYSSEIKEIGSSFNDLDDSLISDLLLV

SEQ ID NO: 69727 - protein, 329 aa, Arabidopsis thaliana
  peptide (1)..(329): Ceres Seq. ID no. 1823898
  misc_feature (109)..(173): Pfam Name: AP2 domain Pfam Description: AP2 domain
  misc_feature (1)..(329): Homolog of NCBI NO: 15234337 NR Description: putative protein; protein id: At4g27950.1
  misc_feature (1)..(328): Homolog of NCBI NO: 15238705 NR Description: putative protein; protein id: At5g53290.1
  misc_feature (1)..(324): Homolog of NCBI NO: 15236595 NR Description: putative Ap2 domain protein; protein id: supported by cDNA: gi_15982736 [Arabidopsis thaliana]
  misc_feature (1)..(324): Homolog of NCBI NO: 22655200 NR Description: putative Ap2 domain protein [Arabidopsis thaliana]
  misc_feature (4)..(285): Homolog of NCBI NO: 15233169 NR Description: putative protein; protein id: At3g61630.1, by cDNA: 100688. [Arabidopsis thaliana] >gi|11281604|pir||T47955
  misc_feature (25)..(256): Homolog of NCBI NO: 15237053 NR Description: putative Ap2 domain protein; protein id:
  misc_feature (23)..(222): Homolog of NCBI NO: 7531181 NR Description: PATHOGENESIS-RELATED GENES TRANSCRIPTIONAL
  misc_feature (12)..(273): Homolog of NCBI NO: 15225959 NR Description: putative AP2 domain transcription factor; protein At2g46310.1, supported by cDNA: gi_18491258 [Arabidopsis >gi|25347738|pir||C84901 probable AP2 domain transcription factor
  misc_feature (4)..(219): Homolog of NCBI NO: 7489208 NR Description: Tsi1 protein - common tobacco
  misc_feature (35)..(208): Homolog of NCBI NO: 34898320 NR Description: Similar to Nicotiana tabacum mRNA for ERF1,
MDLRPVKYTEHKTVIRKYTKKSSMERKTSVRDSARLVRVSMTDRDATDSSSDEEEFLFPRRRVKRLINEIRVEPSSSSTGDVSASPTKDRKRINVDSTVQKPSVSGQNQKKYRGVRQRPWGKWAAEIRDPEQRRRIWLGTFATAEEAAIVYDNAAIKLRGPDALTNFTVQPEPEPVQEQEQEPESNMSVSISESMDDSQHLSSPTSVLNYQTYVSEEPIDSLIKPVKQEFLEPEQEPISWHLGEGNTNTNDDSFPLDITFLDNYFNESLPDISIFDQPMSPIQPTENDFFNDLMLFDSNAEEYYSSEIKEIGSSFNDLDDSLISDLLLV

SEQ ID NO: 69728 - DNA, 1491 bp, Arabidopsis thaliana
  misc_feature (1)..(1491): Ceres Seq. ID no. 1824171
  misc_feature: MA Experiment ID: 20000265 Result: Up-regulated in Transcription
  misc_feature: MA Experiment 20000265 PARAMETER Experiment Name: At_Open_Flower_P Parameter: Age (day) Value: 21
  misc_feature: MA Experiment 20000265 PARAMETER Experiment Name: At_Open_Flower_P Parameter: Plant Line Value: WS
  misc_feature: MA Experiment 20000265 PARAMETER Experiment Name: At_Open_Flower_P Parameter: Tissue Value: Closed Flower vs. Whole Plant
  misc_feature: Pfam Name: WD40 Pfam Description: WD domain, G-beta repeat
atggaaagcgaagcagcagcgactgttcaagccaccaggccgagaagagcacctaggactccggtgacagccattttgacggataagagaagacggaaacctaagagcaacaacgagtctcagttaccatttttgctacagcagagtcaaaaggccaccgttgacgacacttactctcagtggaagactcttcttcccattctctatgattcgtttgttaatcataccctcgtctggccctctctctcttgcagatgggggccacagcttgagcaagcaggttctaagactcaacgtctctatctctcggaacaaacgaatggcagtgtgcctaatactttggtcatagccaattgcgaaactgttaataggcaggtaattagtttttctctaccaaagcttcttaatgaaaaggcacactctccatttgtgaagaagtacaagaccatcatccaccctggagaggtcaacagaattagggaactccctcaaaatagcaagattgtagctactcacaccgacagtcctgatattctcatttggaacactgagactcaaccagaccggtatgctgtgcttggagctccagattctcgtccagatttgttactaattgggcaccaggatgatgctgaatttgctcttgcaatgtgcccaaccgaaccttttgttctctctggaggcaaggacaagtccgttattttgtggaatatccaagaccatatcacaatggctggttcggattccaaatcccctggatccagcttcaagcagactggtgaaggtagtgataaaactggtggtccttctgttggccctcgaggcatatataatggccacaaagatactgttgaagacgtggcattctgtccatctagtgcacaagaattctgcagtgttggtgacgattcttgccttatgctatgggacgcaagaactggcactagtcctgccatgaaggttgagaaggcacatgatgctgatcttcactgtgtcgattggaatcctcatgacaataatctgatcctgactgggtcagcagataacactgtccgtgtgtttgaccgccgaaaccttacctcaaatggagttggttcacctgtttacaaatttgaaggccacagagctgctgttctttgtgttcagtggtctcctgataaatcatctgtttttgggagttctgcagaagatggtctcttgaacatatgggattgtgatagggttggcaagaagtctgagcgtgcaaccaaaactcctgatgggcttttcttccagcatgctggtcacagggacaaagtggtcgacttccactggagcctattgaacccttggactattgtcagtgtttctgataattgtgagagtatcggtggaggtggtacattgcagatatggcggatgagtgacttgatttacagaccggaagatgaagtcctgacagagctagagaaattcaagtcacatgttttcacatgtacctccaagtcttga

SEQ ID NO: 69729 - protein, 496 aa, Arabidopsis thaliana
  peptide (1)..(496): Ceres Seq. ID no. 1824172
  misc_feature: Pfam Name: WD40 Pfam Description: WD domain, G-beta repeat
  misc_feature (1)..(496): Homolog of NCBI NO: 15233674 NR Description: WD-40 repeat - like protein; protein id:
  misc_feature (1)..(495): Homolog of NCBI NO: 30680701 NR Description: WD-40 repeat protein (MSI4) [Arabidopsis thaliana]
  misc_feature (50)..(495): Homolog of NCBI NO: 20197482 NR Description: putative WD-40 repeat protein, MSI4 [Arabidopsis
  misc_feature (50)..(495): Homolog of NCBI NO: 2599092 NR Description: WD-40 repeat protein MSI4 [Arabidopsis thaliana]
  misc_feature (51)..(496): Homolog of NCBI NO: 21898564 NR Description: nucleosome/chromatin assembly factor group C [Zea
  misc_feature (47)..(496): Homolog of NCBI NO: 14550114 NR Description: nucleosome/chromatin assembly factor C [Zea mays]
  misc_feature (52)..(496): Homolog of NCBI NO: 9716495 NR Description: WD-repeat protein RBAP1 [Zea mays]
  misc_feature (47)..(496): Homolog of NCBI NO: 34910476 NR Description: putative WD-repeat protein RBAP1 [Oryza sativa
  misc_feature (50)..(493): Homolog of NCBI NO: 5701955 NR Description: X1 protein [Silene latifolia]
  misc_feature (50)..(493): Homolog of NCBI NO: 17902570 NR Description: putative WD-repeat protein [Silene latifolia]
MESEAAATVQATRPRRAPRTPVTAILTDKRRRKPKSNNESQLPFLLQQSQKATVDDTYSQWKTLLPILYDSFVNHTLVWPSLSCRWGPQLEQAGSKTQRLYLSEQTNGSVPNTLVIANCETVNRQVISFSLPKLLNEKAHSPFVKKYKTIIHPGEVNRIRELPQNSKIVATHTDSPDILIWNTETQPDRYAVLGAPDSRPDLLLIGHQDDAEFALAMCPTEPFVLSGGKDKSVILWNIQDHITMAGSDSKSPGSSFKQTGEGSDKTGGPSVGPRGIYNGHKDTVEDVAFCPSSAQEFCSVGDDSCLMLWDARTGTSPAMKVEKAHDADLHCVDWNPHDNNLILTGSADNTVRVFDRRNLTSNGVGSPVYKFEGHRAAVLCVQWSPDKSSVFGSSAEDGLLNIWDCDRVGKKSERATKTPDGLFFQHAGHRDKVVDFHWSLLNPWTIVSVSDNCESIGGGGTLQIWRMSDLIYRPEDEVLTELEKFKSHVFTCTSKS

SEQ ID NO: 69730 - protein, 280 aa, Arabidopsis thaliana
  peptide (1)..(280): Ceres Seq. ID no. 1824173
  misc_feature: Pfam Name: WD40 Pfam Description: WD domain, G-beta repeat
  misc_feature (1)..(280): Homolog of NCBI NO: 15233674 NR Description: WD-40 repeat - like protein; protein id:
  misc_feature (1)..(279): Homolog of NCBI NO: 30680701 NR Description: WD-40 repeat protein (MSI4) [Arabidopsis thaliana]
  misc_feature (1)..(279): Homolog of NCBI NO: 20197482 NR Description: putative WD-40 repeat protein, MSI4 [Arabidopsis
  misc_feature (1)..(279): Homolog of NCBI NO: 2599092 NR Description: WD-40 repeat protein MSI4 [Arabidopsis thaliana]
  misc_feature (1)..(280): Homolog of NCBI NO: 21898564 NR Description: nucleosome/chromatin assembly factor group C [Zea
  misc_feature (1)..(280): Homolog of NCBI NO: 14550114 NR Description: nucleosome/chromatin assembly factor C [Zea mays]
  misc_feature (1)..(280): Homolog of NCBI NO: 9716495 NR Description: WD-repeat protein RBAP1 [Zea mays]
  misc_feature (1)..(280): Homolog of NCBI NO: 34910476 NR Description: putative WD-repeat protein RBAP1 [Oryza sativa
  misc_feature (1)..(277): Homolog of NCBI NO: 5701955 NR Description: X1 protein [Silene latifolia]
  misc_feature (1)..(277): Homolog of NCBI NO: 17902570 NR Description: putative WD-repeat protein [Silene latifolia]
MCPTEPFVLSGGKDKSVILWNIQDHITMAGSDSKSPGSSFKQTGEGSDKTGGPSVGPRGIYNGHKDTVEDVAFCPSSAQEFCSVGDDSCLMLWDARTGTSPAMKVEKAHDADLHCVDWNPHDNNLILTGSADNTVRVFDRRNLTSNGVGSPVYKFEGHRAAVLCVQWSPDKSSVFGSSAEDGLLNIWDCDRVGKKSERATKTPDGLFFQHAGHRDKVVDFHWSLLNPWTIVSVSDNCESIGGGGTLQIWRMSDLIYRPEDEVLTELEKFKSHVFTCTSKS

SEQ ID NO: 69731 - protein, 253 aa, Arabidopsis thaliana
  peptide (1)..(253): Ceres Seq. ID no. 1824174
  misc_feature: Pfam Name: WD40 Pfam Description: WD domain, G-beta repeat
  misc_feature (1)..(253): Homolog of NCBI NO: 15233674 NR Description: WD-40 repeat - like protein; protein id:
  misc_feature (1)..(252): Homolog of NCBI NO: 30680701 NR Description: WD-40 repeat protein (MSI4) [Arabidopsis thaliana]
  misc_feature (1)..(252): Homolog of NCBI NO: 20197482 NR Description: putative WD-40 repeat protein, MSI4 [Arabidopsis
  misc_feature (1)..(252): Homolog of NCBI NO: 2599092 NR Description: WD-40 repeat protein MSI4 [Arabidopsis thaliana]
  misc_feature (1)..(253): Homolog of NCBI NO: 21898564 NR Description: nucleosome/chromatin assembly factor group C [Zea
  misc_feature (1)..(253): Homolog of NCBI NO: 14550114 NR Description: nucleosome/chromatin assembly factor C [Zea mays]
  misc_feature (1)..(253): Homolog of NCBI NO: 9716495 NR Description: WD-repeat protein RBAP1 [Zea mays]
  misc_feature (1)..(253): Homolog of NCBI NO: 34910476 NR Description: putative WD-repeat protein RBAP1 [Oryza sativa
  misc_feature (1)..(250): Homolog of NCBI NO: 5701955 NR Description: X1 protein [Silene latifolia]
  misc_feature (1)..(250): Homolog of NCBI NO: 17902570 NR Description: putative WD-repeat protein [Silene latifolia]
MAGSDSKSPGSSFKQTGEGSDKTGGPSVGPRGIYNGHKDTVEDVAFCPSSAQEFCSVGDDSCLMLWDARTGTSPAMKVEKAHDADLHCVDWNPHDNNLILTGSADNTVRVFDRRNLTSNGVGSPVYKFEGHRAAVLCVQWSPDKSSVFGSSAEDGLLNIWDCDRVGKKSERATKTPDGLFFQHAGHRDKVVDFHWSLLNPWTIVSVSDNCESIGGGGTLQIWRMSDLIYRPEDEVLTELEKFKSHVFTCTSKS

SEQ ID NO: 69732 - DNA, 4218 bp, Arabidopsis thaliana
  misc_feature (1)..(4218): Ceres Seq. ID no. 1824332
  misc_feature: MA Experiment ID: 20000315 Result: Down-regulated in Transcription
  misc_feature: MA Experiment 20000315 PARAMETER Experiment Name: At_14day_Shoots-Roots_Sub_P Parameter: Age (day) Value: 14
  misc_feature: MA Experiment 20000315 PARAMETER Experiment Name: At_14day_Shoots-Roots_Sub_P Parameter: Organism Value: A. thaliana
  misc_feature: MA Experiment 20000315 PARAMETER Experiment Name: At_14day_Shoots-Roots_Sub_P Parameter: Plant Line Value: WS
  misc_feature: MA Experiment 20000315 PARAMETER Experiment Name: At_14day_Shoots-Roots_Sub_P Parameter: Tissue Value: Shoots vs. Whole Plant
atggagaagcaagatcaaacaagcagagaagagattctgaagaagataatggattcattgggacaagacggtgtaccttcaaaaaccgtcctcgttggtgaagctggtatagggaagacatggcttgcaaaagaagtcagccaacgtgttactcaagaaaagtacaatgtcctctggttacacctgaacaaaaagattgaagacgagaagtcgctttacgagattctagctgctcagttgtcgataatttacgagtttgaagaaggcgaagaacctgatgagcttgattatccattggagagcttgaaagagaagattaaagaagagatgatcaaacacaagaaggataatcttctgttgattttggatgatgaaggaagtatgacaactgaagaagatgtgatgcaagaattaaacctccaagattttcttaaggagtactcggctgtgaagattctagtcacaagaagagatgaaagagaggagaaagaatccacaacgatcaaagtcggtccgcttacagaaaaggagtcattggacttactccacgatgccgaggacttacttacatcatttacctctgaagattggcctgttctgctaaagagactttgcgataacaaagagatcaaagaacctactttgatgtcttgcattttaagcaagagcaagggcttaccagctgcgatcgttgtcttaatcaagtctttaaacagcattaagtcgatgtctgcgaagcagaggaagatctttaaagaactgattctatcttccaagtcattagatgaagcagctgcttccaagaacgctatagatcgcagccgctacaatcctgtcttgcaattaagctacgagctgttaaagcctgacgagacggtcaaacgtccggtgattgcttgcttttggcatatcttggacttctacaagtactctggatgcgcttactaccgtgacctaatagtgcattggatgcttgaagggtattttgatccggttaagtcagttgacaaagcttaccaagaaggacattccattttaatggactttatgaacagaggaatcttgaaaatacaagaagacaacatggtggttccagagttctccatgagcaacctattagatcttcaagattgtggattctttggaagatcttctcttggatttgacagagtttacggtggagacaagagaaaggggctagggaaaatcatcttgatcgatgatatgatacagacaattcaatcgaagaagaagaatatcacgacgattatcgctagcggaaaccgtttacgtagagaggttcatgggaagttctttgagaaaccagagatgcaagatcttgaagttgtagtcctctttgagccaacgttccatgaacttgttctgtctttatctaagctaaagaaactccgagtacttgttatcagagactgtgatctaatcgataacatcgataagctcagtggtcttcaaggcctacatgttcttgaagtctctggtgctagctctctagttaacatccctgatgatttcttcaagaacatgactcagcttcaaagccttaatctttcgggacttgcaatcaaatcttcgccttccacaatcgaaaagctaagcatgcttcgttgcttcatcctaaggcactgctctgagctacaagatctgcctaacttcattgtggaaacaagaaaacttgaagttattgacattcacggagctaggaaacttgagtcttactttgatagagttaaagattggaaggactataaaggcaagaacaagaactttgctcagcttcagctgcttgaacacctagacttctcagagactaaaatcatccgtctgccgatatttcatctcaaagactctactaacgatttcagtactatgccaatcttgacccggctcttgctgagaaactgtacaaggcttaagagattgccacagcttaggcctttgactaatcttcagattcttgatgcatgtggtgctacagacttagtggagatgcttgaagtgtgtttagaggagaagaaagagcttaggatcctcgatatgtcaaagacaagtcttcccgagttagccgacacgattgctgatgttgtcaatctcaataagcttctgttaaggaattgctcactgattgaagagcttccaagcattgagaaactgacacaccttgaagttttcgacgtttctggttgcattaagttgaagaatatcaatggatcctttggggagatgtcttacctccatgaagtgaatctttcagaaactaatcttagtgagttacctgacaaaatctcagagctatctaaccttaaggagctcatcataagaaaatgttccaagctaaagactcttccaaaccttgagaagctaacaaatcttgagatcttcgatgtttcgggctgcaccgagttggaaacaatcgagggatcattcgagaatctgtcttgcctccacaaagtgaatctttcggaaactaatcttggtgagttacctaacaaaatctcagagctatctaacctcaaagagctcatcctaagaaactgttctaagctaaaggctcttccaaatcttgagaagctaacacatctagtgatcttcgatgtttcgggatgcaccaatctggataaaatcgaggaatcattcgagagtatgtcttacctttgcgagagcatcctctgttcttcaaaacgtattgttctcgcggattcgagttgtatagagcgagaccagtggagccaaataaaagagtgtttaacaagtaagtcagagggctctagcttctctaatgtaggggaaaaaacccgcgagaaacttctttatcacggcaatagatacagagttattgatcctgaagttcctttgaatatcgatattgttgacatcaaaagatccactgatcttaaaacagagtatatagccaaagcagagtatgtctctatagcagagaatggatccaaaagcgtatcttctctcttcgacgagttgcagatggcatcggtaaaaggttgttgggtagagaggtgcaagaacatggatgttctcttcgaatcagatgaacaactagagaaagagaaatcatcatcaccatcattgcagactctttggatctcaaatcttccattgctaacaagcttatacagtagtaaaggaggattcattttcaagaaccttaagaagctaagcgtagattgttgtccaagcatcaaatggctattcccggagattcctgataaccttgagattcttcgtgtgaagttctgtgataagttggagagattgtttgaagtaaaagcaggagaattatcgaagcttcgtaagcttcaccttcttgatttgcctgttttatcagtacttggagctaatttcccgaatctggagaaatgcacaattgagaaatgtccgaaattgaaagctagagaagatgaaccgaggattggagcaaggattacagatgaaatttcagaggatcaacctcacaagaatactattgggcctgaaacccaaactcctacccagcccacaaaagctacagacacaatctttcgaatagttattcctgattggaacttgatggaaccaataaatcaaaagactttccgtcctaagaagagcgcaccatcaggaaccaagggagcagagcttcgaaagcatatagatgcaactttaggtagtggtaatcttagagaagccgtcaaacttcctccgggagaggatttaaacgaatggcttgcagttaacactgtggatttcttcaatcaggtgaatctgttatttggtacacttaccgagttttgcaccccggagaactgttctacaatgactgctggtcccaagtacgaatacagatgggccgatggtgtacaaatcaagaagcctattgaggtttcagctccaaagtatgttgaatacttgatggattggatcgagacacaactcgatgatgagaccatatttcctcaaaaacttggtgcagcttttcctccaaacttcaaggaagtggtgaagacaatctttaaacgactattccgagtttacgcacacatataccactctcatttccagaaaatagttagtctcaaagaggaagctcatctcaacacttgcttcaaacacttcatcctcttcactcatgagtttgttctcattgacaagaaagaactcgctcctcttcaagaactcatagaatctatcattgcaccttactaa

SEQ ID NO: 69733 - protein, 1405 aa, Arabidopsis thaliana
  peptide (1)..(1405): Ceres Seq. ID no. 1824333
  misc_feature (1219)..(1403): Pfam Name: Mob1/phocein family Pfam Description: Mob1/phocein family
  misc_feature (174)..(942): Homolog of NCBI NO: 9758741 NR Description: gene_id:MFC19.18~pir||T04426~strong similarity to
  misc_feature (174)..(942): Homolog of NCBI NO: 18086486 NR Description: AT5g45510/MFC19_18 [Arabidopsis thaliana]
  misc_feature (174)..(942): Homolog of NCBI NO: 22327597 NR Description: putative protein; protein id: At5g45510.1,
  misc_feature (12)..(151): Homolog of NCBI NO: 9758741 NR Description: gene_id:MFC19.18~pir||T04426~strong similarity to
  misc_feature (12)..(151): Homolog of NCBI NO: 18086486 NR Description: AT5g45510/MFC19_18 [Arabidopsis thaliana]
  misc_feature (12)..(151): Homolog of NCBI NO: 22327597 NR Description: putative protein; protein id: At5g45510.1,
  misc_feature (64)..(196): Homolog of NCBI NO: 9758741 NR Description: gene_id:MFC19.18~pir||T04426~strong similarity to
  misc_feature (64)..(196): Homolog of NCBI NO: 18086486 NR Description: AT5g45510/MFC19_18 [Arabidopsis thaliana]
  misc_feature (64)..(196): Homolog of NCBI NO: 22327597 NR Description: putative protein; protein id: At5g45510.1,
  misc_feature (1199)..(1405): Homolog of NCBI NO: 26449776 NR Description: unknown protein [Arabidopsis thaliana]
MEKQDQTSREEILKKIMDSLGQDGVPSKTVLVGEAGIGKTWLAKEVSQRVTQEKYNVLWLHLNKKIEDEKSLYEILAAQLSIIYEFEEGEEPDELDYPLESLKEKIKEEMIKHKKDNLLLILDDEGSMTTEEDVMQELNLQDFLKEYSAVKILVTRRDEREEKESTTIKVGPLTEKESLDLLHDAEDLLTSFTSEDWPVLLKRLCDNKEIKEPTLMSCILSKSKGLPAAIVVLIKSLNSIKSMSAKQRKIFKELILSSKSLDEAAASKNAIDRSRYNPVLQLSYELLKPDETVKRPVIACFWHILDFYKYSGCAYYRDLIVHWMLEGYFDPVKSVDKAYQEGHSILMDFMNRGILKIQEDNMVVPEFSMSNLLDLQDCGFFGRSSLGFDRVYGGDKRKGLGKIILIDDMIQTIQSKKKNITTIIASGNRLRREVHGKFFEKPEMQDLEVVVLFEPTFHELVLSLSKLKKLRVLVIRDCDLIDNIDKLSGLQGLHVLEVSGASSLVNIPDDFFKNMTQLQSLNLSGLAIKSSPSTIEKLSMLRCFILRHCSELQDLPNFIVETRKLEVIDIHGARKLESYFDRVKDWKDYKGKNKNFAQLQLLEHLDFSETKIIRLPIFHLKDSTNDFSTMPILTRLLLRNCTRLKRLPQLRPLTNLQILDACGATDLVEMLEVCLEEKKELRILDMSKTSLPELADTIADVVNLNKLLLRNCSLIEELPSIEKLTHLEVFDVSGCIKLKNINGSFGEMSYLHEVNLSETNLSELPDKISELSNLKELIIRKCSKLKTLPNLEKLTNLEIFDVSGCTELETIEGSFENLSCLHKVNLSETNLGELPNKISELSNLKELILRNCSKLKALPNLEKLTHLVIFDVSGCTNLDKIEESFESMSYLCESILCSSKRIVLADSSCIERDQWSQIKECLTSKSEGSSFSNVGEKTREKLLYHGNRYRVIDPEVPLNIDIVDIKRSTDLKTEYIAKAEYVSIAENGSKSVSSLFDELQMASVKGCWVERCKNMDVLFESDEQLEKEKSSSPSLQTLWISNLPLLTSLYSSKGGFIFKNLKKLSVDCCPSIKWLFPEIPDNLEILRVKFCDKLERLFEVKAGELSKLRKLHLLDLPVLSVLGANFPNLEKCTIEKCPKLKAREDEPRIGARITDEISEDQPHKNTIGPETQTPTQPTKATDTIFRIVIPDWNLMEPINQKTFRPKKSAPSGTKGAELRKHIDATLGSGNLREAVKLPPGEDLNEWLAVNTVDFFNQVNLLFGTLTEFCTPENCSTMTAGPKYEYRWADGVQIKKPIEVSAPKYVEYLMDWIETQLDDETIFPQKLGAAFPPNFKEVVKTIFKRLFRVYAHIYHSHFQKIVSLKEEAHLNTCFKHFILFTHEFVLIDKKELAPLQELIESIIAPY

SEQ ID NO: 69734 - protein, 1389 aa, Arabidopsis thaliana
  peptide (1)..(1389): Ceres Seq. ID no. 1824334
  misc_feature (1203)..(1387): Pfam Name: Mob1/phocein family Pfam Description: Mob1/phocein family
  misc_feature (158)..(926): Homolog of NCBI NO: 9758741 NR Description: gene_id:MFC19.18~pir||T04426~strong similarity to
  misc_feature (158)..(926): Homolog of NCBI NO: 18086486 NR Description: AT5g45510/MFC19_18 [Arabidopsis thaliana]
  misc_feature (158)..(926): Homolog of NCBI NO: 22327597 NR Description: putative protein; protein id: At5g45510.1,
  misc_feature (1)..(135): Homolog of NCBI NO: 9758741 NR Description: gene_id:MFC19.18~pir||T04426~strong similarity to
  misc_feature (1)..(135): Homolog of NCBI NO: 22327597 NR Description: putative protein; protein id: At5g45510.1,
  misc_feature (1)..(135): Homolog of NCBI NO: 18086486 NR Description: AT5g45510/MFC19_18 [Arabidopsis thaliana]
  misc_feature (48)..(180): Homolog of NCBI NO: 9758741 NR Description: gene_id:MFC19.18~pir||T04426~strong similarity to
  misc_feature (48)..(180): Homolog of NCBI NO: 22327597 NR Description: putative protein; protein id: At5g45510.1,
  misc_feature (48)..(180): Homolog of NCBI NO: 18086486 NR Description: AT5g45510/MFC19_18 [Arabidopsis thaliana]
  misc_feature (1183)..(1389): Homolog of NCBI NO: 26449776 NR Description: unknown protein [Arabidopsis thaliana]
MDSLGQDGVPSKTVLVGEAGIGKTWLAKEVSQRVTQEKYNVLWLHLNKKIEDEKSLYEILAAQLSIIYEFEEGEEPDELDYPLESLKEKIKEEMIKHKKDNLLLILDDEGSMTTEEDVMQELNLQDFLKEYSAVKILVTRRDEREEKESTTIKVGPLTEKESLDLLHDAEDLLTSFTSEDWPVLLKRLCDNKEIKEPTLMSCILSKSKGLPAAIVVLIKSLNSIKSMSAKQRKIFKELILSSKSLDEAAASKNAIDRSRYNPVLQLSYELLKPDETVKRPVIACFWHILDFYKYSGCAYYRDLIVHWMLEGYFDPVKSVDKAYQEGHSILMDFMNRGILKIQEDNMVVPEFSMSNLLDLQDCGFFGRSSLGFDRVYGGDKRKGLGKIILIDDMIQTIQSKKKNITTIIASGNRLRREVHGKFFEKPEMQDLEVVVLFEPTFHELVLSLSKLKKLRVLVIRDCDLIDNIDKLSGLQGLHVLEVSGASSLVNIPDDFFKNMTQLQSLNLSGLAIKSSPSTIEKLSMLRCFILRHCSELQDLPNFIVETRKLEVIDIHGARKLESYFDRVKDWKDYKGKNKNFAQLQLLEHLDFSETKIIRLPIFHLKDSTNDFSTMPILTRLLLRNCTRLKRLPQLRPLTNLQILDACGATDLVEMLEVCLEEKKELRILDMSKTSLPELADTIADVVNLNKLLLRNCSLIEELPSIEKLTHLEVFDVSGCIKLKNINGSFGEMSYLHEVNLSETNLSELPDKISELSNLKELIIRKCSKLKTLPNLEKLTNLEIFDVSGCTELETIEGSFENLSCLHKVNLSETNLGELPNKISELSNLKELILRNCSKLKALPNLEKLTHLVIFDVSGCTNLDKIEESFESMSYLCESILCSSKRIVLADSSCIERDQWSQIKECLTSKSEGSSFSNVGEKTREKLLYHGNRYRVIDPEVPLNIDIVDIKRSTDLKTEYIAKAEYVSIAENGSKSVSSLFDELQMASVKGCWVERCKNMDVLFESDEQLEKEKSSSPSLQTLWISNLPLLTSLYSSKGGFIFKNLKKLSVDCCPSIKWLFPEIPDNLEILRVKFCDKLERLFEVKAGELSKLRKLHLLDLPVLSVLGANFPNLEKCTIEKCPKLKAREDEPRIGARITDEISEDQPHKNTIGPETQTPTQPTKATDTIFRIVIPDWNLMEPINQKTFRPKKSAPSGTKGAELRKHIDATLGSGNLREAVKLPPGEDLNEWLAVNTVDFFNQVNLLFGTLTEFCTPENCSTMTAGPKYEYRWADGVQIKKPIEVSAPKYVEYLMDWIETQLDDETIFPQKLGAAFPPNFKEVVKTIFKRLFRVYAHIYHSHFQKIVSLKEEAHLNTCFKHFILFTHEFVLIDKKELAPLQELIESIIAPY

SEQ ID NO: 69735 - protein, 1296 aa, Arabidopsis thaliana
  peptide (1)..(1296): Ceres Seq. ID no. 1824335
  misc_feature (1110)..(1294): Pfam Name: Mob1/phocein family Pfam Description: Mob1/phocein family
  misc_feature (65)..(833): Homolog of NCBI NO: 9758741 NR Description: gene_id:MFC19.18~pir||T04426~strong similarity to
  misc_feature (65)..(833): Homolog of NCBI NO: 22327597 NR Description: putative protein; protein id: At5g45510.1,
  misc_feature (65)..(833): Homolog of NCBI NO: 18086486 NR Description: AT5g45510/MFC19_18 [Arabidopsis thaliana]
  misc_feature (1)..(42): Homolog of NCBI NO: 9758741 NR Description: gene_id:MFC19.18~pir||T04426~strong similarity to
  misc_feature (1)..(42): Homolog of NCBI NO: 18086486 NR Description: AT5g45510/MFC19_18 [Arabidopsis thaliana]
  misc_feature (1)..(42): Homolog of NCBI NO: 22327597 NR Description: putative protein; protein id: At5g45510.1,
  misc_feature (1)..(87): Homolog of NCBI NO: 9758741 NR Description: gene_id:MFC19.18~pir||T04426~strong similarity to
  misc_feature (1)..(87): Homolog of NCBI NO: 18086486 NR Description: AT5g45510/MFC19_18 [Arabidopsis thaliana]
  misc_feature (1)..(87): Homolog of NCBI NO: 22327597 NR Description: putative protein; protein id: At5g45510.1,
  misc_feature (1090)..(1296): Homolog of NCBI NO: 26449776 NR Description: unknown protein [Arabidopsis thaliana]
MIKHKKDNLLLILDDEGSMTTEEDVMQELNLQDFLKEYSAVKILVTRRDEREEKESTTIKVGPLTEKESLDLLHDAEDLLTSFTSEDWPVLLKRLCDNKEIKEPTLMSCILSKSKGLPAAIVVLIKSLNSIKSMSAKQRKIFKELILSSKSLDEAAASKNAIDRSRYNPVLQLSYELLKPDETVKRPVIACFWHILDFYKYSGCAYYRDLIVHWMLEGYFDPVKSVDKAYQEGHSILMDFMNRGILKIQEDNMVVPEFSMSNLLDLQDCGFFGRSSLGFDRVYGGDKRKGLGKIILIDDMIQTIQSKKKNITTIIASGNRLRREVHGKFFEKPEMQDLEVVVLFEPTFHELVLSLSKLKKLRVLVIRDCDLIDNIDKLSGLQGLHVLEVSGASSLVNIPDDFFKNMTQLQSLNLSGLAIKSSPSTIEKLSMLRCFILRHCSELQDLPNFIVETRKLEVIDIHGARKLESYFDRVKDWKDYKGKNKNFAQLQLLEHLDFSETKIIRLPIFHLKDSTNDFSTMPILTRLLLRNCTRLKRLPQLRPLTNLQILDACGATDLVEMLEVCLEEKKELRILDMSKTSLPELADTIADVVNLNKLLLRNCSLIEELPSIEKLTHLEVFDVSGCIKLKNINGSFGEMSYLHEVNLSETNLSELPDKISELSNLKELIIRKCSKLKTLPNLEKLTNLEIFDVSGCTELETIEGSFENLSCLHKVNLSETNLGELPNKISELSNLKELILRNCSKLKALPNLEKLTHLVIFDVSGCTNLDKIEESFESMSYLCESILCSSKRIVLADSSCIERDQWSQIKECLTSKSEGSSFSNVGEKTREKLLYHGNRYRVIDPEVPLNIDIVDIKRSTDLKTEYIAKAEYVSIAENGSKSVSSLFDELQMASVKGCWVERCKNMDVLFESDEQLEKEKSSSPSLQTLWISNLPLLTSLYSSKGGFIFKNLKKLSVDCCPSIKWLFPEIPDNLEILRVKFCDKLERLFEVKAGELSKLRKLHLLDLPVLSVLGANFPNLEKCTIEKCPKLKAREDEPRIGARITDEISEDQPHKNTIGPETQTPTQPTKATDTIFRIVIPDWNLMEPINQKTFRPKKSAPSGTKGAELRKHIDATLGSGNLREAVKLPPGEDLNEWLAVNTVDFFNQVNLLFGTLTEFCTPENCSTMTAGPKYEYRWADGVQIKKPIEVSAPKYVEYLMDWIETQLDDETIFPQKLGAAFPPNFKEVVKTIFKRLFRVYAHIYHSHFQKIVSLKEEAHLNTCFKHFILFTHEFVLIDKKELAPLQELIESIIAPY

SEQ ID NO: 69736 - DNA, 921 bp, Arabidopsis thaliana
  misc_feature (1)..(921): Ceres Seq. ID no. 1824515
  misc_feature: MA Experiment ID: 20000265 Result: Up-regulated in Transcription
  misc_feature: MA Experiment 20000265 PARAMETER Experiment Name: At_Open_Flower_P Parameter: Age (day) Value: 21
  misc_feature: MA Experiment 20000265 PARAMETER Experiment Name: At_Open_Flower_P Parameter: Plant Line Value: WS
  misc_feature: MA Experiment 20000265 PARAMETER Experiment Name: At_Open_Flower_P Parameter: Tissue Value: Closed Flower vs. Whole Plant
  misc_feature: MA Experiment ID: 20000286 Result: Up-regulated in Transcription
  misc_feature: MA Experiment 20000286 PARAMETER Experiment Name: At_Open_Flower_P Parameter: Age (day) Value: 21
  misc_feature: MA Experiment 20000286 PARAMETER Experiment Name: At_Open_Flower_P Parameter: Plant Line Value: WS
  misc_feature: MA Experiment 20000286 PARAMETER Experiment Name: At_Open_Flower_P Parameter: Tissue Value: Half Open vs. Whole Plant
  misc_feature: MA Experiment ID: 20000573 Result: Down-regulated in Transcription
  misc_feature: MA Experiment 20000573 PARAMETER Experiment Name: At_100uM_ABA_Mutants__P Parameter: Organism Value: A. thaliana
  misc_feature: MA Experiment 20000573 PARAMETER Experiment Name: At_100uM_ABA_Mutants__P Parameter: Plant Line Value: CS22 vs. Ler wt
  misc_feature: MA Experiment 20000573 PARAMETER Experiment Name: At_100uM_ABA_Mutants__P Parameter: Timepoint (hr) Value: N/A
  misc_feature: MA Experiment 20000573 PARAMETER Experiment Name: At_100uM_ABA_Mutants__P Parameter: Tissue Value: Whole Plant
  misc_feature: MA Experiment 20000573 PARAMETER Experiment Name: At_100uM_ABA_Mutants__P Parameter: Treatment Value: None
  misc_feature: MA Experiment ID: 20001451 Result: Down-regulated in Transcription
  misc_feature: MA Experiment 20001451 PARAMETER Experiment Name: At_Far-red-induction_P Parameter: Age (day) Value: 7
  misc_feature: MA Experiment 20001451 PARAMETER Experiment Name: At_Far-red-induction_P Parameter: Light Value: Far-red vs. White
  misc_feature: MA Experiment 20001451 PARAMETER Experiment Name: At_Far-red-induction_P Parameter: Organism Value: A. thaliana
  misc_feature: MA Experiment 20001451 PARAMETER Experiment Name: At_Far-red-induction_P Parameter: Plant Line Value: Columbia
  misc_feature: MA Experiment 20001451 PARAMETER Experiment Name: At_Far-red-induction_P Parameter: Timepoint (hr) Value: 24
  misc_feature: MA Experiment 20001451 PARAMETER Experiment Name: At_Far-red-induction_P Parameter: Tissue Value: Whole Plant
atggcagttggaataagacaaaaggaaagtgtcaacaagattgtcaagaagtttccatcaagtgagtttgttgtgatgctgtttcactacgatggtgctgtggatgaatggaaggagtttgagtggagtgacactgccattcatatttctgtagtaaaccaaaccaaatgtttgaatatgtttgtgactcttttaggtggtttgcaaagcgttttctacacccggatattgtctcagcttattcttacatttttctatgggatgaagatctcggtgttgaccattttgatgctagaagatgtggtatctaatgagatgaaaattttcaggtatgtttcaattattaaagaagaaaagcttgaaatatcacaacctgctcttgatcccaatttctctgaagtgcatcatcaacttacctcacgagacaagaaatcaagagtacatagtggaaagcataacttgttcttaaactcattaaaaaaaactctctcctacagatttgttgaaatgatggctcctgtgttttccagagcagcttggaggtgtacatggcatatgattcagaatgacttaaaccatggatggggtatagattttcagcttggatattgtgcacagggtgatcgaaccaaaaatatcggtattgttgattccgagtatatacttcatatgggtcttcctacattaggaggaggttcagctgaaaacaaggaagtaattatagttactgtgtataagcagacggattcagggaagctcgataagaccaagactccgcatgctgcagacaaatcatcatcagtgtcaactggtagaactgaggttcggaagcaaacttatgtcgagttagagacttttaaacatagatggaaaaatgctgtgaagaacgatgagtgctggatagaccgattccaaacatga

SEQ ID NO: 69737 - protein, 306 aa, Arabidopsis thaliana
  peptide (1)..(306): Ceres Seq. ID no. 1824516
  misc_feature (1)..(304): Pfam Name: Protein of unknown function (DUF707) Pfam Description: Protein of unknown function (DUF707)
  misc_feature (1)..(306): Homolog of NCBI NO: 15235499 NR Description: putative protein; protein id: At4g12840.1
  misc_feature (99)..(235): Homolog of NCBI NO: 19386727 NR Description: P0678F11.16 [Oryza sativa (japonica
  misc_feature (3)..(56): Homolog of NCBI NO: 19386727 NR Description: P0678F11.16 [Oryza sativa (japonica
  misc_feature (261)..(304): Homolog of NCBI NO: 19386727 NR Description: P0678F11.16 [Oryza sativa (japonica
  misc_feature (143)..(304): Homolog of NCBI NO: 34899756 NR Description: OJ1773_H01.1 [Oryza sativa (japonica
  misc_feature (4)..(56): Homolog of NCBI NO: 34899756 NR Description: OJ1773_H01.1 [Oryza sativa (japonica
  misc_feature (84)..(148): Homolog of NCBI NO: 34899756 NR Description: OJ1773_H01.1 [Oryza sativa (japonica
  misc_feature (84)..(304): Homolog of NCBI NO: 33146749 NR Description: putative lysine ketoglutarate reductase
  misc_feature (4)..(56): Homolog of NCBI NO: 33146749 NR Description: putative lysine ketoglutarate reductase
  misc_feature (99)..(236): Homolog of NCBI NO: 14719314 NR Description: putative protein [Oryza sativa]
MAVGIRQKESVNKIVKKFPSSEFVVMLFHYDGAVDEWKEFEWSDTAIHISVVNQTKCLNMFVTLLGGLQSVFYTRILSQLILTFFYGMKISVLTILMLEDVVSNEMKIFRYVSIIKEEKLEISQPALDPNFSEVHHQLTSRDKKSRVHSGKHNLFLNSLKKTLSYRFVEMMAPVFSRAAWRCTWHMIQNDLNHGWGIDFQLGYCAQGDRTKNIGIVDSEYILHMGLPTLGGGSAENKEVIIVTVYKQTDSGKLDKTKTPHAADKSSSVSTGRTEVRKQTYVELETFKHRWKNAVKNDECWIDRFQT

SEQ ID NO: 69738 - protein, 281 aa, Arabidopsis thaliana
  peptide (1)..(281): Ceres Seq. ID no. 1824517
  misc_feature (1)..(279): Pfam Name: Protein of unknown function (DUF707) Pfam Description: Protein of unknown function (DUF707)
  misc_feature (1)..(281): Homolog of NCBI NO: 15235499 NR Description: putative protein; protein id: At4g12840.1
  misc_feature (74)..(210): Homolog of NCBI NO: 19386727 NR Description: P0678F11.16 [Oryza sativa (japonica
  misc_feature (1)..(31): Homolog of NCBI NO: 19386727 NR Description: P0678F11.16 [Oryza sativa (japonica
  misc_feature (236)..(279): Homolog of NCBI NO: 19386727 NR Description: P0678F11.16 [Oryza sativa (japonica
  misc_feature (118)..(279): Homolog of NCBI NO: 34899756 NR Description: OJ1773_H01.1 [Oryza sativa (japonica
  misc_feature (1)..(31): Homolog of NCBI NO: 34899756 NR Description: OJ1773_H01.1 [Oryza sativa (japonica
  misc_feature (59)..(123): Homolog of NCBI NO: 34899756 NR Description: OJ1773_H01.1 [Oryza sativa (japonica
  misc_feature (59)..(279): Homolog of NCBI NO: 33146749 NR Description: putative lysine ketoglutarate reductase
  misc_feature (1)..(31): Homolog of NCBI NO: 33146749 NR Description: putative lysine ketoglutarate reductase
  misc_feature (74)..(211): Homolog of NCBI NO: 14719314 NR Description: putative protein [Oryza sativa]
MLFHYDGAVDEWKEFEWSDTAIHISVVNQTKCLNMFVTLLGGLQSVFYTRILSQLILTFFYGMKISVLTILMLEDVVSNEMKIFRYVSIIKEEKLEISQPALDPNFSEVHHQLTSRDKKSRVHSGKHNLFLNSLKKTLSYRFVEMMAPVFSRAAWRCTWHMIQNDLNHGWGIDFQLGYCAQGDRTKNIGIVDSEYILHMGLPTLGGGSAENKEVIIVTVYKQTDSGKLDKTKTPHAADKSSSVSTGRTEVRKQTYVELETFKHRWKNAVKNDECWIDRFQT

SEQ ID NO: 69739 - protein, 247 aa, Arabidopsis thaliana
  peptide (1)..(247): Ceres Seq. ID no. 1824518
  misc_feature (1)..(245): Pfam Name: Protein of unknown function (DUF707) Pfam Description: Protein of unknown function (DUF707)
  misc_feature (1)..(247): Homolog of NCBI NO: 15235499 NR Description: putative protein; protein id: At4g12840.1
  misc_feature (40)..(176): Homolog of NCBI NO: 19386727 NR Description: P0678F11.16 [Oryza sativa (japonica
  misc_feature (202)..(245): Homolog of NCBI NO: 19386727 NR Description: P0678F11.16 [Oryza sativa (japonica
  misc_feature (84)..(245): Homolog of NCBI NO: 34899756 NR Description: OJ1773_H01.1 [Oryza sativa (japonica
  misc_feature (25)..(89): Homolog of NCBI NO: 34899756 NR Description: OJ1773_H01.1 [Oryza sativa (japonica
  misc_feature (25)..(245): Homolog of NCBI NO: 33146749 NR Description: putative lysine ketoglutarate reductase
  misc_feature (40)..(177): Homolog of NCBI NO: 14719314 NR Description: putative protein [Oryza sativa]
  misc_feature (40)..(178): Homolog of NCBI NO: 18390845 NR Description: storage protein, putative; protein id: supported by cDNA: gi_15810566, supported by cDNA: gi_20259568 thaliana] >gi|15810567|gb|AAL07171.1| putative storage protein
  misc_feature (40)..(177): Homolog of NCBI NO: 30683843 NR Description: expressed protein [Arabidopsis thaliana]
  misc_feature (40)..(176): Homolog of NCBI NO: 22331371 NR Description: unknown protein; protein id: At3g27470.1, by cDNA: gi_19698930 [Arabidopsis thaliana] unknown protein [Arabidopsis thaliana]
MFVTLLGGLQSVFYTRILSQLILTFFYGMKISVLTILMLEDVVSNEMKIFRYVSIIKEEKLEISQPALDPNFSEVHHQLTSRDKKSRVHSGKHNLFLNSLKKTLSYRFVEMMAPVFSRAAWRCTWHMIQNDLNHGWGIDFQLGYCAQGDRTKNIGIVDSEYILHMGLPTLGGGSAENKEVIIVTVYKQTDSGKLDKTKTPHAADKSSSVSTGRTEVRKQTYVELETFKHRWKNAVKNDECWIDRFQT

SEQ ID NO: 69740 - DNA, 2892 bp, Arabidopsis thaliana
  misc_feature (1)..(2892): Ceres Seq. ID no. 1824573
  misc_feature: MA Experiment ID: 20000173 Result: Down-regulated in Transcription
  misc_feature: MA Experiment 20000173 PARAMETER Experiment Name: At_42deg_Heat_P Parameter: Age (day) Value: 14
  misc_feature: MA Experiment 20000173 PARAMETER Experiment Name: At_42deg_Heat_P Parameter: Organism Value: A. thaliana
  misc_feature: MA Experiment 20000173 PARAMETER Experiment Name: At_42deg_Heat_P Parameter: Plant Line Value: WS
  misc_feature: MA Experiment 20000173 PARAMETER Experiment Name: At_42deg_Heat_P Parameter: Temperature (deg C) Value: 42 vs. 22
  misc_feature: MA Experiment 20000173 PARAMETER Experiment Name: At_42deg_Heat_P Parameter: Timepoint (hr) Value: 6
  misc_feature: MA Experiment 20000173 PARAMETER Experiment Name: At_42deg_Heat_P Parameter: Tissue Value: Aerial
  misc_feature: MA Experiment ID: 20000179 Result: Down-regulated in Transcription
  misc_feature: MA Experiment 20000179 PARAMETER Experiment Name: At_Germinating_Seeds_P Parameter: Age (hr) Value: 6 vs. 0
  misc_feature: MA Experiment 20000179 PARAMETER Experiment Name: At_Germinating_Seeds_P Parameter: Tissue Value: Germinating Seeds
  misc_feature: MA Experiment ID: 20000185 Result: Up-regulated in Transcription
  misc_feature: MA Experiment 20000185 PARAMETER Experiment Name: At_Roots__P Parameter: Age (day) Value: 7 vs. 21
  misc_feature: MA Experiment 20000185 PARAMETER Experiment Name: At_Roots__P Parameter: Organism Value: A. thaliana
  misc_feature: MA Experiment 20000185 PARAMETER Experiment Name: At_Roots__P Parameter: Tissue Value: Roots vs. Whole Plant
  misc_feature: MA Experiment ID: 20000227 Result: Down-regulated in Transcription
  misc_feature: MA Experiment 20000227 PARAMETER Experiment Name: At_Root-Tips-vs-Tops_P Parameter: Tissue Value: Root Tips vs. Root Tops
  misc_feature: MA Experiment ID: 20000438 Result: Up-regulated in Transcription
  misc_feature: MA Experiment 20000438 PARAMETER Experiment Name: At_Shoots__P Parameter: Age (day) Value: 14
  misc_feature: MA Experiment 20000438 PARAMETER Experiment Name: At_Shoots__P Parameter: Tissue Value: Shoots vs. Whole Plant
  misc_feature: MA Experiment ID: 20000439 Result: Up-regulated in Transcription
  misc_feature: MA Experiment 20000439 PARAMETER Experiment Name: At_Roots__P Parameter: Age (day) Value: 14 vs. 21
  misc_feature: MA Experiment 20000439 PARAMETER Experiment Name: At_Roots__P Parameter: Organism Value: A. thaliana
  misc_feature: MA Experiment 20000439 PARAMETER Experiment Name: At_Roots__P Parameter: Tissue Value: Roots vs. Whole Plant
  misc_feature: MA Experiment ID: 20000496 Result: Up-regulated in Transcription
  misc_feature: MA Experiment 20000496 PARAMETER Experiment Name: At_Guard_Cells_P Parameter: Harvest Date Value: 7/19/2002
  misc_feature: MA Experiment 20000496 PARAMETER Experiment Name: At_Guard_Cells_P Parameter: Organism Value: Canola
  misc_feature: MA Experiment 20000496 PARAMETER Experiment Name: At_Guard_Cells_P Parameter: Tissue Value: Guard Cells vs. Leaves
  misc_feature: Pfam Name: Pkinase_Tyr Pfam Description: Protein tyrosine kinase
atgcctcaccggactacttacttctttccgcggcagtttcccgatcgtggattcgattcgttttcgcttaagaatgatcacgacaagaagaaatcgtcgtctaacgttggagagagttttggatttcaaagagataataaatctaatggagtcggagaagattctaacaaggagaaggagagtactgtgttctcctctaatcctctgctttctaaaagctcagccgtttcagatctctttagcgatgatcgcaagtcggagaagaagcatcagcagcaactagccgctttctatgagtggttggcggagaagaaggctaatctctctaggtcatcatctactactactactcatggacgcggggtgaagcccacgcgcttctctatgtctagcgacgccgatgaggagagagagcttctgttgtcttctccggctgatcccgctccgcttcctgctacttcttcgccggattctatcattgattcggctaggacggttaacatacatgaacgaaacattgatcggagctttgacagagaggtttcgcttccccgaatgtcgagtgagagcagcttcgctggaagcttcttctccgggacgacggtggacgggaatttctccaatttctcaagtcatacagacgcaagggaaacttcgaccaccacgcttgtctcagtgaacaaagaggaagaagaagttgaggttagggaacagggcaaagagcaaagcttagcgcagaagtcaagagaaggctattacttgcaggtcacgcttgctaagtggctaagttctcaagcaaacctagcatgtgagtctgttcatatacagagcacagaatctatctcctaccgtttttgggtaagtggttgtttatcatacagtgacaagatatcagatggattttacagtatattaggaatggatccgtatctttggttgatgtgtaacaattctgaggatggcaaacgaattccatctcttttgttactcaaggagactgagccgaatgatacatcaatggaagtggttttgatagatagacgtgaggactcacgtcttaaagaactggaggataaggcacatgagctgtattgttcttcagacaacatgttagtgctcgtcgagaaacttggcagacttgttgcggtctatatgggggggaatttccaggtggagcaaggtgatctccagaaacgatggaaactggtcagcaatagactcaaggaatttcggaaatgtatcattcttcctataggtagtctaacaatgggcctttgccggcatcgtgccatcctatttaagaaattggctgattacataggtttaccatgtcggatagctcgaggttgcagatactgtaaagagagccaccaatcttcttgccttgtcaagattgacgatgacaggaagctttcaagggaatatgtagttgacctcatcggggaaccaggaaatgtccatgatccggattcctctatcaacggtgaaacacagtgtcagattccttcacctcttcaaatgagtcatcttacagatttttccaggccttgcgtgcatagtacatctccttgtcagactgtagagtcaaagacttcacgcactctttctgaaaacattcaacgttcagggagtcaaggccaagtacacaaagaatttgagttgcctgataacgcagggacagtatgttgtgctcatattgatcaaacttgctgtgcaaaagtatcatcaatggttttgacagaatctgttcttcgagctctaccacttgatataccaaaccttagtgaagaaaagattgccccacaagaaacctgcaaagaagaaaccgttctattagaagatccaacagctatgaagcagccaaacttatcagttgaaccagagatagtagaggctgacactcgaaaagataaaaaaggaaggttacctgttgacgccatctcaccttacttgactattgaaccttctttggcatcagattggctggaggtctcatggaatgaattacatatcaaagagcgtgtgggtgctggatcatttggaactgttcatcgtgctgagtggcatggatcagatgttgctgtcaagattttgtctattcaagatttccatgatgaccaattcagagaatttctcagagaggtatgtaagcaagcggttgctataatgaaacgtgttcgtcacccaaatgttgttctcttcatgggtgctgtgacagagcgaccccggttatcaataataacagaatatttgccaagaggcagtctttttcgccttatccataggccagcttctggggagttgctagatcagaggaggaggctacgtatggcattggatgtggtttgtgctattccccattatgccaaggggctcaactacctacactgtcttaatcctcctgtagtgcattgggacctgaaatctccaaatctactggttgataagaactggacagtgaaggtttgcgattttggactttcaagattcaaggcaaacactttcataccatcaaaatctgttgcaggaacacctgagtggatggctccagagtttcttagaggggaaccgacaaacgagaaatcagatgtttacagtttcggagtagtcttatgggagttgattactttgcaacagccttggaatggactcagtcctgctcaggtggttggagcagttgcattccagaacaggcggcttataattcctcccaacacctctccggttttggtatctctaatggaagcttgctgggcagatgagccgtctcagcggccagcatttggtagtatagtggacacattgaagaagctactaaagtctccggtgcagctgatccaaatgggtggagacaaaggggtaattccaactaaatcagctcccatactatag

SEQ ID NO: 69741 - protein, 963 aa, Arabidopsis thaliana
  peptide (1)..(963): Ceres Seq. ID no. 1824574
  misc_feature: Pfam Name: Pkinase_Tyr Pfam Description: Protein tyrosine kinase
  misc_feature (280)..(598): Homolog of NCBI NO: 38345798 NR Description: OSJNBa0085I10.15 [Oryza sativa (japonica
  misc_feature (651)..(941): Homolog of NCBI NO: 38345798 NR Description: OSJNBa0085I10.15 [Oryza sativa (japonica
  misc_feature (654)..(943): Homolog of NCBI NO: 15242848 NR Description: SERINE/THREONINE-PROTEIN KINASE CTR1; protein id:
  misc_feature (242)..(506): Homolog of NCBI NO: 15242848 NR Description: SERINE/THREONINE-PROTEIN KINASE CTR1; protein id:
  misc_feature (149)..(506): Homolog of NCBI NO: 7446384 NR Description: probable protein kinase - tomato
  misc_feature (607)..(943): Homolog of NCBI NO: 7446384 NR Description: probable protein kinase - tomato
  misc_feature (177)..(607): Homolog of NCBI NO: 33235551 NR Description: constitutive triple response 1-like protein
  misc_feature (622)..(942): Homolog of NCBI NO: 33235551 NR Description: constitutive triple response 1-like protein
  misc_feature (149)..(506): Homolog of NCBI NO: 4193948 NR Description: ethylene-inducible CTR1-like protein kinase;
  misc_feature (149)..(506): Homolog of NCBI NO: 4193950 NR Description: ethylene-inducible CTR1-like protein kinase;
MPHRTTYFFPRQFPDRGFDSFSLKNDHDKKKSSSNVGESFGFQRDNKSNGVGEDSNKEKESTVFSSNPLLSKSSAVSDLFSDDRKSEKKHQQQLAAFYEWLAEKKANLSRSSSTTTTHGRGVKPTRFSMSSDADEERELLLSSPADPAPLPATSSPDSIIDSARTVNIHERNIDRSFDREVSLPRMSSESSFAGSFFSGTTVDGNFSNFSSHTDARETSTTTLVSVNKEEEEVEVREQGKEQSLAQKSREGYYLQVTLAKWLSSQANLACESVHIQSTESISYRFWVSGCLSYSDKISDGFYSILGMDPYLWLMCNNSEDGKRIPSLLLLKETEPNDTSMEVVLIDRREDSRLKELEDKAHELYCSSDNMLVLVEKLGRLVAVYMGGNFQVEQGDLQKRWKLVSNRLKEFRKCIILPIGSLTMGLCRHRAILFKKLADYIGLPCRIARGCRYCKESHQSSCLVKIDDDRKLSREYVVDLIGEPGNVHDPDSSINGETQCQIPSPLQMSHLTDFSRPCVHSTSPCQTVESKTSRTLSENIQRSGSQGQVHKEFELPDNAGTVCCAHIDQTCCAKVSSMVLTESVLRALPLDIPNLSEEKIAPQETCKEETVLLEDPTAMKQPNLSVEPEIVEADTRKDKKGRLPVDAISPYLTIEPSLASDWLEVSWNELHIKERVGAGSFGTVHRAEWHGSDVAVKILSIQDFHDDQFREFLREVCKQAVAIMKRVRHPNVVLFMGAVTERPRLSIITEYLPRGSLFRLIHRPASGELLDQRRRLRMALDVVCAIPHYAKGLNYLHCLNPPVVHWDLKSPNLLVDKNWTVKVCDFGLSRFKANTFIPSKSVAGTPEWMAPEFLRGEPTNEKSDVYSFGVVLWELITLQQPWNGLSPAQVVGAVAFQNRRLIIPPNTSPVLVSLMEACWADEPSQRPAFGSIVDTLKKLLKSPVQLIQMGGDKGVIPTKSAPIL

SEQ ID NO: 69742 - protein, 835 aa, Arabidopsis thaliana
  peptide (1)..(835): Ceres Seq. ID no. 1824575
  misc_feature: Pfam Name: Pkinase_Tyr Pfam Description: Protein tyrosine kinase
  misc_feature (152)..(470): Homolog of NCBI NO: 38345798 NR Description: OSJNBa0085I10.15 [Oryza sativa (japonica
  misc_feature (523)..(813): Homolog of NCBI NO: 38345798 NR Description: OSJNBa0085I10.15 [Oryza sativa (japonica
  misc_feature (526)..(815): Homolog of NCBI NO: 15242848 NR Description: SERINE/THREONINE-PROTEIN KINASE CTR1; protein id:
  misc_feature (114)..(378): Homolog of NCBI NO: 15242848 NR Description: SERINE/THREONINE-PROTEIN KINASE CTR1; protein id:
  misc_feature (21)..(378): Homolog of NCBI NO: 7446384 NR Description: probable protein kinase - tomato
  misc_feature (479)..(815): Homolog of NCBI NO: 7446384 NR Description: probable protein kinase - tomato
  misc_feature (49)..(479): Homolog of NCBI NO: 33235551 NR Description: constitutive triple response 1-like protein
  misc_feature (494)..(814): Homolog of NCBI NO: 33235551 NR Description: constitutive triple response 1-like protein
  misc_feature (21)..(378): Homolog of NCBI NO: 4193948 NR Description: ethylene-inducible CTR1-like protein kinase;
  misc_feature (21)..(378): Homolog of NCBI NO: 4193950 NR Description: ethylene-inducible CTR1-like protein kinase;
MSSDADEERELLLSSPADPAPLPATSSPDSIIDSARTVNIHERNIDRSFDREVSLPRMSSESSFAGSFFSGTTVDGNFSNFSSHTDARETSTTTLVSVNKEEEEVEVREQGKEQSLAQKSREGYYLQVTLAKWLSSQANLACESVHIQSTESISYRFWVSGCLSYSDKISDGFYSILGMDPYLWLMCNNSEDGKRIPSLLLLKETEPNDTSMEVVLIDRREDSRLKELEDKAHELYCSSDNMLVLVEKLGRLVAVYMGGNFQVEQGDLQKRWKLVSNRLKEFRKCIILPIGSLTMGLCRHRAILFKKLADYIGLPCRIARGCRYCKESHQSSCLVKIDDDRKLSREYVVDLIGEPGNVHDPDSSINGETQCQIPSPLQMSHLTDFSRPCVHSTSPCQTVESKTSRTLSENIQRSGSQGQVHKEFELPDNAGTVCCAHIDQTCCAKVSSMVLTESVLRALPLDIPNLSEEKIAPQETCKEETVLLEDPTAMKQPNLSVEPEIVEADTRKDKKGRLPVDAISPYLTIEPSLASDWLEVSWNELHIKERVGAGSFGTVHRAEWHGSDVAVKILSIQDFHDDQFREFLREVCKQAVAIMKRVRHPNVVLFMGAVTERPRLSIITEYLPRGSLFRLIHRPASGELLDQRRRLRMALDVVCAIPHYAKGLNYLHCLNPPVVHWDLKSPNLLVDKNWTVKVCDFGLSRFKANTFIPSKSVAGTPEWMAPEFLRGEPTNEKSDVYSFGVVLWELITLQQPWNGLSPAQVVGAVAFQNRRLIIPPNTSPVLVSLMEACWADEPSQRPAFGSIVDTLKKLLKSPVQLIQMGGDKGVIPTKSAPIL

SEQ ID NO: 69743 - protein, 778 aa, Arabidopsis thaliana
  peptide (1)..(778): Ceres Seq. ID no. 1824576
  misc_feature: Pfam Name: Pkinase_Tyr Pfam Description: Protein tyrosine kinase
  misc_feature (422)..(758): Homolog of NCBI NO: 7446384 NR Description: probable protein kinase - tomato
  misc_feature (1)..(422): Homolog of NCBI NO: 33235551 NR Description: constitutive triple response 1-like protein
  misc_feature (437)..(757): Homolog of NCBI NO: 33235551 NR Description: constitutive triple response 1-like protein
  misc_feature (1)..(321): Homolog of NCBI NO: 4193948 NR Description: ethylene-inducible CTR1-like protein kinase;
  misc_feature (1)..(321): Homolog of NCBI NO: 4193950 NR Description: ethylene-inducible CTR1-like protein kinase;
  misc_feature (95)..(413): Homolog of NCBI NO: 38345798 NR Description: OSJNBa0085I10.15 [Oryza sativa (japonica
  misc_feature (466)..(756): Homolog of NCBI NO: 38345798 NR Description: OSJNBa0085I10.15 [Oryza sativa (japonica
  misc_feature (469)..(758): Homolog of NCBI NO: 15242848 NR Description: SERINE/THREONINE-PROTEIN KINASE CTR1; protein id:
  misc_feature (57)..(321): Homolog of NCBI NO: 15242848 NR Description: SERINE/THREONINE-PROTEIN KINASE CTR1; protein id:
  misc_feature (1)..(321): Homolog of NCBI NO: 7446384 NR Description: probable protein kinase - tomato
MSSESSFAGSFFSGTTVDGNFSNFSSHTDARETSTTTLVSVNKEEEEVEVREQGKEQSLAQKSREGYYLQVTLAKWLSSQANLACESVHIQSTESISYRFWVSGCLSYSDKISDGFYSILGMDPYLWLMCNNSEDGKRIPSLLLLKETEPNDTSMEVVLIDRREDSRLKELEDKAHELYCSSDNMLVLVEKLGRLVAVYMGGNFQVEQGDLQKRWKLVSNRLKEFRKCIILPIGSLTMGLCRHRAILFKKLADYIGLPCRIARGCRYCKESHQSSCLVKIDDDRKLSREYVVDLIGEPGNVHDPDSSINGETQCQIPSPLQMSHLTDFSRPCVHSTSPCQTVESKTSRTLSENIQRSGSQGQVHKEFELPDNAGTVCCAHIDQTCCAKVSSMVLTESVLRALPLDIPNLSEEKIAPQETCKEETVLLEDPTAMKQPNLSVEPEIVEADTRKDKKGRLPVDAISPYLTIEPSLASDWLEVSWNELHIKERVGAGSFGTVHRAEWHGSDVAVKILSIQDFHDDQFREFLREVCKQAVAIMKRVRHPNVVLFMGAVTERPRLSIITEYLPRGSLFRLIHRPASGELLDQRRRLRMALDVVCAIPHYAKGLNYLHCLNPPVVHWDLKSPNLLVDKNWTVKVCDFGLSRFKANTFIPSKSVAGTPEWMAPEFLRGEPTNEKSDVYSFGVVLWELITLQQPWNGLSPAQVVGAVAFQNRRLIIPPNTSPVLVSLMEACWADEPSQRPAFGSIVDTLKKLLKSPVQLIQMGGDKGVIPTKSAPIL

SEQ ID NO: 69744 - DNA, 1845 bp, Arabidopsis thaliana
  misc_feature (1)..(1845): Ceres Seq. ID no. 1824593
  misc_feature: MA Experiment ID: 20001451 Result: Down-regulated in Transcription
  misc_feature: MA Experiment 20001451 PARAMETER Experiment Name: At_Far-red-induction_P Parameter: Age (day) Value: 7
  misc_feature: MA Experiment 20001451 PARAMETER Experiment Name: At_Far-red-induction_P Parameter: Light Value: Far-red vs. White
  misc_feature: MA Experiment 20001451 PARAMETER Experiment Name: At_Far-red-induction_P Parameter: Organism Value: A. thaliana
  misc_feature: MA Experiment 20001451 PARAMETER Experiment Name: At_Far-red-induction_P Parameter: Plant Line Value: Columbia
  misc_feature: MA Experiment 20001451 PARAMETER Experiment Name: At_Far-red-induction_P Parameter: Timepoint (hr) Value: 24
  misc_feature: MA Experiment 20001451 PARAMETER Experiment Name: At_Far-red-induction_P Parameter: Tissue Value: Whole Plant
atgtcagaggatgttgagaaatatctcaacttaaatccaccttgctcctcctcctcctcttcttcctccgccgctacattcacgaacaagtctcgaaatttcaaatcttctcccccgccgtgtccagatcatgtccttgagaacgttttagagaacgtgcttcagttcctcacttccagatgcgatcgcaacgcagtctcattggtctgcagatcgtggtatcgcgtcgaggctcagactcgattagaggtttttattggaaactgttactcgctctctcctgctcggcttattcaccggttcaagcgtgttaggtctcttgtgcttaaagggaaacctaggtttgctgattttaatctcatgcctcctaattggggagctcaattctctccttgggttgctgctacagctaaggcttatccttggctcgagaaggttcatttgaagcgtatgtttgttacggatgatgatttggctcttcttgctgagtcgtttcctgggttcaaagagcttactttggtctgctgtgaaggttttgggactagtggtattgctattgttgctaacaaatgcaggcagctaaaggtccttgatttgatggagtcagaagtcacagatgatgagttggattggatttcttgttttcctgagggtgaaactcatctggagtctttgtcttttgactgtgttgaatcccctatcaatttcaaggcattggaggagctcgtggttaggtcaccattcttgaagaaacttagaacgaacaggtttgtttcccttgaagagctgcatcgactaatggttcgagcgccgcagttaacgagtcttgggacggggtcatttagtccagacaatgtgcctcagggagaacaacaaccggattatgcagctgcttttcgtgcttgtaaatccatagtttgtctctcaggattcagggaatttagaccggaatacctcctagccatctcttcagtttgtgctaatctcacctctcttaacttcagttatgctaacatttctcctcacatgctcaagcccatcataagcaactgtcacaatatccgagtcttctgggctcttgactcgatacgtgatgaaggactacaggcagtggctgccacatgcaaggagctccgtgagcttcggattttcccttttgatcctcgtgaagacagtgaaggtcctgtctcgggagtaggcctccaagcaatttcagagggctgtaggaaactggaatctatcctgtacttttgccagaatatgaccaatggagctgtgacagccatgtcggagaactgcccgcagcttactgtgtttagactttgcataatgggtcgccataggcctgaccacgtgacaggaaagccaatggacgatggatttggtgccattgttaaaaactgcaagaagctaacccgacttgcagtatcagggttactaacagatgaagcttttagctatataggagaatatgggaaattgatccgtacgctatctgtagcgtttgctgggaacagtgacaaggctctgagatacgttcttgagggttgtcctaaactacaaaagcttgagatcagggacagtccctttggagatgttggattgcgctctggtatgcatcggtattccaatatgaggtttgtttggttgtcgtcatgtctcatatcccgtggaggctgcaggggtgtttctcatgctctgcctaatgtagtcgtggaagtatttggagccgatggtgatgatgacgaagacactgtcactggggattatgttgagacattgtacttgtatcgatcccttgatggcccaaggaaggatgctccaaagtttgtaacaattttatga

SEQ ID NO: 69745 - protein, 614 aa, Arabidopsis thaliana; identical to SEQ ID NO: 46714
  peptide (1)..(614): Ceres Seq. ID no. 1824594
  misc_feature (1)..(614): Homolog of NCBI NO: 18423092 NR Description: transport inhibitor response 1 (TIR1), putative; id: At5g49980.1, supported by cDNA: gi_15912306 [Arabidopsis >gi|8777429|dbj|BAA97019.1| transport inhibitor response 1
  misc_feature (1)..(614): Homolog of NCBI NO: 13249030 NR Description: F-box containing protein TIR1 [Populus tremula x
  misc_feature (35)..(614): Homolog of NCBI NO: 34902412 NR Description: Putative F-box containing protein TIR1 [Oryza
  misc_feature (47)..(614): Homolog of NCBI NO: 18405102 NR Description: transport inhibitor response 1 (TIR1), putative; id: At3g26810.1, supported by cDNA: gi_17064983 [Arabidopsis
  misc_feature (47)..(614): Homolog of NCBI NO: 18391439 NR Description: transport inhibitor response 1 (TIR1), putative; id: At1g12820.1, supported by cDNA: gi_20466150 [Arabidopsis
  misc_feature (47)..(611): Homolog of NCBI NO: 18412567 NR Description: transport inhibitor response 1 (TIR1), AtFBL1; id: At3g62980.1, supported by cDNA: gi_11935208, supported by gi_2352493 [Arabidopsis thaliana] >gi|11282337|pir||T48087
  misc_feature (47)..(614): Homolog of NCBI NO: 21740736 NR Description: OSJNBa0072K14.1 [Oryza sativa (japonica
  misc_feature (49)..(611): Homolog of NCBI NO: 12658970 NR Description: GRR1-like protein 1 [Arabidopsis thaliana]

SEQ ID NO: 69746 - protein, 494 aa, Arabidopsis thaliana; identical to SEQ ID NO: 46715
  peptide (1)..(494): Ceres Seq. ID no. 1824595
  misc_feature (1)..(494): Homolog of NCBI NO: 18423092 NR Description: transport inhibitor response 1 (TIR1), putative; id: At5g49980.1, supported by cDNA: gi_15912306 [Arabidopsis >gi|8777429|dbj|BAA97019.1| transport inhibitor response 1
  misc_feature (1)..(494): Homolog of NCBI NO: 13249030 NR Description: F-box containing protein TIR1 [Populus tremula x
  misc_feature (1)..(494): Homolog of NCBI NO: 34902412 NR Description: Putative F-box containing protein TIR1 [Oryza
  misc_feature (1)..(494): Homolog of NCBI NO: 18405102 NR Description: transport inhibitor response 1 (TIR1), putative; id: At3g26810.1, supported by cDNA: gi_17064983 [Arabidopsis
  misc_feature (1)..(494): Homolog of NCBI NO: 18391439 NR Description: transport inhibitor response 1 (TIR1), putative; id: At1g12820.1, supported by cDNA: gi_20466150 [Arabidopsis
  misc_feature (1)..(491): Homolog of NCBI NO: 18412567 NR Description: transport inhibitor response 1 (TIR1), AtFBL1; id: At3g62980.1, supported by cDNA: gi_11935208, supported by gi_2352493 [Arabidopsis thaliana] >gi|11282337|pir||T48087
  misc_feature (1)..(494): Homolog of NCBI NO: 21740736 NR Description: OSJNBa0072K14.1 [Oryza sativa (japonica
  misc_feature (1)..(491): Homolog of NCBI NO: 12658970 NR Description: GRR1-like protein 1 [Arabidopsis thaliana]

SEQ ID NO: 69747 - protein, 464 aa, Arabidopsis thaliana
  peptide (1)..(464): Ceres Seq. ID no. 1824596
  misc_feature (1)..(464): Homolog of NCBI NO: 18423092 NR Description: transport inhibitor response 1 (TIR1), putative; id: At5g49980.1, supported by cDNA: gi_15912306 [Arabidopsis >gi|8777429|dbj|BAA97019.1| transport inhibitor response 1
  misc_feature (1)..(464): Homolog of NCBI NO: 13249030 NR Description: F-box containing protein TIR1 [Populus tremula x
  misc_feature (1)..(464): Homolog of NCBI NO: 34902412 NR Description: Putative F-box containing protein TIR1 [Oryza
  misc_feature (1)..(464): Homolog of NCBI NO: 18405102 NR Description: transport inhibitor response 1 (TIR1), putative; id: At3g26810.1, supported by cDNA: gi_17064983 [Arabidopsis
  misc_feature (1)..(464): Homolog of NCBI NO: 18391439 NR Description: transport inhibitor response 1 (TIR1), putative; id: At1g12820.1, supported by cDNA: gi_20466150 [Arabidopsis
  misc_feature (1)..(461): Homolog of NCBI NO: 18412567 NR Description: transport inhibitor response 1 (TIR1), AtFBL1; id: At3g62980.1, supported by cDNA: gi_11935208, supported by gi_2352493 [Arabidopsis thaliana] >gi|11282337|pir||T48087
  misc_feature (1)..(464): Homolog of NCBI NO: 21740736 NR Description: OSJNBa0072K14.1 [Oryza sativa (japonica
  misc_feature (1)..(461): Homolog of NCBI NO: 12658970 NR Description: GRR1-like protein 1 [Arabidopsis thaliana]
MFVTDDDLALLAESFPGFKELTLVCCEGFGTSGIAIVANKCRQLKVLDLMESEVTDDELDWISCFPEGETHLESLSFDCVESPINFKALEELVVRSPFLKKLRTNRFVSLEELHRLMVRAPQLTSLGTGSFSPDNVPQGEQQPDYAAAFRACKSIVCLSGFREFRPEYLLAISSVCANLTSLNFSYANISPHMLKPIISNCHNIRVFWALDSIRDEGLQAVAATCKELRELRIFPFDPREDSEGPVSGVGLQAISEGCRKLESILYFCQNMTNGAVTAMSENCPQLTVFRLCIMGRHRPDHVTGKPMDDGFGAIVKNCKKLTRLAVSGLLTDEAFSYIGEYGKLIRTLSVAFAGNSDKALRYVLEGCPKLQKLEIRDSPFGDVGLRSGMHRYSNMRFVWLSSCLISRGGCRGVSHALPNVVVEVFGADGDDDEDTVTGDYVETLYLYRSLDGPRKDAPKFVTIL

SEQ ID NO: 69748 - DNA, 768 bp, Arabidopsis thaliana
  misc_feature (1)..(768): Ceres Seq. ID no. 1824647
  misc_feature: MA Experiment ID: 20000328 Result: Up-regulated in Transcription
  misc_feature: MA Experiment 20000328 PARAMETER Experiment Name: At_42deg_Heat_Sub_P Parameter: Age (day) Value: 14
  misc_feature: MA Experiment 20000328 PARAMETER Experiment Name: At_42deg_Heat_Sub_P Parameter: Organism Value: A. thaliana
  misc_feature: MA Experiment 20000328 PARAMETER Experiment Name: At_42deg_Heat_Sub_P Parameter: Plant Line Value: WS
  misc_feature: MA Experiment 20000328 PARAMETER Experiment Name: At_42deg_Heat_Sub_P Parameter: Temperature (deg C) Value: 42 vs. 22
  misc_feature: MA Experiment 20000328 PARAMETER Experiment Name: At_42deg_Heat_Sub_P Parameter: Timepoint (hr) Value: 6
  misc_feature: MA Experiment 20000328 PARAMETER Experiment Name: At_42deg_Heat_Sub_P Parameter: Tissue Value: Aerial
atgatcataacagtccttcattctcatgtctcattctatttcatcatccttagcttcctcttcttccatggaagtgatggtgctacaataaccatcgtaaatcgatgcagcttcaccgtgtggccgggaattttgtccaactccggaagcggcgatataggcaccaccggcttcgagctcgttcccggtggttcacgttcgttccaagctccagctagctggtcaggtcggttttgggcacgaaccggttgcaacttcaactcagacacaggacaaggcacctgcctaaccggggactgcggctctaaccaggtcgaatgtaacggtgcaggagcaaaaccgcccgctacactcgccgaattcacaatcgggtcaggtccagcagacccggcccgtaaacaagacttctacgacgtaagcctcgtggacggttacaacgttcccatgttggtggaagcaagtggcgggtcagaaggtacttgcttaaccacgggatgcgtaacggatctaaaccaaaaatgtccaacggagctccggttcgggtccgggtcagcatgcaaaagcgcgtgtgaggcttttggtagtccagaatattgttgtagtggcgcgtacgcctcacccaccgagtgtaaaccatcgatgtactcggagatattcaaatctgcgtgtccaagatcatatagctacgcgttcgacgatgctacaagtacgttcacatgcactgatgctgattacaccatcactttttgcccttccttgcctaggtag

SEQ ID NO: 69749 - protein, 255 aa, Arabidopsis thaliana
  peptide (1)..(255): Ceres Seq. ID no. 1824648
  misc_feature (34)..(251): Pfam Name: Thaumatin family Pfam Description: Thaumatin family
  misc_feature (1)..(255): Homolog of NCBI NO: 15233738 NR Description: thaumatin-like protein; protein id: At4g24180.1
  misc_feature (1)..(255): Homolog of NCBI NO: 2262099 NR Description: thaumatin isolog [Arabidopsis thaliana]
  misc_feature (8)..(254): Homolog of NCBI NO: 21592749 NR Description: putative thaumatin-like protein [Arabidopsis
  misc_feature (8)..(254): Homolog of NCBI NO: 18420282 NR Description: putative thaumatin-like protein; protein id: supported by cDNA: 32152., supported by cDNA: gi_17979354, by cDNA: gi_20466020 [Arabidopsis thaliana]
  misc_feature (24)..(254): Homolog of NCBI NO: 7442168 NR Description: pathogenesis-related protein F20M13.220 -
  misc_feature (24)..(252): Homolog of NCBI NO: 37531036 NR Description: putative thaumatin-like protein [Oryza sativa
  misc_feature (8)..(252): Homolog of NCBI NO: 15233437 NR Description: thaumatin-like protein; protein id: At4g36010.1, by cDNA: gi_13430505, supported by cDNA: gi_21280948 [Arabidopsis
  misc_feature (13)..(252): Homolog of NCBI NO: 25296204 NR Description: hypothetical protein T20H2.19 [imported] - thaliana >gi|8778995|gb|AAF79910.1|AC022472_19 Contains to SCUTL1 mRNA from Vitis vinifera gb|AF195653 and is a member of
  misc_feature (10)..(255): Homolog of NCBI NO: 15227907 NR Description: putative thaumatin-like pathogenesis-related protein id: At2g17860.1 [Arabidopsis thaliana]
  misc_feature (14)..(252): Homolog of NCBI NO: 15222875 NR Description: thaumatin, putative; protein id: At1g75800.1, by cDNA: gi_18377859, supported by cDNA: gi_20334825 [Arabidopsis
MIITVLHSHVSFYFIILSFLFFHGSDGATITIVNRCSFTVWPGILSNSGSGDIGTTGFELVPGGSRSFQAPASWSGRFWARTGCNFNSDTGQGTCLTGDCGSNQVECNGAGAKPPATLAEFTIGSGPADPARKQDFYDVSLVDGYNVPMLVEASGGSEGTCLTTGCVTDLNQKCPTELRFGSGSACKSACEAFGSPEYCCSGAYASPTECKPSMYSEIFKSACPRSYSYAFDDATSTFTCTDADYTITFCPSLPR

SEQ ID NO: 69750 - DNA, 765 bp, Arabidopsis thaliana
  misc_feature (1)..(765): Ceres Seq. ID no. 1824677
  misc_feature: MA Experiment ID: 20000180 Result: Down-regulated in Transcription
  misc_feature: MA Experiment 20000180 PARAMETER Experiment Name: At_Germinating_Seeds_P Parameter: Age (hr) Value: 24 vs. 0
  misc_feature: MA Experiment 20000180 PARAMETER Experiment Name: At_Germinating_Seeds_P Parameter: Tissue Value: Germinating Seeds
  misc_feature: MA Experiment ID: 20000439 Result: Up-regulated in Transcription
  misc_feature: MA Experiment 20000439 PARAMETER Experiment Name: At_Roots__P Parameter: Age (day) Value: 14 vs. 21
  misc_feature: MA Experiment 20000439 PARAMETER Experiment Name: At_Roots__P Parameter: Organism Value: A. thaliana
  misc_feature: MA Experiment 20000439 PARAMETER Experiment Name: At_Roots__P Parameter: Tissue Value: Roots vs. Whole Plant
  misc_feature: MA Experiment ID: 20000794 Result: Down-regulated in Transcription
  misc_feature: MA Experiment 20000794 PARAMETER Experiment Name: At_Petals_P Parameter: Age (day) Value: 23-25 days
  misc_feature: MA Experiment 20000794 PARAMETER Experiment Name: At_Petals_P Parameter: Plant Line Value: WS
  misc_feature: MA Experiment 20000794 PARAMETER Experiment Name: At_Petals_P Parameter: Tissue Value: Petals vs. Whole plant
  misc_feature: MA Experiment ID: 20001556 Result: Up-regulated in Transcription
  misc_feature: MA Experiment 20001556 PARAMETER Experiment Name: At_Drought_Soil_Dry_P Parameter: Age (day) Value: 26
  misc_feature: MA Experiment 20001556 PARAMETER Experiment Name: At_Drought_Soil_Dry_P Parameter: Organism Value: A. thaliana
  misc_feature: MA Experiment 20001556 PARAMETER Experiment Name: At_Drought_Soil_Dry_P Parameter: Plant Line Value: WS
  misc_feature: MA Experiment 20001556 PARAMETER Experiment Name: At_Drought_Soil_Dry_P Parameter: Post Timepoint (hr) Value: None
  misc_feature: MA Experiment 20001556 PARAMETER Experiment Name: At_Drought_Soil_Dry_P Parameter: Post-Treatment Value: None
  misc_feature: MA Experiment 20001556 PARAMETER Experiment Name: At_Drought_Soil_Dry_P Parameter: Timepoint (day) Value: 12
  misc_feature: MA Experiment 20001556 PARAMETER Experiment Name: At_Drought_Soil_Dry_P Parameter: Treatment Value: Drought vs. No Drought
  misc_feature: MA Experiment ID: 20001558 Result: Up-regulated in Transcription
  misc_feature: MA Experiment 20001558 PARAMETER Experiment Name: At_Drought_Soil_Dry_P Parameter: Age (day) Value: 27
  misc_feature: MA Experiment 20001558 PARAMETER Experiment Name: At_Drought_Soil_Dry_P Parameter: Organism Value: A. thaliana
  misc_feature: MA Experiment 20001558 PARAMETER Experiment Name: At_Drought_Soil_Dry_P Parameter: Plant Line Value: WS
  misc_feature: MA Experiment 20001558 PARAMETER Experiment Name: At_Drought_Soil_Dry_P Parameter: Post Timepoint (hr) Value: 6
  misc_feature: MA Experiment 20001558 PARAMETER Experiment Name: At_Drought_Soil_Dry_P Parameter: Post-Treatment Value: Re-Water vs. No Drought
  misc_feature: MA Experiment 20001558 PARAMETER Experiment Name: At_Drought_Soil_Dry_P Parameter: Timepoint (day) Value: 13
  misc_feature: MA Experiment 20001558 PARAMETER Experiment Name: At_Drought_Soil_Dry_P Parameter: Treatment Value: Drought vs. No Drought
  misc_feature: MA Experiment ID: 20001757 Result: Up-regulated in Transcription
  misc_feature: MA Experiment 20001757 PARAMETER Experiment Name: At_50mM_NH4NO3_L-to-H_P Parameter: Timepoint (hr) Value: 6
  misc_feature: MA Experiment 20001757 PARAMETER Experiment Name: At_50mM_NH4NO3_L-to-H_P Parameter: Tissue Value: Leaf
  misc_feature: MA Experiment 20001757 PARAMETER Experiment Name: At_50mM_NH4NO3_L-to-H_P Parameter: Treatment Value: 50mM NH4NO3 vs 100mM Mannitol
atgaactcactcgccattagagtctccaaggttctcagatcctcttcaatatctcctttagcaataagtgctgagagaggctctaagtcgtggttctctactggtcctatcgatgaaggtgtagaagaagattttgaagaaaatgttacagaaaggcctgagcttcaacctcatggagttgatcctcgtaaaggttggggatttcgcggtgttcatagggcgattatttgtgggaaagtagggcaagcaccgttacagaagatcttaaggaacgggcggacagtaacgatctttacagtaggaacaggtgggatgtttgatcagaggcttgtaggagctactaatcagccaaaaccagctcagtggcatagaatcgctgtgcacaacgaagtgcttggctcttacgctgtccaaaaactcgctaaaaactcgtcggtttatgtggaaggtgatattgagactagagtgtataatgatagcatcagcagtgaagtgaagagtatccctgagatttgcgttcgtcgtgatggtatgtatgttcatattgttgatccggaacatcaatttgttgctgagttacgattctcttgctttgttttaggtaagattcggatgatcaaatatggtgaaagcattagcaaaatctcttttgatgagctaagtaagttatcatttttcattcagctaatattcgcaaagaaaaaagagatagttgcttgtgttttaatatttgtttcacatttggcagaagaaggattgatttag

SEQ ID NO: 69751 - protein, 254 aa, Arabidopsis thaliana
  peptide (1)..(254): Ceres Seq. ID no. 1824678
  misc_feature (71)..(180): Pfam Name: Single-strand binding protein family Pfam Description: Single-strand binding protein family
  misc_feature (1)..(254): Homolog of NCBI NO: 7487337 NR Description: hypothetical protein T22B4.40 - Arabidopsis >gi|4850285|emb|CAB43041.1| putative protein [Arabidopsis >gi|7267804|emb|CAB81207.1| putative protein [Arabidopsis
  misc_feature (1)..(177): Homolog of NCBI NO: 30681642 NR Description: expressed protein [Arabidopsis thaliana] unknown protein [Arabidopsis thaliana]
  misc_feature (201)..(222): Homolog of NCBI NO: 30681642 NR Description: expressed protein [Arabidopsis thaliana] unknown protein [Arabidopsis thaliana]
  misc_feature (105)..(254): Homolog of NCBI NO: 3600051 NR Description: contains similarity to the single-strand binding
  misc_feature (2)..(194): Homolog of NCBI NO: 15229675 NR Description: hypothetical protein; protein id: At3g18580.1 thaliana] >gi|9294319|dbj|BAB02216.1| contains similarity to
  misc_feature (8)..(177): Homolog of NCBI NO: 34911652 NR Description: P0510C12.16 [Oryza sativa (japonica
  misc_feature (71)..(175): Homolog of NCBI NO: 23014489 NR Description: hypothetical protein [Magnetospirillum
  misc_feature (71)..(174): Homolog of NCBI NO: 22959712 NR Description: hypothetical protein [Rhodobacter sphaeroides]
  misc_feature (71)..(164): Homolog of NCBI NO: 22964744 NR Description: hypothetical protein [Rhodopseudomonas palustris]
  misc_feature (71)..(175): Homolog of NCBI NO: 16125716 NR Description: single-strand binding protein [Caulobacter
MNSLAIRVSKVLRSSSISPLAISAERGSKSWFSTGPIDEGVEEDFEENVTERPELQPHGVDPRKGWGFRGVHRAIICGKVGQAPLQKILRNGRTVTIFTVGTGGMFDQRLVGATNQPKPAQWHRIAVHNEVLGSYAVQKLAKNSSVYVEGDIETRVYNDSISSEVKSIPEICVRRDGMYVHIVDPEHQFVAELRFSCFVLGKIRMIKYGESISKISFDELSKLSFFIQLIFAKKKEIVACVLIFVSHLAEEGLI

SEQ ID NO: 69752 - protein, 150 aa, Arabidopsis thaliana
  peptide (1)..(150): Ceres Seq. ID no. 1824679
  misc_feature (1)..(76): Pfam Name: Single-strand binding protein family Pfam Description: Single-strand binding protein family
  misc_feature (1)..(150): Homolog of NCBI NO: 7487337 NR Description: hypothetical protein T22B4.40 - Arabidopsis >gi|4850285|emb|CAB43041.1| putative protein [Arabidopsis >gi|7267804|emb|CAB81207.1| putative protein [Arabidopsis
  misc_feature (1)..(73): Homolog of NCBI NO: 30681642 NR Description: expressed protein [Arabidopsis thaliana] unknown protein [Arabidopsis thaliana]
  misc_feature (97)..(118): Homolog of NCBI NO: 30681642 NR Description: expressed protein [Arabidopsis thaliana] unknown protein [Arabidopsis thaliana]
  misc_feature (1)..(150): Homolog of NCBI NO: 3600051 NR Description: contains similarity to the single-strand binding
  misc_feature (1)..(90): Homolog of NCBI NO: 15229675 NR Description: hypothetical protein; protein id: At3g18580.1 thaliana] >gi|9294319|dbj|BAB02216.1| contains similarity to
  misc_feature (1)..(73): Homolog of NCBI NO: 34911652 NR Description: P0510C12.16 [Oryza sativa (japonica
  misc_feature (1)..(71): Homolog of NCBI NO: 23014489 NR Description: hypothetical protein [Magnetospirillum
  misc_feature (1)..(70): Homolog of NCBI NO: 22959712 NR Description: hypothetical protein [Rhodobacter sphaeroides]
  misc_feature (1)..(60): Homolog of NCBI NO: 22964744 NR Description: hypothetical protein [Rhodopseudomonas palustris]
  misc_feature (1)..(71): Homolog of NCBI NO: 16125716 NR Description: single-strand binding protein [Caulobacter
MFDQRLVGATNQPKPAQWHRIAVHNEVLGSYAVQKLAKNSSVYVEGDIETRVYNDSISSEVKSIPEICVRRDGMYVHIVDPEHQFVAELRFSCFVLGKIRMIKYGESISKISFDELSKLSFFIQLIFAKKKEIVACVLIFVSHLAEEGLI

SEQ ID NO: 69753 - DNA, 1059 bp, Arabidopsis thaliana
  misc_feature (1)..(1059): Ceres Seq. ID no. 1824911
  misc_feature: MA Experiment ID: 20000166 Result: Up-regulated in Transcription
  misc_feature: MA Experiment 20000166 PARAMETER Experiment Name: At_100uM_ABA_P Parameter: Age (day) Value: 14
  misc_feature: MA Experiment 20000166 PARAMETER Experiment Name: At_100uM_ABA_P Parameter: Organism Value: A. thaliana
  misc_feature: MA Experiment 20000166 PARAMETER Experiment Name: At_100uM_ABA_P Parameter: Plant Line Value: WS
  misc_feature: MA Experiment 20000166 PARAMETER Experiment Name: At_100uM_ABA_P Parameter: Timepoint (hr) Value: 1
  misc_feature: MA Experiment 20000166 PARAMETER Experiment Name: At_100uM_ABA_P Parameter: Tissue Value: Aerial
  misc_feature: MA Experiment 20000166 PARAMETER Experiment Name: At_100uM_ABA_P Parameter: Treatment Value: 100uM ABA vs. No Treatment
  misc_feature: MA Experiment ID: 20000173 Result: Down-regulated in Transcription
  misc_feature: MA Experiment 20000173 PARAMETER Experiment Name: At_42deg_Heat_P Parameter: Age (day) Value: 14
  misc_feature: MA Experiment 20000173 PARAMETER Experiment Name: At_42deg_Heat_P Parameter: Organism Value: A. thaliana
  misc_feature: MA Experiment 20000173 PARAMETER Experiment Name: At_42deg_Heat_P Parameter: Plant Line Value: WS
  misc_feature: MA Experiment 20000173 PARAMETER Experiment Name: At_42deg_Heat_P Parameter: Temperature (deg C) Value: 42 vs. 22
  misc_feature: MA Experiment 20000173 PARAMETER Experiment Name: At_42deg_Heat_P Parameter: Timepoint (hr) Value: 6
  misc_feature: MA Experiment 20000173 PARAMETER Experiment Name: At_42deg_Heat_P Parameter: Tissue Value: Aerial
  misc_feature: MA Experiment ID: 20000182 Result: Up-regulated in Transcription
  misc_feature: MA Experiment 20000182 PARAMETER Experiment Name: At_2mM_SA_P Parameter: Age (day) Value: 14
  misc_feature: MA Experiment 20000182 PARAMETER Experiment Name: At_2mM_SA_P Parameter: Organism Value: A. thaliana
  misc_feature: MA Experiment 20000182 PARAMETER Experiment Name: At_2mM_SA_P Parameter: Plant Line Value: WS
  misc_feature: MA Experiment 20000182 PARAMETER Experiment Name: At_2mM_SA_P Parameter: Timepoint (hr) Value: 6
  misc_feature: MA Experiment 20000182 PARAMETER Experiment Name: At_2mM_SA_P Parameter: Tissue Value: Aerial
  misc_feature: MA Experiment 20000182 PARAMETER Experiment Name: At_2mM_SA_P Parameter: Treatment Value: 2mM SA vs. No Treatment
  misc_feature: MA Experiment ID: 20000184 Result: Down-regulated in Transcription
  misc_feature: MA Experiment 20000184 PARAMETER Experiment Name: At_Shoots__P Parameter: Age (day) Value: 7
  misc_feature: MA Experiment 20000184 PARAMETER Experiment Name: At_Shoots__P Parameter: Tissue Value: Shoots vs. Whole Plant
  misc_feature: MA Experiment ID: 20000185 Result: Down-regulated in Transcription
  misc_feature: MA Experiment 20000185 PARAMETER Experiment Name: At_Roots__P Parameter: Age (day) Value: 7 vs. 21
  misc_feature: MA Experiment 20000185 PARAMETER Experiment Name: At_Roots__P Parameter: Organism Value: A. thaliana
  misc_feature: MA Experiment 20000185 PARAMETER Experiment Name: At_Roots__P Parameter: Tissue Value: Roots vs. Whole Plant
  misc_feature: MA Experiment ID: 20000234 Result: Down-regulated in Transcription
  misc_feature: MA Experiment 20000234 PARAMETER Experiment Name: At_Siliques_P Parameter: Age (day) Value: 21
  misc_feature: MA Experiment 20000234 PARAMETER Experiment Name: At_Siliques_P Parameter: Organism Value: A. thaliana
  misc_feature: MA Experiment 20000234 PARAMETER Experiment Name: At_Siliques_P Parameter: Plant Line Value: WS
  misc_feature: MA Experiment 20000234 PARAMETER Experiment Name: At_Siliques_P Parameter: Tissue Value: Less Than 5mm Siliques vs. Whole Plant
  misc_feature: MA Experiment ID: 20000235 Result: Down-regulated in Transcription
  misc_feature: MA Experiment 20000235 PARAMETER Experiment Name: At_Siliques_P Parameter: Age (day) Value: 21
  misc_feature: MA Experiment 20000235 PARAMETER Experiment Name: At_Siliques_P Parameter: Organism Value: A. thaliana
  misc_feature: MA Experiment 20000235 PARAMETER Experiment Name: At_Siliques_P Parameter: Plant Line Value: WS
  misc_feature: MA Experiment 20000235 PARAMETER Experiment Name: At_Siliques_P Parameter: Tissue Value: 5-10mm Siliques vs. Whole Plant
  misc_feature: MA Experiment ID: 20000264 Result: Down-regulated in Transcription
  misc_feature: MA Experiment 20000264 PARAMETER Experiment Name: At_Open_Flower_P Parameter: Age (day) Value: 21
  misc_feature: MA Experiment 20000264 PARAMETER Experiment Name: At_Open_Flower_P Parameter: Plant Line Value: WS
  misc_feature: MA Experiment 20000264 PARAMETER Experiment Name: At_Open_Flower_P Parameter: Tissue Value: Open Flower vs. Whole Plant
  misc_feature: MA Experiment ID: 20000265 Result: Down-regulated in Transcription
  misc_feature: MA Experiment 20000265 PARAMETER Experiment Name: At_Open_Flower_P Parameter: Age (day) Value: 21
  misc_feature: MA Experiment 20000265 PARAMETER Experiment Name: At_Open_Flower_P Parameter: Plant Line Value: WS
  misc_feature: MA Experiment 20000265 PARAMETER Experiment Name: At_Open_Flower_P Parameter: Tissue Value: Closed Flower vs. Whole Plant
  misc_feature: MA Experiment ID: 20000267 Result: Up-regulated in Transcription
  misc_feature: MA Experiment 20000267 PARAMETER Experiment Name: At_Drought_P Parameter: Age (day) Value: 7
  misc_feature: MA Experiment 20000267 PARAMETER Experiment Name: At_Drought_P Parameter: Organism Value: A. thaliana
  misc_feature: MA Experiment 20000267 PARAMETER Experiment Name: At_Drought_P Parameter: Plant Line Value: WS
  misc_feature: MA Experiment 20000267 PARAMETER Experiment Name: At_Drought_P Parameter: Timepoint (hr) Value: 6
  misc_feature: MA Experiment 20000267 PARAMETER Experiment Name: At_Drought_P Parameter: Tissue Value: Whole Plant
  misc_feature: MA Experiment 20000267 PARAMETER Experiment Name: At_Drought_P Parameter: Treatment Value: Drought vs. No Drought
  misc_feature: MA Experiment ID: 20000286 Result: Down-regulated in Transcription
  misc_feature: MA Experiment 20000286 PARAMETER Experiment Name: At_Open_Flower_P Parameter: Age (day) Value: 21
  misc_feature: MA Experiment 20000286 PARAMETER Experiment Name: At_Open_Flower_P Parameter: Plant Line Value: WS
  misc_feature: MA Experiment 20000286 PARAMETER Experiment Name: At_Open_Flower_P Parameter: Tissue Value: Half Open vs. Whole Plant
  misc_feature: MA Experiment ID: 20000436 Result: Up-regulated in Transcription
  misc_feature: MA Experiment 20000436 PARAMETER Experiment Name: At_Drought_P Parameter: Age (day) Value: 7
  misc_feature: MA Experiment 20000436 PARAMETER Experiment Name: At_Drought_P Parameter: Organism Value: A. thaliana
  misc_feature: MA Experiment 20000436 PARAMETER Experiment Name: At_Drought_P Parameter: Plant Line Value: WS
  misc_feature: MA Experiment 20000436 PARAMETER Experiment Name: At_Drought_P Parameter: Timepoint (hr) Value: 12
  misc_feature: MA Experiment 20000436 PARAMETER Experiment Name: At_Drought_P Parameter: Tissue Value: Whole Plant
  misc_feature: MA Experiment 20000436 PARAMETER Experiment Name: At_Drought_P Parameter: Treatment Value: Drought vs. No Drought
  misc_feature: MA Experiment ID: 20000437 Result: Up-regulated in Transcription
  misc_feature: MA Experiment 20000437 PARAMETER Experiment Name: At_Drought_P Parameter: Age (day) Value: 8
  misc_feature: MA Experiment 20000437 PARAMETER Experiment Name: At_Drought_P Parameter: Organism Value: A. thaliana
  misc_feature: MA Experiment 20000437 PARAMETER Experiment Name: At_Drought_P Parameter: Plant Line Value: WS
  misc_feature: MA Experiment 20000437 PARAMETER Experiment Name: At_Drought_P Parameter: Timepoint (hr) Value: 24
  misc_feature: MA Experiment 20000437 PARAMETER Experiment Name: At_Drought_P Parameter: Tissue Value: Whole Plant
  misc_feature: MA Experiment 20000437 PARAMETER Experiment Name: At_Drought_P Parameter: Treatment Value: Drought vs. No Drought
  misc_feature: MA Experiment ID: 20000438 Result: Down-regulated in Transcription
  misc_feature: MA Experiment 20000438 PARAMETER Experiment Name: At_Shoots__P Parameter: Age (day) Value: 14
  misc_feature: MA Experiment 20000438 PARAMETER Experiment Name: At_Shoots__P Parameter: Tissue Value: Shoots vs. Whole Plant
  misc_feature: MA Experiment ID: 20000439 Result: Down-regulated in Transcription
  misc_feature: MA Experiment 20000439 PARAMETER Experiment Name: At_Roots__P Parameter: Age (day) Value: 14 vs. 21
  misc_feature: MA Experiment 20000439 PARAMETER Experiment Name: At_Roots__P Parameter: Organism Value: A. thaliana
  misc_feature: MA Experiment 20000439 PARAMETER Experiment Name: At_Roots__P Parameter: Tissue Value: Roots vs. Whole Plant
  misc_feature: MA Experiment ID: 20000453 Result: Up-regulated in Transcription
  misc_feature: MA Experiment 20000453 PARAMETER Experiment Name: At_100uM_ABA_P Parameter: Age (day) Value: 15
  misc_feature: MA Experiment 20000453 PARAMETER Experiment Name: At_100uM_ABA_P Parameter: Organism Value: A. thaliana
  misc_feature: MA Experiment 20000453 PARAMETER Experiment Name: At_100uM_ABA_P Parameter: Plant Line Value: WS
  misc_feature: MA Experiment 20000453 PARAMETER Experiment Name: At_100uM_ABA_P Parameter: Timepoint (hr) Value: 24
  misc_feature: MA Experiment 20000453 PARAMETER Experiment Name: At_100uM_ABA_P Parameter: Tissue Value: Aerial
  misc_feature: MA Experiment 20000453 PARAMETER Experiment Name: At_100uM_ABA_P Parameter: Treatment Value: 100uM ABA vs. No Treatment
  misc_feature: MA Experiment ID: 20000456 Result: Up-regulated in Transcription
  misc_feature: MA Experiment 20000456 PARAMETER Experiment Name: At_100uM_BA_P Parameter: Age (day) Value: 14
  misc_feature: MA Experiment 20000456 PARAMETER Experiment Name: At_100uM_BA_P Parameter: Organism Value: A. thaliana
  misc_feature: MA Experiment 20000456 PARAMETER Experiment Name: At_100uM_BA_P Parameter: Plant Line Value: WS
  misc_feature: MA Experiment 20000456 PARAMETER Experiment Name: At_100uM_BA_P Parameter: Timepoint (hr) Value: 6
  misc_feature: MA Experiment 20000456 PARAMETER Experiment Name: At_100uM_BA_P Parameter: Tissue Value: Aerial
  misc_feature: MA Experiment 20000456 PARAMETER Experiment Name: At_100uM_BA_P Parameter: Treatment Value: 100uM BA vs. No Treatment
  misc_feature: MA Experiment ID: 20000495 Result: Down-regulated in Transcription
  misc_feature: MA Experiment 20000495 PARAMETER Experiment Name: At_Guard_Cells_P Parameter: Harvest Date Value: 8/2/2002
  misc_feature: MA Experiment 20000495 PARAMETER Experiment Name: At_Guard_Cells_P Parameter: Organism Value: A. thaliana
  misc_feature: MA Experiment 20000495 PARAMETER Experiment Name: At_Guard_Cells_P Parameter: Tissue Value: Guard Cells vs. Leaves
  misc_feature: MA Experiment ID: 20000506 Result: Up-regulated in Transcription
  misc_feature: MA Experiment 20000506 PARAMETER Experiment Name: At_Wounding_P Parameter: Organism Value: A. thaliana
  misc_feature: MA Experiment 20000506 PARAMETER Experiment Name: At_Wounding_P Parameter: Plant Line Value: WS
  misc_feature: MA Experiment 20000506 PARAMETER Experiment Name: At_Wounding_P Parameter: Timepoint (hr) Value: 6
  misc_feature: MA Experiment 20000506 PARAMETER Experiment Name: At_Wounding_P Parameter: Tissue Value: Aerial
  misc_feature: MA Experiment 20000506 PARAMETER Experiment Name: At_Wounding_P Parameter: Treatment Value: Wounding vs. No Wounding
  misc_feature: MA Experiment ID: 20000794 Result: Down-regulated in Transcription
  misc_feature: MA Experiment 20000794 PARAMETER Experiment Name: At_Petals_P Parameter: Age (day) Value: 23-25 days
  misc_feature: MA Experiment 20000794 PARAMETER Experiment Name: At_Petals_P Parameter: Plant Line Value: WS
  misc_feature: MA Experiment 20000794 PARAMETER Experiment Name: At_Petals_P Parameter: Tissue Value: Petals vs. Whole plant
  misc_feature: MA Experiment ID: 20001450 Result: Up-regulated in Transcription
  misc_feature: MA Experiment 20001450 PARAMETER Experiment Name: At_Far-red-induction_P Parameter: Age (day) Value: 7
  misc_feature: MA Experiment 20001450 PARAMETER Experiment Name: At_Far-red-induction_P Parameter: Light Value: Far-red vs. White
  misc_feature: MA Experiment 20001450 PARAMETER Experiment Name: At_Far-red-induction_P Parameter: Organism Value: A. thaliana
  misc_feature: MA Experiment 20001450 PARAMETER Experiment Name: At_Far-red-induction_P Parameter: Plant Line Value: Columbia
  misc_feature: MA Experiment 20001450 PARAMETER Experiment Name: At_Far-red-induction_P Parameter: Timepoint (hr) Value: 8
  misc_feature: MA Experiment 20001450 PARAMETER Experiment Name: At_Far-red-induction_P Parameter: Tissue Value: Whole Plant
  misc_feature: MA Experiment ID: 20001554 Result: Down-regulated in Transcription
  misc_feature: MA Experiment 20001554 PARAMETER Experiment Name: At_Drought_Soil_Dry_P Parameter: Age (day) Value: 21
  misc_feature: MA Experiment 20001554 PARAMETER Experiment Name: At_Drought_Soil_Dry_P Parameter: Organism Value: A. thaliana
  misc_feature: MA Experiment 20001554 PARAMETER Experiment Name: At_Drought_Soil_Dry_P Parameter: Plant Line Value: WS
  misc_feature: MA Experiment 20001554 PARAMETER Experiment Name: At_Drought_Soil_Dry_P Parameter: Post Timepoint (hr) Value: None
  misc_feature: MA Experiment 20001554 PARAMETER Experiment Name: At_Drought_Soil_Dry_P Parameter: Post-Treatment Value: None
  misc_feature: MA Experiment 20001554 PARAMETER Experiment Name: At_Drought_Soil_Dry_P Parameter: Timepoint (day) Value: 7
  misc_feature: MA Experiment 20001554 PARAMETER Experiment Name: At_Drought_Soil_Dry_P Parameter: Treatment Value: Drought vs. No Drought
  misc_feature: Pfam Name: Pkinase Pfam Description: Protein kinase domain
atggccgttacttcgcttctcgataccgttttccgacgtagaaagaagaagtctactgagtttataagctcagttttcgaattcgacttggacaccattaaagctgcaacaaatgatttctcagaactggttggtcgtggcggatttggttttgtttacaagggtaggcttcaaaatggacaagaaatagcagtcaagattttgtctacaagttcaattagaactgagagacagtttcataacgaacttattattttgtctaagcttaaacacaagaatctgatcaatcttcttggtttctgcactaaacgagaccaacatggtcttgtttacgagttcatgcctaactcaagcctcgattgttttatactcgacccacacagagctgctcagctaaattgggagatgtgccgaaacattattgatggcatagctcgagggctacgttaccttcatgaagaatccgggttatgggtcgttcaccgcgacattaaacctggaaacattctattggattcagatttgaaaccgaaaatagtgggatttgaattggcgaggacgatgcaacaaggtgaaaacgcagctgaaacaactgaaattgtcggtaccgtagggtatttagatccggagtacatacgaagcggacgtgtttccgtcaaatctgacgtttatgcctttggagttacaatcttgacgatcattagcagaaggaaggcttggagtgtggacggagactctctaatcaaatatgttaggagatgctggaacagaggagaagccatagatgtgatccatgaagtgatgagggaagaagaaagagaatattcgataagcgaaatcttgagatacattcacattgctttgctatgtgtggatgagaatgctgagagaaggccgaatattgataaagttctgcattggtttagttgtttctctactcctttacctgatccaacatttggtaatagatttcttgtagaggaagaaacaaattggccctggtcgccatctttatctcctggtcacagctctgtcacgtcacccatatcttcacgttaa

SEQ ID NO: 69754 - protein, 352 aa, Arabidopsis thaliana
  peptide (1)..(352): Ceres Seq. ID no. 1824912
  misc_feature: Pfam Name: Pkinase Pfam Description: Protein kinase domain
  misc_feature (1)..(352): Homolog of NCBI NO: 15234344 NR Description: protein kinase - like protein; protein id: [Arabidopsis thaliana] >gi|7488275|pir||T09348 protein kinase
  misc_feature (1)..(352): Homolog of NCBI NO: 30681932 NR Description: protein kinase family [Arabidopsis thaliana] putative protein kinase [Arabidopsis thaliana]
  misc_feature (12)..(351): Homolog of NCBI NO: 4008012 NR Description: receptor-like protein kinase [Arabidopsis
  misc_feature (12)..(351): Homolog of NCBI NO: 15236444 NR Description: protein kinase - like protein; protein id:
  misc_feature (1)..(344): Homolog of NCBI NO: 4530126 NR Description: receptor-like protein kinase homolog RK20-1
  misc_feature (12)..(351): Homolog of NCBI NO: 22655168 NR Description: protein kinase-like protein [Arabidopsis thaliana]
  misc_feature (12)..(318): Homolog of NCBI NO: 19699091 NR Description: AT4g23250/F21P8_140 [Arabidopsis thaliana]
  misc_feature (12)..(318): Homolog of NCBI NO: 22328880 NR Description: putative protein; protein id: At4g23260.1,
  misc_feature (24)..(319): Homolog of NCBI NO: 15233525 NR Description: putative receptor-like protein kinase; protein id:
  misc_feature (27)..(318): Homolog of NCBI NO: 18416074 NR Description: protein kinase - like protein; protein id:
MAVTSLLDTVFRRRKKKSTEFISSVFEFDLDTIKAATNDFSELVGRGGFGFVYKGRLQNGQEIAVKILSTSSIRTERQFHNELIILSKLKHKNLINLLGFCTKRDQHGLVYEFMPNSSLDCFILDPHRAAQLNWEMCRNIIDGIARGLRYLHEESGLWVVHRDIKPGNILLDSDLKPKIVGFELARTMQQGENAAETTEIVGTVGYLDPEYIRSGRVSVKSDVYAFGVTILTIISRRKAWSVDGDSLIKYVRRCWNRGEAIDVIHEVMREEEREYSISEILRYIHIALLCVDENAERRPNIDKVLHWFSCFSTPLPDPTFGNRFLVEEETNWPWSPSLSPGHSSVTSPISSR

SEQ ID NO: 69755 - protein, 239 aa, Arabidopsis thaliana
  peptide (1)..(239): Ceres Seq. ID no. 1824913
  misc_feature: Pfam Name: Pkinase Pfam Description: Protein kinase domain
  misc_feature (1)..(239): Homolog of NCBI NO: 15234344 NR Description: protein kinase - like protein; protein id: [Arabidopsis thaliana] >gi|7488275|pir||T09348 protein kinase
  misc_feature (1)..(239): Homolog of NCBI NO: 30681932 NR Description: protein kinase family [Arabidopsis thaliana] putative protein kinase [Arabidopsis thaliana]
  misc_feature (1)..(238): Homolog of NCBI NO: 4008012 NR Description: receptor-like protein kinase [Arabidopsis
  misc_feature (1)..(238): Homolog of NCBI NO: 15236444 NR Description: protein kinase - like protein; protein id:
  misc_feature (1)..(231): Homolog of NCBI NO: 4530126 NR Description: receptor-like protein kinase homolog RK20-1
  misc_feature (1)..(238): Homolog of NCBI NO: 22655168 NR Description: protein kinase-like protein [Arabidopsis thaliana]
  misc_feature (1)..(205): Homolog of NCBI NO: 19699091 NR Description: AT4g23250/F21P8_140 [Arabidopsis thaliana]
  misc_feature (1)..(205): Homolog of NCBI NO: 22328880 NR Description: putative protein; protein id: At4g23260.1,
  misc_feature (1)..(206): Homolog of NCBI NO: 15233525 NR Description: putative receptor-like protein kinase; protein id:
  misc_feature (1)..(205): Homolog of NCBI NO: 18416074 NR Description: protein kinase - like protein; protein id:
MPNSSLDCFILDPHRAAQLNWEMCRNIIDGIARGLRYLHEESGLWVVHRDIKPGNILLDSDLKPKIVGFELARTMQQGENAAETTEIVGTVGYLDPEYIRSGRVSVKSDVYAFGVTILTIISRRKAWSVDGDSLIKYVRRCWNRGEAIDVIHEVMREEEREYSISEILRYIHIALLCVDENAERRPNIDKVLHWFSCFSTPLPDPTFGNRFLVEEETNWPWSPSLSPGHSSVTSPISSR

SEQ ID NO: 69756 - protein, 217 aa, Arabidopsis thaliana
  peptide (1)..(217): Ceres Seq. ID no. 1824914
  misc_feature: Pfam Name: Pkinase Pfam Description: Protein kinase domain
  misc_feature (1)..(217): Homolog of NCBI NO: 15234344 NR Description: protein kinase - like protein; protein id: [Arabidopsis thaliana] >gi|7488275|pir||T09348 protein kinase
  misc_feature (1)..(217): Homolog of NCBI NO: 30681932 NR Description: protein kinase family [Arabidopsis thaliana] putative protein kinase [Arabidopsis thaliana]
  misc_feature (1)..(216): Homolog of NCBI NO: 4008012 NR Description: receptor-like protein kinase [Arabidopsis
  misc_feature (1)..(216): Homolog of NCBI NO: 15236444 NR Description: protein kinase - like protein; protein id:
  misc_feature (1)..(209): Homolog of NCBI NO: 4530126 NR Description: receptor-like protein kinase homolog RK20-1
  misc_feature (1)..(216): Homolog of NCBI NO: 22655168 NR Description: protein kinase-like protein [Arabidopsis thaliana]
  misc_feature (1)..(183): Homolog of NCBI NO: 19699091 NR Description: AT4g23250/F21P8_140 [Arabidopsis thaliana]
  misc_feature (1)..(183): Homolog of NCBI NO: 22328880 NR Description: putative protein; protein id: At4g23260.1,
  misc_feature (1)..(184): Homolog of NCBI NO: 15233525 NR Description: putative receptor-like protein kinase; protein id:
  misc_feature (1)..(183): Homolog of NCBI NO: 18416074 NR Description: protein kinase - like protein; protein id:
MCRNIIDGIARGLRYLHEESGLWVVHRDIKPGNILLDSDLKPKIVGFELARTMQQGENAAETTEIVGTVGYLDPEYIRSGRVSVKSDVYAFGVTILTIISRRKAWSVDGDSLIKYVRRCWNRGEAIDVIHEVMREEEREYSISEILRYIHIALLCVDENAERRPNIDKVLHWFSCFSTPLPDPTFGNRFLVEEETNWPWSPSLSPGHSSVTSPISSR

SEQ ID NO: 69757 - DNA, 1956 bp, Arabidopsis thaliana
  misc_feature (1)..(1956): Ceres Seq. ID no. 1825189
  misc_feature: MA Experiment ID: 20000171 Result: Down-regulated in Transcription
  misc_feature: MA Experiment 20000171 PARAMETER Experiment Name: At_42deg_Heat_P Parameter: Age (day) Value: 14
  misc_feature: MA Experiment 20000171 PARAMETER Experiment Name: At_42deg_Heat_P Parameter: Organism Value: A. thaliana
  misc_feature: MA Experiment 20000171 PARAMETER Experiment Name: At_42deg_Heat_P Parameter: Plant Line Value: WS
  misc_feature: MA Experiment 20000171 PARAMETER Experiment Name: At_42deg_Heat_P Parameter: Temperature (deg C) Value: 42 vs. 22
  misc_feature: MA Experiment 20000171 PARAMETER Experiment Name: At_42deg_Heat_P Parameter: Timepoint (hr) Value: 1
  misc_feature: MA Experiment 20000171 PARAMETER Experiment Name: At_42deg_Heat_P Parameter: Tissue Value: Aerial
  misc_feature: MA Experiment ID: 20000173 Result: Down-regulated in Transcription
  misc_feature: MA Experiment 20000173 PARAMETER Experiment Name: At_42deg_Heat_P Parameter: Age (day) Value: 14
  misc_feature: MA Experiment 20000173 PARAMETER Experiment Name: At_42deg_Heat_P Parameter: Organism Value: A. thaliana
  misc_feature: MA Experiment 20000173 PARAMETER Experiment Name: At_42deg_Heat_P Parameter: Plant Line Value: WS
  misc_feature: MA Experiment 20000173 PARAMETER Experiment Name: At_42deg_Heat_P Parameter: Temperature (deg C) Value: 42 vs. 22
  misc_feature: MA Experiment 20000173 PARAMETER Experiment Name: At_42deg_Heat_P Parameter: Timepoint (hr) Value: 6
  misc_feature: MA Experiment 20000173 PARAMETER Experiment Name: At_42deg_Heat_P Parameter: Tissue Value: Aerial
  misc_feature: MA Experiment ID: 20000182 Result: Up-regulated in Transcription
  misc_feature: MA Experiment 20000182 PARAMETER Experiment Name: At_2mM_SA_P Parameter: Age (day) Value: 14
  misc_feature: MA Experiment 20000182 PARAMETER Experiment Name: At_2mM_SA_P Parameter: Organism Value: A. thaliana
  misc_feature: MA Experiment 20000182 PARAMETER Experiment Name: At_2mM_SA_P Parameter: Plant Line Value: WS
  misc_feature: MA Experiment 20000182 PARAMETER Experiment Name: At_2mM_SA_P Parameter: Timepoint (hr) Value: 6
  misc_feature: MA Experiment 20000182 PARAMETER Experiment Name: At_2mM_SA_P Parameter: Tissue Value: Aerial
  misc_feature: MA Experiment 20000182 PARAMETER Experiment Name: At_2mM_SA_P Parameter: Treatment Value: 2mM SA vs. No Treatment
  misc_feature: MA Experiment ID: 20000184 Result: Down-regulated in Transcription
  misc_feature: MA Experiment 20000184 PARAMETER Experiment Name: At_Shoots__P Parameter: Age (day) Value: 7
  misc_feature: MA Experiment 20000184 PARAMETER Experiment Name: At_Shoots__P Parameter: Tissue Value: Shoots vs. Whole Plant
  misc_feature: MA Experiment ID: 20000234 Result: Down-regulated in Transcription
  misc_feature: MA Experiment 20000234 PARAMETER Experiment Name: At_Siliques_P Parameter: Age (day) Value: 21
  misc_feature: MA Experiment 20000234 PARAMETER Experiment Name: At_Siliques_P Parameter: Organism Value: A. thaliana
  misc_feature: MA Experiment 20000234 PARAMETER Experiment Name: At_Siliques_P Parameter: Plant Line Value: WS
  misc_feature: MA Experiment 20000234 PARAMETER Experiment Name: At_Siliques_P Parameter: Tissue Value: Less Than 5mm Siliques vs. Whole Plant
  misc_feature: MA Experiment ID: 20000235 Result: Down-regulated in Transcription
  misc_feature: MA Experiment 20000235 PARAMETER Experiment Name: At_Siliques_P Parameter: Age (day) Value: 21
  misc_feature: MA Experiment 20000235 PARAMETER Experiment Name: At_Siliques_P Parameter: Organism Value: A. thaliana
  misc_feature: MA Experiment 20000235 PARAMETER Experiment Name: At_Siliques_P Parameter: Plant Line Value: WS
  misc_feature: MA Experiment 20000235 PARAMETER Experiment Name: At_Siliques_P Parameter: Tissue Value: 5-10mm Siliques vs. Whole Plant
  misc_feature: MA Experiment ID: 20000265 Result: Down-regulated in Transcription
  misc_feature: MA Experiment 20000265 PARAMETER Experiment Name: At_Open_Flower_P Parameter: Age (day) Value: 21
  misc_feature: MA Experiment 20000265 PARAMETER Experiment Name: At_Open_Flower_P Parameter: Plant Line Value: WS
  misc_feature: MA Experiment 20000265 PARAMETER Experiment Name: At_Open_Flower_P Parameter: Tissue Value: Closed Flower vs. Whole Plant
  misc_feature: MA Experiment ID: 20000437 Result: Up-regulated in Transcription
  misc_feature: MA Experiment 20000437 PARAMETER Experiment Name: At_Drought_P Parameter: Age (day) Value: 8
  misc_feature: MA Experiment 20000437 PARAMETER Experiment Name: At_Drought_P Parameter: Organism Value: A. thaliana
  misc_feature: MA Experiment 20000437 PARAMETER Experiment Name: At_Drought_P Parameter: Plant Line Value: WS
  misc_feature: MA Experiment 20000437 PARAMETER Experiment Name: At_Drought_P Parameter: Timepoint (hr) Value: 24
  misc_feature: MA Experiment 20000437 PARAMETER Experiment Name: At_Drought_P Parameter: Tissue Value: Whole Plant
  misc_feature: MA Experiment 20000437 PARAMETER Experiment Name: At_Drought_P Parameter: Treatment Value: Drought vs. No Drought
  misc_feature: MA Experiment ID: 20000438 Result: Down-regulated in Transcription
  misc_feature: MA Experiment 20000438 PARAMETER Experiment Name: At_Shoots__P Parameter: Age (day) Value: 14
  misc_feature: MA Experiment 20000438 PARAMETER Experiment Name: At_Shoots__P Parameter: Tissue Value: Shoots vs. Whole Plant
  misc_feature: MA Experiment ID: 20000794 Result: Up-regulated in Transcription
  misc_feature: MA Experiment 20000794 PARAMETER Experiment Name: At_Petals_P Parameter: Age (day) Value: 23-25 days
  misc_feature: MA Experiment 20000794 PARAMETER Experiment Name: At_Petals_P Parameter: Plant Line Value: WS
  misc_feature: MA Experiment 20000794 PARAMETER Experiment Name: At_Petals_P Parameter: Tissue Value: Petals vs. Whole plant
  misc_feature: MA Experiment ID: 20001247 Result: Up-regulated in Transcription
  misc_feature: MA Experiment 20001247 PARAMETER Experiment Name: At_Far-red-induction_P Parameter: Age (day) Value: 7
  misc_feature: MA Experiment 20001247 PARAMETER Experiment Name: At_Far-red-induction_P Parameter: Light Value: Far-red vs. White
  misc_feature: MA Experiment 20001247 PARAMETER Experiment Name: At_Far-red-induction_P Parameter: Organism Value: A. thaliana
  misc_feature: MA Experiment 20001247 PARAMETER Experiment Name: At_Far-red-induction_P Parameter: Plant Line Value: Columbia
  misc_feature: MA Experiment 20001247 PARAMETER Experiment Name: At_Far-red-induction_P Parameter: Timepoint (hr) Value: 1
  misc_feature: MA Experiment 20001247 PARAMETER Experiment Name: At_Far-red-induction_P Parameter: Tissue Value: Whole Plant
  misc_feature: MA Experiment ID: 20001905 Result: Up-regulated in Transcription
  misc_feature: MA Experiment 20001905 PARAMETER Experiment Name: At_Drought_Reproduction_P Parameter: Age (day) Value: 40
  misc_feature: MA Experiment 20001905 PARAMETER Experiment Name: At_Drought_Reproduction_P Parameter: Organism Value: A. thaliana
  misc_feature: MA Experiment 20001905 PARAMETER Experiment Name: At_Drought_Reproduction_P Parameter: Plant Line Value: WS
  misc_feature: MA Experiment 20001905 PARAMETER Experiment Name: At_Drought_Reproduction_P Parameter: Timepoint (day) Value: 10
  misc_feature: MA Experiment 20001905 PARAMETER Experiment Name: At_Drought_Reproduction_P Parameter: Tissue Value: Rosettes
  misc_feature: MA Experiment 20001905 PARAMETER Experiment Name: At_Drought_Reproduction_P Parameter: Treatment Value: Drought vs. No Drought
  misc_feature: Pfam Name: Pkinase Pfam Description: Protein kinase domain
atgccgtcacgatcaatctcggcaccggttccggttcttgctccggctccgatcgtttcctctttagtcccagcagcgccgtcaggacatcagaataagacaacgcgaatctttccaccgttcgtggtggctggagccggcgccggtttctctcttttcatcactctctccgtctgtttctgtaaattcagccggaaacgttcatcacctccggcggaaaacgcttcctcttcgcctcggagaccgtcgccacgtgagttttcatattcgtctctccgtcgcgccaccggttctttctcgcaggcgaatagactaggtcagggcggatttggcgtcgtgtttcgtggaactatctccggcggcgagaatgtagctgttaaagtaatggattcaggatctcttcaaggagaaggtgagtttcagaacgagttgttcttcgccgccaagcttgactcgcctcacgttgtccctgttattggtttctctcatgatcgaaaacgacgacgtttgcttcttgtttacaagcttatggacaatggtaatctccaagacgccttgcttcaccggagatgccctgagcttatggattggaatcggaggtttttggttgccgttaacattgccgatgggattaagcatcttcatagtcttgaaccacctgtgattcatggtgatattaagcctagcaatgttctattagatagtctcttctctgccaaaatcgctgattttggtttggctaggttgaaagcagagcaagtggagattagtgtagctccggagcgtgatggtgatggatctatggttgaagaagtagagagtgtggtaactactgtgactggttatgaagattttaactttgggttggttgatcagtctccggagagtgttgctaaggttcctgggtctgtgagtgcttctcctgaggcgacgacggttgtctctgtttctccggaaatgggagagaaaacggatgaggatggtggtagtgttgtggtgatgaagaaggggaaagagagtgagagcaaagattggtggtggaagcaggagagcaatgttgaaagagggagagtgaaagagtatgtaatgcaatggattggttcagaggtaaagaaggagagaccaagcagaagtgattggattgaggcggcagctttgtcttcttcgtcaagtaagaaacttgagaagaagactagcaagagactagattggtggttgtcattggaggaagaggatgagaataagaagaagaagaagcggaggatggttagagagtggtggaaagatgagtatcgtagagaactcgctaagaaaaggaagaagaagaagaagatgactttagaagccgagttttgtagtgatgatgggagtagtagtgtgagtcaatggcggcgtggtagtggtagtggtagcagcatagattggtggttagatgggttaagtggtgaacgatggttgagagcaaggggaaatagccatgactcggtgagcggtgagatagctaagagctgcggaattagtagcacgccgagcatgagagggactgtgtgctatgcagctcctgagtactgtaacttggacaacaacgtgtcagagaaatgtgatgtctatagctacggtgttctgttgttagttctgatttccgggaggcgcccgttggagatgacgggctccgcgagtgagatacaacgggcaaacctcatgtcttgggcgaggaagttggcgagaagaggaaaacttgttgatcttgtggatcaaaagttgcaaaacttagaccaagaacaagcagtgttgtgcataaaggtggctttgttgtgtctgcaaagattaccgatttcacgaccgtcaatgaaagaggtcttgggaatgcttaaaggagaagtgaatctaccagagttgcctagtgagttctcaccatcgccaccattaaagacaacgaggaagcagcgccgttga

SEQ ID NO: 69758 - protein, 651 aa, Arabidopsis thaliana
  peptide (1)..(651): Ceres Seq. ID no. 1825190
  misc_feature: Pfam Name: Pkinase Pfam Description: Protein kinase domain
  misc_feature (1)..(468): Homolog of NCBI NO: 30686865 NR Description: protein kinase family [Arabidopsis thaliana]
  misc_feature (618)..(651): Homolog of NCBI NO: 30686865 NR Description: protein kinase family [Arabidopsis thaliana]
  misc_feature (1)..(651): Homolog of NCBI NO: 15242183 NR Description: putative protein; protein id: At5g51770.1 thaliana] >gi|10177876|dbj|BAB11246.1| contains similarity to
  misc_feature (168)..(642): Homolog of NCBI NO: 37531832 NR Description: putative protein kinase [Oryza sativa (japonica group)] >gi|22725985|gb|AAN04985.1| putative protein kinase
  misc_feature (1)..(150): Homolog of NCBI NO: 37531832 NR Description: putative protein kinase [Oryza sativa (japonica group)] >gi|22725985|gb|AAN04985.1| putative protein kinase
  misc_feature (256)..(651): Homolog of NCBI NO: 15225518 NR Description: putative protein kinase; protein id: At2g45590.1 thaliana] >gi|7485626|pir||T00872 probable protein kinase
  misc_feature (24)..(444): Homolog of NCBI NO: 15220862 NR Description: protein kinase, putative; protein id: At1g80870.1
  misc_feature (382)..(651): Homolog of NCBI NO: 15220862 NR Description: protein kinase, putative; protein id: At1g80870.1
  misc_feature (1)..(505): Homolog of NCBI NO: 15225518 NR Description: putative protein kinase; protein id: At2g45590.1 thaliana] >gi|7485626|pir||T00872 probable protein kinase
  misc_feature (85)..(290): Homolog of NCBI NO: 5923666 NR Description: putative receptor ser/thr protein kinase
MPSRSISAPVPVLAPAPIVSSLVPAAPSGHQNKTTRIFPPFVVAGAGAGFSLFITLSVCFCKFSRKRSSPPAENASSSPRRPSPREFSYSSLRRATGSFSQANRLGQGGFGVVFRGTISGGENVAVKVMDSGSLQGEGEFQNELFFAAKLDSPHVVPVIGFSHDRKRRRLLLVYKLMDNGNLQDALLHRRCPELMDWNRRFLVAVNIADGIKHLHSLEPPVIHGDIKPSNVLLDSLFSAKIADFGLARLKAEQVEISVAPERDGDGSMVEEVESVVTTVTGYEDFNFGLVDQSPESVAKVPGSVSASPEATTVVSVSPEMGEKTDEDGGSVVVMKKGKESESKDWWWKQESNVERGRVKEYVMQWIGSEVKKERPSRSDWIEAAALSSSSSKKLEKKTSKRLDWWLSLEEEDENKKKKKRRMVREWWKDEYRRELAKKRKKKKKMTLEAEFCSDDGSSSVSQWRRGSGSGSSIDWWLDGLSGERWLRARGNSHDSVSGEIAKSCGISSTPSMRGTVCYAAPEYCNLDNNVSEKCDVYSYGVLLLVLISGRRPLEMTGSASEIQRANLMSWARKLARRGKLVDLVDQKLQNLDQEQAVLCIKVALLCLQRLPISRPSMKEVLGMLKGEVNLPELPSEFSPSPPLKTTRKQRR

SEQ ID NO: 69759 - protein, 523 aa, Arabidopsis thaliana
  peptide (1)..(523): Ceres Seq. ID no. 1825191
  misc_feature: Pfam Name: Pkinase Pfam Description: Protein kinase domain
  misc_feature (1)..(523): Homolog of NCBI NO: 15242183 NR Description: putative protein; protein id: At5g51770.1 thaliana] >gi|10177876|dbj|BAB11246.1| contains similarity to
  misc_feature (40)..(514): Homolog of NCBI NO: 37531832 NR Description: putative protein kinase [Oryza sativa (japonica group)] >gi|22725985|gb|AAN04985.1| putative protein kinase
  misc_feature (1)..(22): Homolog of NCBI NO: 37531832 NR Description: putative protein kinase [Oryza sativa (japonica group)] >gi|22725985|gb|AAN04985.1| putative protein kinase
  misc_feature (128)..(523): Homolog of NCBI NO: 15225518 NR Description: putative protein kinase; protein id: At2g45590.1 thaliana] >gi|7485626|pir||T00872 probable protein kinase
  misc_feature (1)..(316): Homolog of NCBI NO: 15220862 NR Description: protein kinase, putative; protein id: At1g80870.1
  misc_feature (254)..(523): Homolog of NCBI NO: 15220862 NR Description: protein kinase, putative; protein id: At1g80870.1
  misc_feature (1)..(377): Homolog of NCBI NO: 15225518 NR Description: putative protein kinase; protein id: At2g45590.1 thaliana] >gi|7485626|pir||T00872 probable protein kinase
  misc_feature (1)..(162): Homolog of NCBI NO: 5923666 NR Description: putative receptor ser/thr protein kinase
  misc_feature (1)..(340): Homolog of NCBI NO: 30686865 NR Description: protein kinase family [Arabidopsis thaliana]
  misc_feature (490)..(523): Homolog of NCBI NO: 30686865 NR Description: protein kinase family [Arabidopsis thaliana]
MDSGSLQGEGEFQNELFFAAKLDSPHVVPVIGFSHDRKRRRLLLVYKLMDNGNLQDALLHRRCPELMDWNRRFLVAVNIADGIKHLHSLEPPVIHGDIKPSNVLLDSLFSAKIADFGLARLKAEQVEISVAPERDGDGSMVEEVESVVTTVTGYEDFNFGLVDQSPESVAKVPGSVSASPEATTVVSVSPEMGEKTDEDGGSVVVMKKGKESESKDWWWKQESNVERGRVKEYVMQWIGSEVKKERPSRSDWIEAAALSSSSSKKLEKKTSKRLDWWLSLEEEDENKKKKKRRMVREWWKDEYRRELAKKRKKKKKMTLEAEFCSDDGSSSVSQWRRGSGSGSSIDWWLDGLSGERWLRARGNSHDSVSGEIAKSCGISSTPSMRGTVCYAAPEYCNLDNNVSEKCDVYSYGVLLLVLISGRRPLEMTGSASEIQRANLMSWARKLARRGKLVDLVDQKLQNLDQEQAVLCIKVALLCLQRLPISRPSMKEVLGMLKGEVNLPELPSEFSPSPPLKTTRKQRR

SEQ ID NO: 69760 - protein, 475 aa, Arabidopsis thaliana
  peptide (1)..(475): Ceres Seq. ID no. 1825192
  misc_feature: Pfam Name: Pkinase Pfam Description: Protein kinase domain
  misc_feature (1)..(292): Homolog of NCBI NO: 30686865 NR Description: protein kinase family [Arabidopsis thaliana]
  misc_feature (442)..(475): Homolog of NCBI NO: 30686865 NR Description: protein kinase family [Arabidopsis thaliana]
  misc_feature (1)..(475): Homolog of NCBI NO: 15242183 NR Description: putative protein; protein id: At5g51770.1 thaliana] >gi|10177876|dbj|BAB11246.1| contains similarity to
  misc_feature (1)..(466): Homolog of NCBI NO: 37531832 NR Description: putative protein kinase [Oryza sativa (japonica group)] >gi|22725985|gb|AAN04985.1| putative protein kinase
  misc_feature (80)..(475): Homolog of NCBI NO: 15225518 NR Description: putative protein kinase; protein id: At2g45590.1 thaliana] >gi|7485626|pir||T00872 probable protein kinase
  misc_feature (1)..(268): Homolog of NCBI NO: 15220862 NR Description: protein kinase, putative; protein id: At1g80870.1
  misc_feature (206)..(475): Homolog of NCBI NO: 15220862 NR Description: protein kinase, putative; protein id: At1g80870.1
  misc_feature (1)..(329): Homolog of NCBI NO: 15225518 NR Description: putative protein kinase; protein id: At2g45590.1 thaliana] >gi|7485626|pir||T00872 probable protein kinase
  misc_feature (1)..(114): Homolog of NCBI NO: 5923666 NR Description: putative receptor ser/thr protein kinase
  misc_feature (1)..(114): Homolog of NCBI NO: 18398327 NR Description: putative receptor ser/thr protein kinase; protein At3g09010.1, supported by cDNA: 124301. [Arabidopsis thaliana]
MDNGNLQDALLHRRCPELMDWNRRFLVAVNIADGIKHLHSLEPPVIHGDIKPSNVLLDSLFSAKIADFGLARLKAEQVEISVAPERDGDGSMVEEVESVVTTVTGYEDFNFGLVDQSPESVAKVPGSVSASPEATTVVSVSPEMGEKTDEDGGSVVVMKKGKESESKDWWWKQESNVERGRVKEYVMQWIGSEVKKERPSRSDWIEAAALSSSSSKKLEKKTSKRLDWWLSLEEEDENKKKKKRRMVREWWKDEYRRELAKKRKKKKKMTLEAEFCSDDGSSSVSQWRRGSGSGSSIDWWLDGLSGERWLRARGNSHDSVSGEIAKSCGISSTPSMRGTVCYAAPEYCNLDNNVSEKCDVYSYGVLLLVLISGRRPLEMTGSASEIQRANLMSWARKLARRGKLVDLVDQKLQNLDQEQAVLCIKVALLCLQRLPISRPSMKEVLGMLKGEVNLPELPSEFSPSPPLKTTRKQRR

SEQ ID NO: 69761 - DNA, 2184 bp, Arabidopsis thaliana
  misc_feature (1)..(2184): Ceres Seq. ID no. 1825212
  misc_feature: MA Experiment ID: 20000234 Result: Up-regulated in Transcription
  misc_feature: MA Experiment 20000234 PARAMETER Experiment Name: At_Siliques_P Parameter: Age (day) Value: 21
  misc_feature: MA Experiment 20000234 PARAMETER Experiment Name: At_Siliques_P Parameter: Organism Value: A. thaliana
  misc_feature: MA Experiment 20000234 PARAMETER Experiment Name: At_Siliques_P Parameter: Plant Line Value: WS
  misc_feature: MA Experiment 20000234 PARAMETER Experiment Name: At_Siliques_P Parameter: Tissue Value: Less Than 5mm Siliques vs. Whole Plant
  misc_feature: MA Experiment ID: 20000235 Result: Up-regulated in Transcription
  misc_feature: MA Experiment 20000235 PARAMETER Experiment Name: At_Siliques_P Parameter: Age (day) Value: 21
  misc_feature: MA Experiment 20000235 PARAMETER Experiment Name: At_Siliques_P Parameter: Organism Value: A. thaliana
  misc_feature: MA Experiment 20000235 PARAMETER Experiment Name: At_Siliques_P Parameter: Plant Line Value: WS
  misc_feature: MA Experiment 20000235 PARAMETER Experiment Name: At_Siliques_P Parameter: Tissue Value: 5-10mm Siliques vs. Whole Plant
  misc_feature: MA Experiment ID: 20000264 Result: Up-regulated in Transcription
  misc_feature: MA Experiment 20000264 PARAMETER Experiment Name: At_Open_Flower_P Parameter: Age (day) Value: 21
  misc_feature: MA Experiment 20000264 PARAMETER Experiment Name: At_Open_Flower_P Parameter: Plant Line Value: WS
  misc_feature: MA Experiment 20000264 PARAMETER Experiment Name: At_Open_Flower_P Parameter: Tissue Value: Open Flower vs. Whole Plant
  misc_feature: MA Experiment ID: 20000286 Result: Up-regulated in Transcription
  misc_feature: MA Experiment 20000286 PARAMETER Experiment Name: At_Open_Flower_P Parameter: Age (day) Value: 21
  misc_feature: MA Experiment 20000286 PARAMETER Experiment Name: At_Open_Flower_P Parameter: Plant Line Value: WS
  misc_feature: MA Experiment 20000286 PARAMETER Experiment Name: At_Open_Flower_P Parameter: Tissue Value: Half Open vs. Whole Plant
  misc_feature: MA Experiment ID: 20000438 Result: Up-regulated in Transcription
  misc_feature: MA Experiment 20000438 PARAMETER Experiment Name: At_Shoots__P Parameter: Age (day) Value: 14
  misc_feature: MA Experiment 20000438 PARAMETER Experiment Name: At_Shoots__P Parameter: Tissue Value: Shoots vs. Whole Plant
  misc_feature: MA Experiment ID: 20000527 Result: Down-regulated in Transcription
  misc_feature: MA Experiment 20000527 PARAMETER Experiment Name: At_10percent_PEG_P Parameter: Age (day) Value: 20
  misc_feature: MA Experiment 20000527 PARAMETER Experiment Name: At_10percent_PEG_P Parameter: Organism Value: A. thaliana
  misc_feature: MA Experiment 20000527 PARAMETER Experiment Name: At_10percent_PEG_P Parameter: Plant Line Value: WS
  misc_feature: MA Experiment 20000527 PARAMETER Experiment Name: At_10percent_PEG_P Parameter: Timepoint (day) Value: 20
  misc_feature: MA Experiment 20000527 PARAMETER Experiment Name: At_10percent_PEG_P Parameter: Tissue Value: Whole Plant
  misc_feature: MA Experiment 20000527 PARAMETER Experiment Name: At_10percent_PEG_P Parameter: Treatment Value: 10percent PEG vs. No Treatment
  misc_feature: MA Experiment ID: 20000794 Result: Up-regulated in Transcription
  misc_feature: MA Experiment 20000794 PARAMETER Experiment Name: At_Petals_P Parameter: Age (day) Value: 23-25 days
  misc_feature: MA Experiment 20000794 PARAMETER Experiment Name: At_Petals_P Parameter: Plant Line Value: WS
  misc_feature: MA Experiment 20000794 PARAMETER Experiment Name: At_Petals_P Parameter: Tissue Value: Petals vs. Whole plant
  misc_feature: MA Experiment ID: 20001248 Result: Down-regulated in Transcription
  misc_feature: MA Experiment 20001248 PARAMETER Experiment Name: At_Far-red-induction_P Parameter: Age (day) Value: 7
  misc_feature: MA Experiment 20001248 PARAMETER Experiment Name: At_Far-red-induction_P Parameter: Light Value: Far-red vs. White
  misc_feature: MA Experiment 20001248 PARAMETER Experiment Name: At_Far-red-induction_P Parameter: Organism Value: A. thaliana
  misc_feature: MA Experiment 20001248 PARAMETER Experiment Name: At_Far-red-induction_P Parameter: Plant Line Value: Columbia
  misc_feature: MA Experiment 20001248 PARAMETER Experiment Name: At_Far-red-induction_P Parameter: Timepoint (hr) Value: 4
  misc_feature: MA Experiment 20001248 PARAMETER Experiment Name: At_Far-red-induction_P Parameter: Tissue Value: Whole Plant
  misc_feature: MA Experiment ID: 20001554 Result: Up-regulated in Transcription
  misc_feature: MA Experiment 20001554 PARAMETER Experiment Name: At_Drought_Soil_Dry_P Parameter: Age (day) Value: 21
  misc_feature: MA Experiment 20001554 PARAMETER Experiment Name: At_Drought_Soil_Dry_P Parameter: Organism Value: A. thaliana
  misc_feature: MA Experiment 20001554 PARAMETER Experiment Name: At_Drought_Soil_Dry_P Parameter: Plant Line Value: WS
  misc_feature: MA Experiment 20001554 PARAMETER Experiment Name: At_Drought_Soil_Dry_P Parameter: Post Timepoint (hr) Value: None
  misc_feature: MA Experiment 20001554 PARAMETER Experiment Name: At_Drought_Soil_Dry_P Parameter: Post-Treatment Value: None
  misc_feature: MA Experiment 20001554 PARAMETER Experiment Name: At_Drought_Soil_Dry_P Parameter: Timepoint (day) Value: 7
  misc_feature: MA Experiment 20001554 PARAMETER Experiment Name: At_Drought_Soil_Dry_P Parameter: Treatment Value: Drought vs. No Drought
  misc_feature: MA Experiment ID: 20001556 Result: Up-regulated in Transcription
  misc_feature: MA Experiment 20001556 PARAMETER Experiment Name: At_Drought_Soil_Dry_P Parameter: Age (day) Value: 26
  misc_feature: MA Experiment 20001556 PARAMETER Experiment Name: At_Drought_Soil_Dry_P Parameter: Organism Value: A. thaliana
  misc_feature: MA Experiment 20001556 PARAMETER Experiment Name: At_Drought_Soil_Dry_P Parameter: Plant Line Value: WS
  misc_feature: MA Experiment 20001556 PARAMETER Experiment Name: At_Drought_Soil_Dry_P Parameter: Post Timepoint (hr) Value: None
  misc_feature: MA Experiment 20001556 PARAMETER Experiment Name: At_Drought_Soil_Dry_P Parameter: Post-Treatment Value: None
  misc_feature: MA Experiment 20001556 PARAMETER Experiment Name: At_Drought_Soil_Dry_P Parameter: Timepoint (day) Value: 12
  misc_feature: MA Experiment 20001556 PARAMETER Experiment Name: At_Drought_Soil_Dry_P Parameter: Treatment Value: Drought vs. No Drought
  misc_feature: MA Experiment ID: 20001558 Result: Down-regulated in Transcription
  misc_feature: MA Experiment 20001558 PARAMETER Experiment Name: At_Drought_Soil_Dry_P Parameter: Age (day) Value: 27
  misc_feature: MA Experiment 20001558 PARAMETER Experiment Name: At_Drought_Soil_Dry_P Parameter: Organism Value: A. thaliana
  misc_feature: MA Experiment 20001558 PARAMETER Experiment Name: At_Drought_Soil_Dry_P Parameter: Plant Line Value: WS
  misc_feature: MA Experiment 20001558 PARAMETER Experiment Name: At_Drought_Soil_Dry_P Parameter: Post Timepoint (hr) Value: 6
  misc_feature: MA Experiment 20001558 PARAMETER Experiment Name: At_Drought_Soil_Dry_P Parameter: Post-Treatment Value: Re-Water vs. No Drought
  misc_feature: MA Experiment 20001558 PARAMETER Experiment Name: At_Drought_Soil_Dry_P Parameter: Timepoint (day) Value: 13
  misc_feature: MA Experiment 20001558 PARAMETER Experiment Name: At_Drought_Soil_Dry_P Parameter: Treatment Value: Drought vs. No Drought
  misc_feature: MA Experiment ID: 20001906 Result: Down-regulated in Transcription
  misc_feature: MA Experiment 20001906 PARAMETER Experiment Name: At_Drought_Reproduction_P Parameter: Age (day) Value: 35
  misc_feature: MA Experiment 20001906 PARAMETER Experiment Name: At_Drought_Reproduction_P Parameter: Organism Value: A. thaliana
  misc_feature: MA Experiment 20001906 PARAMETER Experiment Name: At_Drought_Reproduction_P Parameter: Plant Line Value: WS
  misc_feature: MA Experiment 20001906 PARAMETER Experiment Name: At_Drought_Reproduction_P Parameter: Timepoint (day) Value: 5
  misc_feature: MA Experiment 20001906 PARAMETER Experiment Name: At_Drought_Reproduction_P Parameter: Tissue Value: Siliques
  misc_feature: MA Experiment 20001906 PARAMETER Experiment Name: At_Drought_Reproduction_P Parameter: Treatment Value: Drought vs. No Drought
  misc_feature: MA Experiment ID: 20001911 Result: Down-regulated in Transcription
  misc_feature: MA Experiment 20001911 PARAMETER Experiment Name: At_Drought_Reproduction_P Parameter: Age (day) Value: 40
  misc_feature: MA Experiment 20001911 PARAMETER Experiment Name: At_Drought_Reproduction_P Parameter: Organism Value: A. thaliana
  misc_feature: MA Experiment 20001911 PARAMETER Experiment Name: At_Drought_Reproduction_P Parameter: Plant Line Value: WS
  misc_feature: MA Experiment 20001911 PARAMETER Experiment Name: At_Drought_Reproduction_P Parameter: Timepoint (day) Value: 10
  misc_feature: MA Experiment 20001911 PARAMETER Experiment Name: At_Drought_Reproduction_P Parameter: Tissue Value: Flowers
  misc_feature: MA Experiment 20001911 PARAMETER Experiment Name: At_Drought_Reproduction_P Parameter: Treatment Value: Drought vs. No Drought
  misc_feature: Pfam Name: Cellulose_synt Pfam Description: Cellulose synthase
atggagactcatagaaagaactcggtcgtcggcaacatcctccacacgtgtcatccttgccggcgcaccattccatatagaatctacgccatatttcacacgtgtggcatcatagctctcatgtatcaccatgtacactcacttgtcacagcaaacaacactcttataacatgtcttcttctcctctccgatattgttctcgccttcatgtgggcaaccacaacttccctccgcttaaacccggttcatcggaccgagtgcccggagaaatatgcagctaaaccggaggactttccaaagctggacgtgtttatatgcacggctgatccgtacaaggagcctccaatgatggttgttaacaccgctttatcggtgatggcttacgagtatccgtcagataagatctcggtgtatgtatcggacgatggaggatcgtcgttgactttctttgctcttattgaagctgctaagttctctaagcagtggttgcccttttgcaagaagaataatgttcaagatcggtctcctgaagtttatttctcttcagagtcacattctcgaagtgatgaagctgaaaaccttaagacaaacatattaaaatgtgaggtggaacagatgatgtacgaagacatgaagagtagagtagaacatgtggtggagagtggaaaagttgaaactgcgtttatcacatgcgaccaatttcgtggggtattcgatttgtggaccgacaaattcagtcgtcatgaccatcccacaattattcagctacgagtatcaggggtgatgacaaattcaccgatcattctaacactagactgtgatatgtattcgaacgacccggcaacactggttcgtgctttgtgctatttaacagatcctgaaatcaaatccggtttaggatatgtgcagtttcctcagaaatttctaggaataagcaaaaatgatatatatgcttgtgaaaacaaacgcctcttcattattaatatggttgggtttgatggtctaatgggtccaactcatgtgggaactggttgtttctttaatcgacgagctttctatggacctccatatatgttgattttaccggagataaatgaactaaagccttatcggattgcggataagtctatcaaagcccaagatgttttgtcattagcacacaatgtagcaggatgtatctatgagtacaataccaattggggatccaagattggattcagatatgggtcattagtagaagactactacacagggtttatgctccattgtgaaggatggagatcagtattttgcaacccaaaaaaagctgcattttatggagattccccaaagtgcctagttgatcttgtgggtcaacaaatccgttgggcagttgggcttttcgaaatgtccttttcaaagtatagcccaattacctatggaatcaagtcactggaccttttaatgggtttaggttattgcaactctccgtttaagccattttggtcaattcctctgaccgtctatggacttttaccacagcttgcactcatttctggagttagtgtcttccccaaggcatctgatccgtggttttggctttacatcattttattctttggggcttatgcccaagatctatcagactttttattggaaggaggaacttatcggaaatggtggaacgatcaaagaatgttgatgataaaaggactctcttcattcttctttggttttatagagttcattctcaaaaccctaaacctctccacacctaagttcaacgtcaccagtaaagccaatgatgatgacgaacagaggaagcggtacgagcaagaaatctttgatttcggaacctcttcgtccatgttcttgcccttgaccacggttgccatagtgaatctgcttgcttttgtctgggggctttatggtattctcttctgcggaggagaactctaccttgagctgatgctggtgagcttcgcggtggtgaattgcttaccgatctacggggctatggtgttgaggaaagatgatggaaaattatcaaaaagaacttgtttcttagctgggaacctccacgttggttcttattgtgtcaagttacttcgtcctcaagtaacttcaccccttaggttaattcacaacaataatacgtctggctggttcaagcggaagaaacacaatatgaatgaatctgtgtaa

SEQ ID NO: 69762 - protein, 727 aa, Arabidopsis thaliana
  peptide (1)..(727): Ceres Seq. ID no. 1825213
  misc_feature: Pfam Name: Cellulose_synt Pfam Description: Cellulose synthase
  misc_feature (256)..(686): Homolog of NCBI NO: 2262115 NR Description: cellulose synthase isolog [Arabidopsis thaliana]
  misc_feature (1)..(256): Homolog of NCBI NO: 2262115 NR Description: cellulose synthase isolog [Arabidopsis thaliana]
  misc_feature (1)..(686): Homolog of NCBI NO: 7487588 NR Description: hypothetical protein T32A16.170 - Arabidopsis >gi|4972104|emb|CAB43900.1| putative protein [Arabidopsis >gi|7269249|emb|CAB81318.1| putative protein [Arabidopsis
  misc_feature (1)..(686): Homolog of NCBI NO: 15233649 NR Description: cellulose synthase catalytic subunit - like protein id: At4g23990.1 [Arabidopsis thaliana]
  misc_feature (256)..(686): Homolog of NCBI NO: 30686386 NR Description: cellulose synthase - related [Arabidopsis >gi|17979143|gb|AAL49829.1| unknown protein [Arabidopsis >gi|20465365|gb|AAM20086.1| unknown protein [Arabidopsis
  misc_feature (1)..(256): Homolog of NCBI NO: 30686386 NR Description: cellulose synthase - related [Arabidopsis >gi|17979143|gb|AAL49829.1| unknown protein [Arabidopsis >gi|20465365|gb|AAM20086.1| unknown protein [Arabidopsis
  misc_feature (256)..(686): Homolog of NCBI NO: 2262116 NR Description: cellulose synthase isolog [Arabidopsis thaliana]
  misc_feature (1)..(256): Homolog of NCBI NO: 2262116 NR Description: cellulose synthase isolog [Arabidopsis thaliana]
  misc_feature (1)..(256): Homolog of NCBI NO: 17380774 NR Description: unknown protein [Arabidopsis thaliana]
  misc_feature (256)..(404): Homolog of NCBI NO: 17380774 NR Description: unknown protein [Arabidopsis thaliana]
METHRKNSVVGNILHTCHPCRRTIPYRIYAIFHTCGIIALMYHHVHSLVTANNTLITCLLLLSDIVLAFMWATTTSLRLNPVHRTECPEKYAAKPEDFPKLDVFICTADPYKEPPMMVVNTALSVMAYEYPSDKISVYVSDDGGSSLTFFALIEAAKFSKQWLPFCKKNNVQDRSPEVYFSSESHSRSDEAENLKTNILKCEVEQMMYEDMKSRVEHVVESGKVETAFITCDQFRGVFDLWTDKFSRHDHPTIIQLRVSGVMTNSPIILTLDCDMYSNDPATLVRALCYLTDPEIKSGLGYVQFPQKFLGISKNDIYACENKRLFIINMVGFDGLMGPTHVGTGCFFNRRAFYGPPYMLILPEINELKPYRIADKSIKAQDVLSLAHNVAGCIYEYNTNWGSKIGFRYGSLVEDYYTGFMLHCEGWRSVFCNPKKAAFYGDSPKCLVDLVGQQIRWAVGLFEMSFSKYSPITYGIKSLDLLMGLGYCNSPFKPFWSIPLTVYGLLPQLALISGVSVFPKASDPWFWLYIILFFGAYAQDLSDFLLEGGTYRKWWNDQRMLMIKGLSSFFFGFIEFILKTLNLSTPKFNVTSKANDDDEQRKRYEQEIFDFGTSSSMFLPLTTVAIVNLLAFVWGLYGILFCGGELYLELMLVSFAVVNCLPIYGAMVLRKDDGKLSKRTCFLAGNLHVGSYCVKLLRPQVTSPLRLIHNNNTSGWFKRKKHNMNESV

SEQ ID NO: 69763 - protein, 687 aa, Arabidopsis thaliana
  peptide (1)..(687): Ceres Seq. ID no. 1825214
  misc_feature: Pfam Name: Cellulose_synt Pfam Description: Cellulose synthase
  misc_feature (216)..(646): Homolog of NCBI NO: 2262115 NR Description: cellulose synthase isolog [Arabidopsis thaliana]
  misc_feature (1)..(216): Homolog of NCBI NO: 2262115 NR Description: cellulose synthase isolog [Arabidopsis thaliana]
  misc_feature (1)..(646): Homolog of NCBI NO: 7487588 NR Description: hypothetical protein T32A16.170 - Arabidopsis >gi|4972104|emb|CAB43900.1| putative protein [Arabidopsis >gi|7269249|emb|CAB81318.1| putative protein [Arabidopsis
  misc_feature (1)..(646): Homolog of NCBI NO: 15233649 NR Description: cellulose synthase catalytic subunit - like protein id: At4g23990.1 [Arabidopsis thaliana]
  misc_feature (216)..(646): Homolog of NCBI NO: 30686386 NR Description: cellulose synthase - related [Arabidopsis >gi|17979143|gb|AAL49829.1| unknown protein [Arabidopsis >gi|20465365|gb|AAM20086.1| unknown protein [Arabidopsis
  misc_feature (1)..(216): Homolog of NCBI NO: 30686386 NR Description: cellulose synthase - related [Arabidopsis >gi|17979143|gb|AAL49829.1| unknown protein [Arabidopsis >gi|20465365|gb|AAM20086.1| unknown protein [Arabidopsis
  misc_feature (216)..(646): Homolog of NCBI NO: 2262116 NR Description: cellulose synthase isolog [Arabidopsis thaliana]
  misc_feature (1)..(216): Homolog of NCBI NO: 2262116 NR Description: cellulose synthase isolog [Arabidopsis thaliana]
  misc_feature (1)..(216): Homolog of NCBI NO: 17380774 NR Description: unknown protein [Arabidopsis thaliana]
  misc_feature (216)..(364): Homolog of NCBI NO: 17380774 NR Description: unknown protein [Arabidopsis thaliana]
MYHHVHSLVTANNTLITCLLLLSDIVLAFMWATTTSLRLNPVHRTECPEKYAAKPEDFPKLDVFICTADPYKEPPMMVVNTALSVMAYEYPSDKISVYVSDDGGSSLTFFALIEAAKFSKQWLPFCKKNNVQDRSPEVYFSSESHSRSDEAENLKTNILKCEVEQMMYEDMKSRVEHVVESGKVETAFITCDQFRGVFDLWTDKFSRHDHPTIIQLRVSGVMTNSPIILTLDCDMYSNDPATLVRALCYLTDPEIKSGLGYVQFPQKFLGISKNDIYACENKRLFIINMVGFDGLMGPTHVGTGCFFNRRAFYGPPYMLILPEINELKPYRIADKSIKAQDVLSLAHNVAGCIYEYNTNWGSKIGFRYGSLVEDYYTGFMLHCEGWRSVFCNPKKAAFYGDSPKCLVDLVGQQIRWAVGLFEMSFSKYSPITYGIKSLDLLMGLGYCNSPFKPFWSIPLTVYGLLPQLALISGVSVFPKASDPWFWLYIILFFGAYAQDLSDFLLEGGTYRKWWNDQRMLMIKGLSSFFFGFIEFILKTLNLSTPKFNVTSKANDDDEQRKRYEQEIFDFGTSSSMFLPLTTVAIVNLLAFVWGLYGILFCGGELYLELMLVSFAVVNCLPIYGAMVLRKDDGKLSKRTCFLAGNLHVGSYCVKLLRPQVTSPLRLIHNNNTSGWFKRKKHNMNESV

SEQ ID NO: 69764 - protein, 658 aa, Arabidopsis thaliana
  peptide (1)..(658): Ceres Seq. ID no. 1825215
  misc_feature: Pfam Name: Cellulose_synt Pfam Description: Cellulose synthase
  misc_feature (187)..(617): Homolog of NCBI NO: 2262115 NR Description: cellulose synthase isolog [Arabidopsis thaliana]
  misc_feature (1)..(187): Homolog of NCBI NO: 2262115 NR Description: cellulose synthase isolog [Arabidopsis thaliana]
  misc_feature (1)..(617): Homolog of NCBI NO: 7487588 NR Description: hypothetical protein T32A16.170 - Arabidopsis >gi|4972104|emb|CAB43900.1| putative protein [Arabidopsis >gi|7269249|emb|CAB81318.1| putative protein [Arabidopsis
  misc_feature (1)..(617): Homolog of NCBI NO: 15233649 NR Description: cellulose synthase catalytic subunit - like protein id: At4g23990.1 [Arabidopsis thaliana]
  misc_feature (187)..(617): Homolog of NCBI NO: 30686386 NR Description: cellulose synthase - related [Arabidopsis >gi|17979143|gb|AAL49829.1| unknown protein [Arabidopsis >gi|20465365|gb|AAM20086.1| unknown protein [Arabidopsis
  misc_feature (1)..(187): Homolog of NCBI NO: 30686386 NR Description: cellulose synthase - related [Arabidopsis >gi|17979143|gb|AAL49829.1| unknown protein [Arabidopsis >gi|20465365|gb|AAM20086.1| unknown protein [Arabidopsis
  misc_feature (187)..(617): Homolog of NCBI NO: 2262116 NR Description: cellulose synthase isolog [Arabidopsis thaliana]
  misc_feature (1)..(187): Homolog of NCBI NO: 2262116 NR Description: cellulose synthase isolog [Arabidopsis thaliana]
  misc_feature (1)..(187): Homolog of NCBI NO: 17380774 NR Description: unknown protein [Arabidopsis thaliana]
  misc_feature (187)..(335): Homolog of NCBI NO: 17380774 NR Description: unknown protein [Arabidopsis thaliana]
MWATTTSLRLNPVHRTECPEKYAAKPEDFPKLDVFICTADPYKEPPMMVVNTALSVMAYEYPSDKISVYVSDDGGSSLTFFALIEAAKFSKQWLPFCKKNNVQDRSPEVYFSSESHSRSDEAENLKTNILKCEVEQMMYEDMKSRVEHVVESGKVETAFITCDQFRGVFDLWTDKFSRHDHPTIIQLRVSGVMTNSPIILTLDCDMYSNDPATLVRALCYLTDPEIKSGLGYVQFPQKFLGISKNDIYACENKRLFIINMVGFDGLMGPTHVGTGCFFNRRAFYGPPYMLILPEINELKPYRIADKSIKAQDVLSLAHNVAGCIYEYNTNWGSKIGFRYGSLVEDYYTGFMLHCEGWRSVFCNPKKAAFYGDSPKCLVDLVGQQIRWAVGLFEMSFSKYSPITYGIKSLDLLMGLGYCNSPFKPFWSIPLTVYGLLPQLALISGVSVFPKASDPWFWLYIILFFGAYAQDLSDFLLEGGTYRKWWNDQRMLMIKGLSSFFFGFIEFILKTLNLSTPKFNVTSKANDDDEQRKRYEQEIFDFGTSSSMFLPLTTVAIVNLLAFVWGLYGILFCGGELYLELMLVSFAVVNCLPIYGAMVLRKDDGKLSKRTCFLAGNLHVGSYCVKLLRPQVTSPLRLIHNNNTSGWFKRKKHNMNESV

SEQ ID NO: 69765 - DNA, 2070 bp, Arabidopsis thaliana
  misc_feature (1)..(2070): Ceres Seq. ID no. 1825216
  misc_feature: MA Experiment ID: 20000184 Result: Up-regulated in Transcription
  misc_feature: MA Experiment 20000184 PARAMETER Experiment Name: At_Shoots__P Parameter: Age (day) Value: 7
  misc_feature: MA Experiment 20000184 PARAMETER Experiment Name: At_Shoots__P Parameter: Tissue Value: Shoots vs. Whole Plant
  misc_feature: MA Experiment ID: 20000265 Result: Up-regulated in Transcription
  misc_feature: MA Experiment 20000265 PARAMETER Experiment Name: At_Open_Flower_P Parameter: Age (day) Value: 21
  misc_feature: MA Experiment 20000265 PARAMETER Experiment Name: At_Open_Flower_P Parameter: Plant Line Value: WS
  misc_feature: MA Experiment 20000265 PARAMETER Experiment Name: At_Open_Flower_P Parameter: Tissue Value: Closed Flower vs. Whole Plant
  misc_feature: MA Experiment ID: 20000286 Result: Up-regulated in Transcription
  misc_feature: MA Experiment 20000286 PARAMETER Experiment Name: At_Open_Flower_P Parameter: Age (day) Value: 21
  misc_feature: MA Experiment 20000286 PARAMETER Experiment Name: At_Open_Flower_P Parameter: Plant Line Value: WS
  misc_feature: MA Experiment 20000286 PARAMETER Experiment Name: At_Open_Flower_P Parameter: Tissue Value: Half Open vs. Whole Plant
  misc_feature: MA Experiment ID: 20000438 Result: Up-regulated in Transcription
  misc_feature: MA Experiment 20000438 PARAMETER Experiment Name: At_Shoots__P Parameter: Age (day) Value: 14
  misc_feature: MA Experiment 20000438 PARAMETER Experiment Name: At_Shoots__P Parameter: Tissue Value: Shoots vs. Whole Plant
  misc_feature: MA Experiment ID: 20000574 Result: Down-regulated in Transcription
  misc_feature: MA Experiment 20000574 PARAMETER Experiment Name: At_100uM_ABA_Mutants__P Parameter: Organism Value: A. thaliana
  misc_feature: MA Experiment 20000574 PARAMETER Experiment Name: At_100uM_ABA_Mutants__P Parameter: Plant Line Value: CS23 vs. Ler wt
  misc_feature: MA Experiment 20000574 PARAMETER Experiment Name: At_100uM_ABA_Mutants__P Parameter: Timepoint (hr) Value: N/A
  misc_feature: MA Experiment 20000574 PARAMETER Experiment Name: At_100uM_ABA_Mutants__P Parameter: Tissue Value: Whole Plant
  misc_feature: MA Experiment 20000574 PARAMETER Experiment Name: At_100uM_ABA_Mutants__P Parameter: Treatment Value: None
  misc_feature: MA Experiment ID: 20000794 Result: Up-regulated in Transcription
  misc_feature: MA Experiment 20000794 PARAMETER Experiment Name: At_Petals_P Parameter: Age (day) Value: 23-25 days
  misc_feature: MA Experiment 20000794 PARAMETER Experiment Name: At_Petals_P Parameter: Plant Line Value: WS
  misc_feature: MA Experiment 20000794 PARAMETER Experiment Name: At_Petals_P Parameter: Tissue Value: Petals vs. Whole plant
  misc_feature: MA Experiment ID: 20001247 Result: Down-regulated in Transcription
  misc_feature: MA Experiment 20001247 PARAMETER Experiment Name: At_Far-red-induction_P Parameter: Age (day) Value: 7
  misc_feature: MA Experiment 20001247 PARAMETER Experiment Name: At_Far-red-induction_P Parameter: Light Value: Far-red vs. White
  misc_feature: MA Experiment 20001247 PARAMETER Experiment Name: At_Far-red-induction_P Parameter: Organism Value: A. thaliana
  misc_feature: MA Experiment 20001247 PARAMETER Experiment Name: At_Far-red-induction_P Parameter: Plant Line Value: Columbia
  misc_feature: MA Experiment 20001247 PARAMETER Experiment Name: At_Far-red-induction_P Parameter: Timepoint (hr) Value: 1
  misc_feature: MA Experiment 20001247 PARAMETER Experiment Name: At_Far-red-induction_P Parameter: Tissue Value: Whole Plant
  misc_feature: MA Experiment ID: 20001248 Result: Down-regulated in Transcription
  misc_feature: MA Experiment 20001248 PARAMETER Experiment Name: At_Far-red-induction_P Parameter: Age (day) Value: 7
  misc_feature: MA Experiment 20001248 PARAMETER Experiment Name: At_Far-red-induction_P Parameter: Light Value: Far-red vs. White
  misc_feature: MA Experiment 20001248 PARAMETER Experiment Name: At_Far-red-induction_P Parameter: Organism Value: A. thaliana
  misc_feature: MA Experiment 20001248 PARAMETER Experiment Name: At_Far-red-induction_P Parameter: Plant Line Value: Columbia
  misc_feature: MA Experiment 20001248 PARAMETER Experiment Name: At_Far-red-induction_P Parameter: Timepoint (hr) Value: 4
  misc_feature: MA Experiment 20001248 PARAMETER Experiment Name: At_Far-red-induction_P Parameter: Tissue Value: Whole Plant
  misc_feature: MA Experiment ID: 20001554 Result: Up-regulated in Transcription
  misc_feature: MA Experiment 20001554 PARAMETER Experiment Name: At_Drought_Soil_Dry_P Parameter: Age (day) Value: 21
  misc_feature: MA Experiment 20001554 PARAMETER Experiment Name: At_Drought_Soil_Dry_P Parameter: Organism Value: A. thaliana
  misc_feature: MA Experiment 20001554 PARAMETER Experiment Name: At_Drought_Soil_Dry_P Parameter: Plant Line Value: WS
  misc_feature: MA Experiment 20001554 PARAMETER Experiment Name: At_Drought_Soil_Dry_P Parameter: Post Timepoint (hr) Value: None
  misc_feature: MA Experiment 20001554 PARAMETER Experiment Name: At_Drought_Soil_Dry_P Parameter: Post-Treatment Value: None
  misc_feature: MA Experiment 20001554 PARAMETER Experiment Name: At_Drought_Soil_Dry_P Parameter: Timepoint (day) Value: 7
  misc_feature: MA Experiment 20001554 PARAMETER Experiment Name: At_Drought_Soil_Dry_P Parameter: Treatment Value: Drought vs. No Drought
  misc_feature: MA Experiment ID: 20001556 Result: Up-regulated in Transcription
  misc_feature: MA Experiment 20001556 PARAMETER Experiment Name: At_Drought_Soil_Dry_P Parameter: Age (day) Value: 26
  misc_feature: MA Experiment 20001556 PARAMETER Experiment Name: At_Drought_Soil_Dry_P Parameter: Organism Value: A. thaliana
  misc_feature: MA Experiment 20001556 PARAMETER Experiment Name: At_Drought_Soil_Dry_P Parameter: Plant Line Value: WS
  misc_feature: MA Experiment 20001556 PARAMETER Experiment Name: At_Drought_Soil_Dry_P Parameter: Post Timepoint (hr) Value: None
  misc_feature: MA Experiment 20001556 PARAMETER Experiment Name: At_Drought_Soil_Dry_P Parameter: Post-Treatment Value: None
  misc_feature: MA Experiment 20001556 PARAMETER Experiment Name: At_Drought_Soil_Dry_P Parameter: Timepoint (day) Value: 12
  misc_feature: MA Experiment 20001556 PARAMETER Experiment Name: At_Drought_Soil_Dry_P Parameter: Treatment Value: Drought vs. No Drought
  misc_feature: MA Experiment ID: 20001560 Result: Down-regulated in Transcription
  misc_feature: MA Experiment 20001560 PARAMETER Experiment Name: At_Drought_Soil_Dry_P Parameter: Age (day) Value: 28
  misc_feature: MA Experiment 20001560 PARAMETER Experiment Name: At_Drought_Soil_Dry_P Parameter: Organism Value: A. thaliana
  misc_feature: MA Experiment 20001560 PARAMETER Experiment Name: At_Drought_Soil_Dry_P Parameter: Plant Line Value: WS
  misc_feature: MA Experiment 20001560 PARAMETER Experiment Name: At_Drought_Soil_Dry_P Parameter: Post Timepoint (hr) Value: None
  misc_feature: MA Experiment 20001560 PARAMETER Experiment Name: At_Drought_Soil_Dry_P Parameter: Post-Treatment Value: None
  misc_feature: MA Experiment 20001560 PARAMETER Experiment Name: At_Drought_Soil_Dry_P Parameter: Timepoint (day) Value: 14
  misc_feature: MA Experiment 20001560 PARAMETER Experiment Name: At_Drought_Soil_Dry_P Parameter: Treatment Value: Drought vs. No Drought
  misc_feature: MA Experiment ID: 20001761 Result: Down-regulated in Transcription
  misc_feature: MA Experiment 20001761 PARAMETER Experiment Name: At_50mM_NH4NO3_L-to-H_P Parameter: Timepoint (hr) Value: 4
  misc_feature: MA Experiment 20001761 PARAMETER Experiment Name: At_50mM_NH4NO3_L-to-H_P Parameter: Tissue Value: Siliques
  misc_feature: MA Experiment 20001761 PARAMETER Experiment Name: At_50mM_NH4NO3_L-to-H_P Parameter: Treatment Value: 50mM NH4NO3 vs 100mM Mannitol
  misc_feature: MA Experiment ID: 20001904 Result: Up-regulated in Transcription
  misc_feature: MA Experiment 20001904 PARAMETER Experiment Name: At_Drought_Reproduction_P Parameter: Age (day) Value: 37
  misc_feature: MA Experiment 20001904 PARAMETER Experiment Name: At_Drought_Reproduction_P Parameter: Organism Value: A. thaliana
  misc_feature: MA Experiment 20001904 PARAMETER Experiment Name: At_Drought_Reproduction_P Parameter: Plant Line Value: WS
  misc_feature: MA Experiment 20001904 PARAMETER Experiment Name: At_Drought_Reproduction_P Parameter: Timepoint (day) Value: 7
  misc_feature: MA Experiment 20001904 PARAMETER Experiment Name: At_Drought_Reproduction_P Parameter: Tissue Value: Rosettes
  misc_feature: MA Experiment 20001904 PARAMETER Experiment Name: At_Drought_Reproduction_P Parameter: Treatment Value: Drought vs. No Drought
  misc_feature: MA Experiment ID: 20001905 Result: Up-regulated in Transcription
  misc_feature: MA Experiment 20001905 PARAMETER Experiment Name: At_Drought_Reproduction_P Parameter: Age (day) Value: 40
  misc_feature: MA Experiment 20001905 PARAMETER Experiment Name: At_Drought_Reproduction_P Parameter: Organism Value: A. thaliana
  misc_feature: MA Experiment 20001905 PARAMETER Experiment Name: At_Drought_Reproduction_P Parameter: Plant Line Value: WS
  misc_feature: MA Experiment 20001905 PARAMETER Experiment Name: At_Drought_Reproduction_P Parameter: Timepoint (day) Value: 10
  misc_feature: MA Experiment 20001905 PARAMETER Experiment Name: At_Drought_Reproduction_P Parameter: Tissue Value: Rosettes
  misc_feature: MA Experiment 20001905 PARAMETER Experiment Name: At_Drought_Reproduction_P Parameter: Treatment Value: Drought vs. No Drought
  misc_feature: MA Experiment ID: 20001906 Result: Up-regulated in Transcription
  misc_feature: MA Experiment 20001906 PARAMETER Experiment Name: At_Drought_Reproduction_P Parameter: Age (day) Value: 35
  misc_feature: MA Experiment 20001906 PARAMETER Experiment Name: At_Drought_Reproduction_P Parameter: Organism Value: A. thaliana
  misc_feature: MA Experiment 20001906 PARAMETER Experiment Name: At_Drought_Reproduction_P Parameter: Plant Line Value: WS
  misc_feature: MA Experiment 20001906 PARAMETER Experiment Name: At_Drought_Reproduction_P Parameter: Timepoint (day) Value: 5
  misc_feature: MA Experiment 20001906 PARAMETER Experiment Name: At_Drought_Reproduction_P Parameter: Tissue Value: Siliques
  misc_feature: MA Experiment 20001906 PARAMETER Experiment Name: At_Drought_Reproduction_P Parameter: Treatment Value: Drought vs. No Drought
  misc_feature: MA Experiment ID: 20001908 Result: Up-regulated in Transcription
  misc_feature: MA Experiment 20001908 PARAMETER Experiment Name: At_Drought_Reproduction_P Parameter: Age (day) Value: 40
  misc_feature: MA Experiment 20001908 PARAMETER Experiment Name: At_Drought_Reproduction_P Parameter: Organism Value: A. thaliana
  misc_feature: MA Experiment 20001908 PARAMETER Experiment Name: At_Drought_Reproduction_P Parameter: Plant Line Value: WS
  misc_feature: MA Experiment 20001908 PARAMETER Experiment Name: At_Drought_Reproduction_P Parameter: Timepoint (day) Value: 10
  misc_feature: MA Experiment 20001908 PARAMETER Experiment Name: At_Drought_Reproduction_P Parameter: Tissue Value: Siliques
  misc_feature: MA Experiment 20001908 PARAMETER Experiment Name: At_Drought_Reproduction_P Parameter: Treatment Value: Drought vs. No Drought
  misc_feature: MA Experiment ID: 20001911 Result: Up-regulated in Transcription
  misc_feature: MA Experiment 20001911 PARAMETER Experiment Name: At_Drought_Reproduction_P Parameter: Age (day) Value: 40
  misc_feature: MA Experiment 20001911 PARAMETER Experiment Name: At_Drought_Reproduction_P Parameter: Organism Value: A. thaliana
  misc_feature: MA Experiment 20001911 PARAMETER Experiment Name: At_Drought_Reproduction_P Parameter: Plant Line Value: WS
  misc_feature: MA Experiment 20001911 PARAMETER Experiment Name: At_Drought_Reproduction_P Parameter: Timepoint (day) Value: 10
  misc_feature: MA Experiment 20001911 PARAMETER Experiment Name: At_Drought_Reproduction_P Parameter: Tissue Value: Flowers
  misc_feature: MA Experiment 20001911 PARAMETER Experiment Name: At_Drought_Reproduction_P Parameter: Treatment Value: Drought vs. No Drought
  misc_feature: Pfam Name: Cellulose_synt Pfam Description: Cellulose synthase
atggagcctcacagaaaacactcggtcggcgacacaaccctccacacgtgtcatccttgccggcgcaccattccatatagaatctacgccgtatttcacacgtgtggcatcatagccctcatgtatcaccatgtacactcacttctcacagcaaacacaactctaatcacgtctctccttctcctctccgatattgttctcgccttcatgtgggcaaccacaacttccctccggtataaaccggttcgccggaccgagtaccctgagaaatatgcagctgaaccggaggacttcccgaaactggacgtgtttatatgcacggctgatccgtacaaggagcctccgatgatggtggtcaacactgccttatcggtgatggcttacgagtatccgtccgataagatctcagtctacgtatcggacgatggaggttcgtcgttgactttgtttgctcttatggaggcagctaagttctctaagcattggttgcctttttgcaagaagaataatgttcaagatcggtctcctgaagtttatttctcatcaaagttacgttctcggagtgatgaagctgaaaatatcaagatgatgtacgaagacatgaagagtagagtagaacatgtggtggagagtggaaaagttgagactgcatttatcacatgcgatcaatttcgtggggtattcgatttgtggaccgacaaattcactcgtcatgaccatcccacaattattcagctacgagtgtctggagtgatgacgaattcaccgatcattctaacactagactgtgatatgtattccaacgatccagcaacaccagttcgtgccctgtgctatttaacagaccctaaaatcaaaactggtttagggtttgtgcagtttcctcaaacatttcaaggaataagcaagaacgatatatatgcatgcgcgtataagcgtctctttgagatcaatatgattgggtttgatggtttaatgggcccgaatcatgtgggaactggttgtttcttcaatcgacgaggtttttatggagctccatctaatttaattttgcctgagatagatgaacttaagcccaatcgtattgtagataagcctatcaatgctcaagatgttttagcattggctcaccgtgtagcaggatgtatctacgagcttaacaccaattggggatcaaagattggattcagatatgggtctttagtagaagactactacacagggtataggctccattgtgaaggatggagatcagttttttgcagacccaaaagagcagcattttgcggagattccccaaaaagtctaattgatgtagtgagccaacaaaagagatgggccattgggcttcttgaagttgccatctcaaggtatagccccattacctatggtgtcaaatcaatgggtctagtaacgggagtaggctattgtcaatacgcatgttgggccttttggtcacttcctcttatcgtctatggattcttgccccaacttgctctcctttatcaatctagcgtctttcccaagtcatcagatccatggttttggctttacatcgttttgttcctcggtgcatatgggcaagatctactcgactttgtattagaaggaggaacttatggcggatggtggaacgatcaaagaatgtggtcgataagaggattctcttcacacctatttggcttcatagagttcactcttaaaaccctaaacctctccacgcatggattcaacgtcacaagcaaagccaacgatgacgaagaacaaagcaagaggtatgagaaagagatttttgagttcggcccctcttcgtccatgttcttgcccttgactacggttgccatcgttaacctccttgcttttgtctgggggctttatggtcttttcgcttggggagaaggactcgtccttgagctgatgctggcgagtttcgcggtggtgaactgcttgccgatctatgaggctatggtgttgaggatagacgatggaaaattaccaaaaagggtttgtttcgtagctggaatcctcacatttgtgctgattgtgtcaggttacgtcttcctcaagtaa

SEQ ID NO: 69766 - protein, 689 aa, Arabidopsis thaliana
  peptide (1)..(689): Ceres Seq. ID no. 1825217
  misc_feature: Pfam Name: Cellulose_synt Pfam Description: Cellulose synthase
  misc_feature (1)..(689): Homolog of NCBI NO: 7487588 NR Description: hypothetical protein T32A16.170 - Arabidopsis >gi|4972104|emb|CAB43900.1| putative protein [Arabidopsis >gi|7269249|emb|CAB81318.1| putative protein [Arabidopsis
  misc_feature (246)..(689): Homolog of NCBI NO: 30686386 NR Description: cellulose synthase - related [Arabidopsis >gi|17979143|gb|AAL49829.1| unknown protein [Arabidopsis >gi|20465365|gb|AAM20086.1| unknown protein [Arabidopsis
  misc_feature (1)..(246): Homolog of NCBI NO: 30686386 NR Description: cellulose synthase - related [Arabidopsis >gi|17979143|gb|AAL49829.1| unknown protein [Arabidopsis >gi|20465365|gb|AAM20086.1| unknown protein [Arabidopsis
  misc_feature (246)..(689): Homolog of NCBI NO: 2262115 NR Description: cellulose synthase isolog [Arabidopsis thaliana]
  misc_feature (1)..(246): Homolog of NCBI NO: 2262115 NR Description: cellulose synthase isolog [Arabidopsis thaliana]
  misc_feature (1)..(676): Homolog of NCBI NO: 15233653 NR Description: putative protein; protein id: At4g24010.1
  misc_feature (246)..(676): Homolog of NCBI NO: 2262114 NR Description: cellulose synthase isolog [Arabidopsis thaliana]
  misc_feature (1)..(246): Homolog of NCBI NO: 2262114 NR Description: cellulose synthase isolog [Arabidopsis thaliana]
  misc_feature (1)..(246): Homolog of NCBI NO: 17380774 NR Description: unknown protein [Arabidopsis thaliana]
  misc_feature (246)..(394): Homolog of NCBI NO: 17380774 NR Description: unknown protein [Arabidopsis thaliana]
MEPHRKHSVGDTTLHTCHPCRRTIPYRIYAVFHTCGIIALMYHHVHSLLTANTTLITSLLLLSDIVLAFMWATTTSLRYKPVRRTEYPEKYAAEPEDFPKLDVFICTADPYKEPPMMVVNTALSVMAYEYPSDKISVYVSDDGGSSLTLFALMEAAKFSKHWLPFCKKNNVQDRSPEVYFSSKLRSRSDEAENIKMMYEDMKSRVEHVVESGKVETAFITCDQFRGVFDLWTDKFTRHDHPTIIQLRVSGVMTNSPIILTLDCDMYSNDPATPVRALCYLTDPKIKTGLGFVQFPQTFQGISKNDIYACAYKRLFEINMIGFDGLMGPNHVGTGCFFNRRGFYGAPSNLILPEIDELKPNRIVDKPINAQDVLALAHRVAGCIYELNTNWGSKIGFRYGSLVEDYYTGYRLHCEGWRSVFCRPKRAAFCGDSPKSLIDVVSQQKRWAIGLLEVAISRYSPITYGVKSMGLVTGVGYCQYACWAFWSLPLIVYGFLPQLALLYQSSVFPKSSDPWFWLYIVLFLGAYGQDLLDFVLEGGTYGGWWNDQRMWSIRGFSSHLFGFIEFTLKTLNLSTHGFNVTSKANDDEEQSKRYEKEIFEFGPSSSMFLPLTTVAIVNLLAFVWGLYGLFAWGEGLVLELMLASFAVVNCLPIYEAMVLRIDDGKLPKRVCFVAGILTFVLIVSGYVFLK

SEQ ID NO: 69767 - protein, 649 aa, Arabidopsis thaliana
  peptide (1)..(649): Ceres Seq. ID no. 1825218
  misc_feature: Pfam Name: Cellulose_synt Pfam Description: Cellulose synthase
  misc_feature (1)..(649): Homolog of NCBI NO: 7487588 NR Description: hypothetical protein T32A16.170 - Arabidopsis >gi|4972104|emb|CAB43900.1| putative protein [Arabidopsis >gi|7269249|emb|CAB81318.1| putative protein [Arabidopsis
  misc_feature (206)..(649): Homolog of NCBI NO: 30686386 NR Description: cellulose synthase - related [Arabidopsis >gi|17979143|gb|AAL49829.1| unknown protein [Arabidopsis >gi|20465365|gb|AAM20086.1| unknown protein [Arabidopsis
  misc_feature (1)..(206): Homolog of NCBI NO: 30686386 NR Description: cellulose synthase - related [Arabidopsis >gi|17979143|gb|AAL49829.1| unknown protein [Arabidopsis >gi|20465365|gb|AAM20086.1| unknown protein [Arabidopsis
  misc_feature (206)..(649): Homolog of NCBI NO: 2262115 NR Description: cellulose synthase isolog [Arabidopsis thaliana]
  misc_feature (1)..(206): Homolog of NCBI NO: 2262115 NR Description: cellulose synthase isolog [Arabidopsis thaliana]
  misc_feature (1)..(636): Homolog of NCBI NO: 15233653 NR Description: putative protein; protein id: At4g24010.1
  misc_feature (206)..(636): Homolog of NCBI NO: 2262114 NR Description: cellulose synthase isolog [Arabidopsis thaliana]
  misc_feature (1)..(206): Homolog of NCBI NO: 2262114 NR Description: cellulose synthase isolog [Arabidopsis thaliana]
  misc_feature (1)..(206): Homolog of NCBI NO: 17380774 NR Description: unknown protein [Arabidopsis thaliana]
  misc_feature (206)..(354): Homolog of NCBI NO: 17380774 NR Description: unknown protein [Arabidopsis thaliana]
MYHHVHSLLTANTTLITSLLLLSDIVLAFMWATTTSLRYKPVRRTEYPEKYAAEPEDFPKLDVFICTADPYKEPPMMVVNTALSVMAYEYPSDKISVYVSDDGGSSLTLFALMEAAKFSKHWLPFCKKNNVQDRSPEVYFSSKLRSRSDEAENIKMMYEDMKSRVEHVVESGKVETAFITCDQFRGVFDLWTDKFTRHDHPTIIQLRVSGVMTNSPIILTLDCDMYSNDPATPVRALCYLTDPKIKTGLGFVQFPQTFQGISKNDIYACAYKRLFEINMIGFDGLMGPNHVGTGCFFNRRGFYGAPSNLILPEIDELKPNRIVDKPINAQDVLALAHRVAGCIYELNTNWGSKIGFRYGSLVEDYYTGYRLHCEGWRSVFCRPKRAAFCGDSPKSLIDVVSQQKRWAIGLLEVAISRYSPITYGVKSMGLVTGVGYCQYACWAFWSLPLIVYGFLPQLALLYQSSVFPKSSDPWFWLYIVLFLGAYGQDLLDFVLEGGTYGGWWNDQRMWSIRGFSSHLFGFIEFTLKTLNLSTHGFNVTSKANDDEEQSKRYEKEIFEFGPSSSMFLPLTTVAIVNLLAFVWGLYGLFAWGEGLVLELMLASFAVVNCLPIYEAMVLRIDDGKLPKRVCFVAGILTFVLIVSGYVFLK

SEQ ID NO: 69768 - protein, 620 aa, Arabidopsis thaliana
  peptide (1)..(620): Ceres Seq. ID no. 1825219
  misc_feature: Pfam Name: Cellulose_synt Pfam Description: Cellulose synthase
  misc_feature (1)..(620): Homolog of NCBI NO: 7487588 NR Description: hypothetical protein T32A16.170 - Arabidopsis >gi|4972104|emb|CAB43900.1| putative protein [Arabidopsis >gi|7269249|emb|CAB81318.1| putative protein [Arabidopsis
  misc_feature (177)..(620): Homolog of NCBI NO: 30686386 NR Description: cellulose synthase - related [Arabidopsis >gi|17979143|gb|AAL49829.1| unknown protein [Arabidopsis >gi|20465365|gb|AAM20086.1| unknown protein [Arabidopsis
  misc_feature (1)..(177): Homolog of NCBI NO: 30686386 NR Description: cellulose synthase - related [Arabidopsis >gi|17979143|gb|AAL49829.1| unknown protein [Arabidopsis >gi|20465365|gb|AAM20086.1| unknown protein [Arabidopsis
  misc_feature (177)..(620): Homolog of NCBI NO: 2262115 NR Description: cellulose synthase isolog [Arabidopsis thaliana]
  misc_feature (1)..(177): Homolog of NCBI NO: 2262115 NR Description: cellulose synthase isolog [Arabidopsis thaliana]
  misc_feature (1)..(607): Homolog of NCBI NO: 15233653 NR Description: putative protein; protein id: At4g24010.1
  misc_feature (177)..(607): Homolog of NCBI NO: 2262114 NR Description: cellulose synthase isolog [Arabidopsis thaliana]
  misc_feature (1)..(177): Homolog of NCBI NO: 2262114 NR Description: cellulose synthase isolog [Arabidopsis thaliana]
  misc_feature (1)..(177): Homolog of NCBI NO: 17380774 NR Description: unknown protein [Arabidopsis thaliana]
  misc_feature (177)..(325): Homolog of NCBI NO: 17380774 NR Description: unknown protein [Arabidopsis thaliana]
MWATTTSLRYKPVRRTEYPEKYAAEPEDFPKLDVFICTADPYKEPPMMVVNTALSVMAYEYPSDKISVYVSDDGGSSLTLFALMEAAKFSKHWLPFCKKNNVQDRSPEVYFSSKLRSRSDEAENIKMMYEDMKSRVEHVVESGKVETAFITCDQFRGVFDLWTDKFTRHDHPTIIQLRVSGVMTNSPIILTLDCDMYSNDPATPVRALCYLTDPKIKTGLGFVQFPQTFQGISKNDIYACAYKRLFEINMIGFDGLMGPNHVGTGCFFNRRGFYGAPSNLILPEIDELKPNRIVDKPINAQDVLALAHRVAGCIYELNTNWGSKIGFRYGSLVEDYYTGYRLHCEGWRSVFCRPKRAAFCGDSPKSLIDVVSQQKRWAIGLLEVAISRYSPITYGVKSMGLVTGVGYCQYACWAFWSLPLIVYGFLPQLALLYQSSVFPKSSDPWFWLYIVLFLGAYGQDLLDFVLEGGTYGGWWNDQRMWSIRGFSSHLFGFIEFTLKTLNLSTHGFNVTSKANDDEEQSKRYEKEIFEFGPSSSMFLPLTTVAIVNLLAFVWGLYGLFAWGEGLVLELMLASFAVVNCLPIYEAMVLRIDDGKLPKRVCFVAGILTFVLIVSGYVFLK

SEQ ID NO: 69769 - DNA, 765 bp, Arabidopsis thaliana
  misc_feature (1)..(765): Ceres Seq. ID no. 1825625
  misc_feature: MA Experiment ID: 20000180 Result: Down-regulated in Transcription
  misc_feature: MA Experiment 20000180 PARAMETER Experiment Name: At_Germinating_Seeds_P Parameter: Age (hr) Value: 24 vs. 0
  misc_feature: MA Experiment 20000180 PARAMETER Experiment Name: At_Germinating_Seeds_P Parameter: Tissue Value: Germinating Seeds
  misc_feature: MA Experiment ID: 20000184 Result: Down-regulated in Transcription
  misc_feature: MA Experiment 20000184 PARAMETER Experiment Name: At_Shoots__P Parameter: Age (day) Value: 7
  misc_feature: MA Experiment 20000184 PARAMETER Experiment Name: At_Shoots__P Parameter: Tissue Value: Shoots vs. Whole Plant
  misc_feature: MA Experiment ID: 20000234 Result: Down-regulated in Transcription
  misc_feature: MA Experiment 20000234 PARAMETER Experiment Name: At_Siliques_P Parameter: Age (day) Value: 21
  misc_feature: MA Experiment 20000234 PARAMETER Experiment Name: At_Siliques_P Parameter: Organism Value: A. thaliana
  misc_feature: MA Experiment 20000234 PARAMETER Experiment Name: At_Siliques_P Parameter: Plant Line Value: WS
  misc_feature: MA Experiment 20000234 PARAMETER Experiment Name: At_Siliques_P Parameter: Tissue Value: Less Than 5mm Siliques vs. Whole Plant
  misc_feature: MA Experiment ID: 20000264 Result: Down-regulated in Transcription
  misc_feature: MA Experiment 20000264 PARAMETER Experiment Name: At_Open_Flower_P Parameter: Age (day) Value: 21
  misc_feature: MA Experiment 20000264 PARAMETER Experiment Name: At_Open_Flower_P Parameter: Plant Line Value: WS
  misc_feature: MA Experiment 20000264 PARAMETER Experiment Name: At_Open_Flower_P Parameter: Tissue Value: Open Flower vs. Whole Plant
  misc_feature: MA Experiment ID: 20000265 Result: Down-regulated in Transcription
  misc_feature: MA Experiment 20000265 PARAMETER Experiment Name: At_Open_Flower_P Parameter: Age (day) Value: 21
  misc_feature: MA Experiment 20000265 PARAMETER Experiment Name: At_Open_Flower_P Parameter: Plant Line Value: WS
  misc_feature: MA Experiment 20000265 PARAMETER Experiment Name: At_Open_Flower_P Parameter: Tissue Value: Closed Flower vs. Whole Plant
  misc_feature: MA Experiment ID: 20001248 Result: Up-regulated in Transcription
  misc_feature: MA Experiment 20001248 PARAMETER Experiment Name: At_Far-red-induction_P Parameter: Age (day) Value: 7
  misc_feature: MA Experiment 20001248 PARAMETER Experiment Name: At_Far-red-induction_P Parameter: Light Value: Far-red vs. White
  misc_feature: MA Experiment 20001248 PARAMETER Experiment Name: At_Far-red-induction_P Parameter: Organism Value: A. thaliana
  misc_feature: MA Experiment 20001248 PARAMETER Experiment Name: At_Far-red-induction_P Parameter: Plant Line Value: Columbia
  misc_feature: MA Experiment 20001248 PARAMETER Experiment Name: At_Far-red-induction_P Parameter: Timepoint (hr) Value: 4
  misc_feature: MA Experiment 20001248 PARAMETER Experiment Name: At_Far-red-induction_P Parameter: Tissue Value: Whole Plant
  misc_feature: MA Experiment ID: 20001904 Result: Down-regulated in Transcription
  misc_feature: MA Experiment 20001904 PARAMETER Experiment Name: At_Drought_Reproduction_P Parameter: Age (day) Value: 37
  misc_feature: MA Experiment 20001904 PARAMETER Experiment Name: At_Drought_Reproduction_P Parameter: Organism Value: A. thaliana
  misc_feature: MA Experiment 20001904 PARAMETER Experiment Name: At_Drought_Reproduction_P Parameter: Plant Line Value: WS
  misc_feature: MA Experiment 20001904 PARAMETER Experiment Name: At_Drought_Reproduction_P Parameter: Timepoint (day) Value: 7
  misc_feature: MA Experiment 20001904 PARAMETER Experiment Name: At_Drought_Reproduction_P Parameter: Tissue Value: Rosettes
  misc_feature: MA Experiment 20001904 PARAMETER Experiment Name: At_Drought_Reproduction_P Parameter: Treatment Value: Drought vs. No Drought
  misc_feature: MA Experiment ID: 20001905 Result: Down-regulated in Transcription
  misc_feature: MA Experiment 20001905 PARAMETER Experiment Name: At_Drought_Reproduction_P Parameter: Age (day) Value: 40
  misc_feature: MA Experiment 20001905 PARAMETER Experiment Name: At_Drought_Reproduction_P Parameter: Organism Value: A. thaliana
  misc_feature: MA Experiment 20001905 PARAMETER Experiment Name: At_Drought_Reproduction_P Parameter: Plant Line Value: WS
  misc_feature: MA Experiment 20001905 PARAMETER Experiment Name: At_Drought_Reproduction_P Parameter: Timepoint (day) Value: 10
  misc_feature: MA Experiment 20001905 PARAMETER Experiment Name: At_Drought_Reproduction_P Parameter: Tissue Value: Rosettes
  misc_feature: MA Experiment 20001905 PARAMETER Experiment Name: At_Drought_Reproduction_P Parameter: Treatment Value: Drought vs. No Drought
atggcgatcgaggatcaagagaacacaatccgtgaaatcaaacctaagaacagaagaatcatgggagctggtggtccggaggaagaggagaaccggtggccgccatggttgaaacctttgcttaaagagcaattctttgttcattgcaagtttcatggagactctcataagagtgaatgcaatatgtattgcttagactgcaccaatggcccactttgctctctttgtcttgctcatcacaaggatcatcgcaccattcagataaggagatcttcttatcatgatgttataagggtgaatgagatacaaaagtatcttgatataggtgggatccaaacctatgtgatcaatagtgctaaagtcgtcttcctgaatgagaggcctcagcctaggcctgggaaaggagtgaccaatacctgcaaggtttgctatcgtagcctcgttgatgatagcttccgcttctgctctcttggctgcaagtttcacctaacttctccttgcatttcagtaaactcttttctgatacttactttctctatgtttttgggaaatgaaatcaagattgctggaacatcaagaggctttgaaaagggaagggagaacctgctaatggaaacagaggattcaagtagcagcattgcaattgggaagaacattacaaatctccagagtttcagcccatcaacacctccacttactacatctagtaactgcagaatcgtcaagcgaagaaagggaattcctcaccgatctccaatgggataa

SEQ ID NO: 69770 - protein, 254 aa, Arabidopsis thaliana
  peptide (1)..(254): Ceres Seq. ID no. 1825626
  misc_feature (31)..(247): Pfam Name: Protein of unknown function, DUF597 Pfam Description: Protein of unknown function, DUF597
  misc_feature (1)..(254): Homolog of NCBI NO: 15236696 NR Description: putative protein; protein id: At4g17900.1
  misc_feature (1)..(160): Homolog of NCBI NO: 6714272 NR Description: F6N18.8 [Arabidopsis thaliana]
  misc_feature (187)..(254): Homolog of NCBI NO: 6714272 NR Description: F6N18.8 [Arabidopsis thaliana]
  misc_feature (25)..(160): Homolog of NCBI NO: 18398555 NR Description: expressed protein; protein id: At1g32700.1,
  misc_feature (187)..(254): Homolog of NCBI NO: 18398555 NR Description: expressed protein; protein id: At1g32700.1,
  misc_feature (25)..(160): Homolog of NCBI NO: 21554139 NR Description: unknown [Arabidopsis thaliana]
  misc_feature (187)..(254): Homolog of NCBI NO: 21554139 NR Description: unknown [Arabidopsis thaliana]
  misc_feature (17)..(254): Homolog of NCBI NO: 38346725 NR Description: OSJNBa0086O06.23 [Oryza sativa (japonica
  misc_feature (1)..(202): Homolog of NCBI NO: 15237491 NR Description: putative protein; protein id: At5g46710.1, by cDNA: 42747. [Arabidopsis thaliana] gene_id:MZA15.12~pir||T05076~similar to unknown protein
  misc_feature (1)..(166): Homolog of NCBI NO: 37537092 NR Description: unknown protein [Oryza sativa (japonica
MAIEDQENTIREIKPKNRRIMGAGGPEEEENRWPPWLKPLLKEQFFVHCKFHGDSHKSECNMYCLDCTNGPLCSLCLAHHKDHRTIQIRRSSYHDVIRVNEIQKYLDIGGIQTYVINSAKVVFLNERPQPRPGKGVTNTCKVCYRSLVDDSFRFCSLGCKFHLTSPCISVNSFLILTFSMFLGNEIKIAGTSRGFEKGRENLLMETEDSSSSIAIGKNITNLQSFSPSTPPLTTSSNCRIVKRRKGIPHRSPMG

SEQ ID NO: 69771 - protein, 234 aa, Arabidopsis thaliana
  peptide (1)..(234): Ceres Seq. ID no. 1825627
  misc_feature (11)..(227): Pfam Name: Protein of unknown function, DUF597 Pfam Description: Protein of unknown function, DUF597
  misc_feature (1)..(234): Homolog of NCBI NO: 15236696 NR Description: putative protein; protein id: At4g17900.1
  misc_feature (1)..(140): Homolog of NCBI NO: 6714272 NR Description: F6N18.8 [Arabidopsis thaliana]
  misc_feature (167)..(234): Homolog of NCBI NO: 6714272 NR Description: F6N18.8 [Arabidopsis thaliana]
  misc_feature (5)..(140): Homolog of NCBI NO: 18398555 NR Description: expressed protein; protein id: At1g32700.1,
  misc_feature (167)..(234): Homolog of NCBI NO: 18398555 NR Description: expressed protein; protein id: At1g32700.1,
  misc_feature (5)..(140): Homolog of NCBI NO: 21554139 NR Description: unknown [Arabidopsis thaliana]
  misc_feature (167)..(234): Homolog of NCBI NO: 21554139 NR Description: unknown [Arabidopsis thaliana]
  misc_feature (1)..(234): Homolog of NCBI NO: 38346725 NR Description: OSJNBa0086O06.23 [Oryza sativa (japonica
  misc_feature (1)..(182): Homolog of NCBI NO: 15237491 NR Description: putative protein; protein id: At5g46710.1, by cDNA: 42747. [Arabidopsis thaliana] gene_id:MZA15.12~pir||T05076~similar to unknown protein
  misc_feature (1)..(146): Homolog of NCBI NO: 37537092 NR Description: unknown protein [Oryza sativa (japonica
MGAGGPEEEENRWPPWLKPLLKEQFFVHCKFHGDSHKSECNMYCLDCTNGPLCSLCLAHHKDHRTIQIRRSSYHDVIRVNEIQKYLDIGGIQTYVINSAKVVFLNERPQPRPGKGVTNTCKVCYRSLVDDSFRFCSLGCKFHLTSPCISVNSFLILTFSMFLGNEIKIAGTSRGFEKGRENLLMETEDSSSSIAIGKNITNLQSFSPSTPPLTTSSNCRIVKRRKGIPHRSPMG

SEQ ID NO: 69772 - protein, 193 aa, Arabidopsis thaliana
  peptide (1)..(193): Ceres Seq. ID no. 1825628
  misc_feature (1)..(186): Pfam Name: Protein of unknown function, DUF597 Pfam Description: Protein of unknown function, DUF597
  misc_feature (126)..(193): Homolog of NCBI NO: 21554139 NR Description: unknown [Arabidopsis thaliana]
  misc_feature (1)..(193): Homolog of NCBI NO: 38346725 NR Description: OSJNBa0086O06.23 [Oryza sativa (japonica
  misc_feature (1)..(193): Homolog of NCBI NO: 15236696 NR Description: putative protein; protein id: At4g17900.1
  misc_feature (126)..(193): Homolog of NCBI NO: 6714272 NR Description: F6N18.8 [Arabidopsis thaliana]
  misc_feature (126)..(193): Homolog of NCBI NO: 18398555 NR Description: expressed protein; protein id: At1g32700.1,
  misc_feature (1)..(99): Homolog of NCBI NO: 21554139 NR Description: unknown [Arabidopsis thaliana]
  misc_feature (1)..(99): Homolog of NCBI NO: 18398555 NR Description: expressed protein; protein id: At1g32700.1,
  misc_feature (1)..(99): Homolog of NCBI NO: 6714272 NR Description: F6N18.8 [Arabidopsis thaliana]
  misc_feature (1)..(141): Homolog of NCBI NO: 15237491 NR Description: putative protein; protein id: At5g46710.1, by cDNA: 42747. [Arabidopsis thaliana] gene_id:MZA15.12~pir||T05076~similar to unknown protein
  misc_feature (1)..(105): Homolog of NCBI NO: 37537092 NR Description: unknown protein [Oryza sativa (japonica
MYCLDCTNGPLCSLCLAHHKDHRTIQIRRSSYHDVIRVNEIQKYLDIGGIQTYVINSAKVVFLNERPQPRPGKGVTNTCKVCYRSLVDDSFRFCSLGCKFHLTSPCISVNSFLILTFSMFLGNEIKIAGTSRGFEKGRENLLMETEDSSSSIAIGKNITNLQSFSPSTPPLTTSSNCRIVKRRKGIPHRSPMG

SEQ ID NO: 69773 - DNA, 3285 bp, Arabidopsis thaliana
  misc_feature (1)..(3285): Ceres Seq. ID no. 1825704
  misc_feature: MA Experiment ID: 20000234 Result: Up-regulated in Transcription
  misc_feature: MA Experiment 20000234 PARAMETER Experiment Name: At_Siliques_P Parameter: Age (day) Value: 21
  misc_feature: MA Experiment 20000234 PARAMETER Experiment Name: At_Siliques_P Parameter: Organism Value: A. thaliana
  misc_feature: MA Experiment 20000234 PARAMETER Experiment Name: At_Siliques_P Parameter: Plant Line Value: WS
  misc_feature: MA Experiment 20000234 PARAMETER Experiment Name: At_Siliques_P Parameter: Tissue Value: Less Than 5mm Siliques vs. Whole Plant
  misc_feature: MA Experiment ID: 20000264 Result: Up-regulated in Transcription
  misc_feature: MA Experiment 20000264 PARAMETER Experiment Name: At_Open_Flower_P Parameter: Age (day) Value: 21
  misc_feature: MA Experiment 20000264 PARAMETER Experiment Name: At_Open_Flower_P Parameter: Plant Line Value: WS
  misc_feature: MA Experiment 20000264 PARAMETER Experiment Name: At_Open_Flower_P Parameter: Tissue Value: Open Flower vs. Whole Plant
  misc_feature: MA Experiment ID: 20000265 Result: Up-regulated in Transcription
  misc_feature: MA Experiment 20000265 PARAMETER Experiment Name: At_Open_Flower_P Parameter: Age (day) Value: 21
  misc_feature: MA Experiment 20000265 PARAMETER Experiment Name: At_Open_Flower_P Parameter: Plant Line Value: WS
  misc_feature: MA Experiment 20000265 PARAMETER Experiment Name: At_Open_Flower_P Parameter: Tissue Value: Closed Flower vs. Whole Plant
  misc_feature: MA Experiment ID: 20000286 Result: Up-regulated in Transcription
  misc_feature: MA Experiment 20000286 PARAMETER Experiment Name: At_Open_Flower_P Parameter: Age (day) Value: 21
  misc_feature: MA Experiment 20000286 PARAMETER Experiment Name: At_Open_Flower_P Parameter: Plant Line Value: WS
  misc_feature: MA Experiment 20000286 PARAMETER Experiment Name: At_Open_Flower_P Parameter: Tissue Value: Half Open vs. Whole Plant
  misc_feature: MA Experiment ID: 20000794 Result: Up-regulated in Transcription
  misc_feature: MA Experiment 20000794 PARAMETER Experiment Name: At_Petals_P Parameter: Age (day) Value: 23-25 days
  misc_feature: MA Experiment 20000794 PARAMETER Experiment Name: At_Petals_P Parameter: Plant Line Value: WS
  misc_feature: MA Experiment 20000794 PARAMETER Experiment Name: At_Petals_P Parameter: Tissue Value: Petals vs. Whole plant
  misc_feature: Pfam Name: MatE Pfam Description: MatE
atgggtatttccgctcgtatcttcgccggacatctaggcagtacacaactagccgcggcatccatcggaaacagcagcttcagcctcgtttatgccctcatgttgggcatgggtagtgcggtcgagacactatgtggacaagcgtatggtgcccaccggtacgagatgcttgggatctatctccaaagagcaaccattgtccttgctctagttggctttcccatgacaatactatacactttttcgtacccgattcttctcctcttaggcgagcctaaaacggtatcatacatgggatctttatacatcgccggactcatccctcaaatcttcgcttacgccgtctacttcacggcccaaaagttcctccaggcccaaagcgtagtggccccgagtgcgtacatctcagccgccgccctcgtcctccagatatcgctgacgtggatcaccgtttacgcaatgggccaaggcctcatggcccaaacgttttacgttataactagcgtaaggtttaaagacacttggactggttttagctggaaatcgttacatggtctttggagcttctttaaactgtctgctggctctgcggtcatgatctgtttggaactgtggtatacacagattctggttcttctcgctggtttgcttaaagatcctgcactctctctagattctctatctatctgtatgtcaatttcagcattatcattcatggtctccgttggctttaatgctgctgtaagtgtacgtacaagtaatgagcttggagcaggaaatccgaaatcggcgttattctctacatggacagcgacttttgtatccttcgtgatctccgtcgtagaggcacttgtcgtgattgcgtcacgtgacaacgtcagctacattttcacgtcggatgctgacgtggctaaggccgtctctgacctatgtccttttctcgccgtcaccattattcttaacggaatccaacctgtcttgtccggagtggcagtgggatgtggatggcagacatacgtggcatatgtgaatattggttgttactatatagttggtattccaattggatgtattctcggcttcactttcaattttcaagcaaaggggatatggaccgggatgattggaggcaccctcatgcaaacactaatcttactttacgtcacgtatcaagcagattgggataaagagcaaaatgaattaagcaatgaaattgaaaaaaccttcattgccttcttcattgctctgcgccgtcccgccttgtctctctcaaattcgcttactcatccctcgcaggttagcttcttctaccattattgctttcgcattccttctggggtaagggtttcatcatcaactttcgccaatgcaaagcttgtaactttgagaaaccacactgttaatttgcacatatattactgttccatggctggtactgataaccgccgctctcgccacgacgacgaaagccctaaaaatcccaacaagaagaagaaaggaaaccgtaatccagaaaagagtctccttatcaatcttcattcatgttccaagagaaaggatctctcagctgcattggctctttatgatgcagctatcacttccagtgacattcgcctcaaccagcaacacttccaatcccttctttacctctgctccgcgttcattagtgacccatctcttcaaaccgttgccattgaccgtggctttcaaatttttgaccgtatggttagttctgggataagtcctaatgaatcatctgtcactgcagttgcacgactagctgctgccaagggtgatggagactatgctttcaagcttgttaaagaccttgttgctgttggtggtgtatcggtccctcgtctgagaacttatgctccggctttgctctgtttctgtgatactttggaggctgaaaagggttatgaagtggaagatcacatggatgcttcaggtattgtgttggaggaggcagagatctcggctttgctaaagaagttaagagaatgtgttggctgcgttagtgaagaaacttcaaaagcaatcgaggaatggttttatggagtgaaagctagcgaagttagtgataatgggattggttctgatattgagctgcttagagcagctgttttgaaaaatgggggtgggtggcatggtcttgggtgggttggagaaggcaaatggattgtgaagaaaggtaatgttagctcagccgggaaatgtttgagctgtgatgagcatttggcttgtgttgataccaatgaggtagagactgaagattttgtgaattctttggtgactttggctatggagaggaaggcaaagatgaattcatgcgagcctatggcggatttcagtgagtttcaggagtggcttgaaaagcatggagattacgaagctatactagatggagcaaatattgggctctaccaacaaaattttgcagatggtggtttcagtctaccacagattttaagtcaattttcgactaaacgactaacttatgatatttccaaacgatttttcttatttggatggaaaaggttgaatcagcagaatcaagacatcatgaactcacctcctccttcttctaatgatggcttggcgaagcgaaaaagaggtcgaccgcgcaaagatgaaaactcaactccaaaaccggacatgaatttggtaggtaaggtggttactggtgtaatcgaaggatctttcgacgcaggctatctccttaacgttaaggttaaagacagtgacacccaactcagaggtctcgtgttcatacggggcagagtcactccgatcactccagaaaacgacgtggctcctcttgttaaaatgtacggaagagaagatatcaagaacaaccaaaccgatcattctttccctactgatcaaccaatgcaagatgctgctgtcactactactgacatggatatttctgaatcctctcgagctttggtcgtagttccacaagcgaccaatggccaagcgaaggaagctacgaaggatgaagatggagtcattgaaggacaagctgacactcggttagtggagttttttccaactccaggcacaatgatgatgactgctcaaccaaatcttgtcttggtaccgaaagagacagaacaacagaaaacaactggtgggagtcatggattcgatcttatggaagaggaaccagttcgtcaaggagagaagttgccagaggagctattacatctagagcttggaaacaagacaacattgagtgtagacaacaacatctctacaacagaggcgcctgatctataa

SEQ ID NO: 69774 - protein, 1094 aa, Arabidopsis thaliana
  peptide (1)..(1094): Ceres Seq. ID no. 1825705
  misc_feature: Pfam Name: MatE Pfam Description: MatE
  misc_feature (1)..(406): Homolog of NCBI NO: 18415793 NR Description: putative protein; protein id: At4g21910.1 thaliana] >gi|15809935|gb|AAL06895.1| AT4g21910/T8O5_120 thaliana] >gi|22137012|gb|AAM91351.1| At4g21910/T8O5_120
  misc_feature (1)..(406): Homolog of NCBI NO: 21553843 NR Description: unknown [Arabidopsis thaliana]
  misc_feature (1)..(377): Homolog of NCBI NO: 7487826 NR Description: hypothetical protein T8O5.120 - Arabidopsis >gi|2894569|emb|CAA17158.1| putative protein [Arabidopsis >gi|7269036|emb|CAB79146.1| putative protein [Arabidopsis
  misc_feature (476)..(827): Homolog of NCBI NO: 25370696 NR Description: hypothetical protein At2g16650 [imported] - thaliana >gi|4581132|gb|AAD24622.1| hypothetical protein
  misc_feature (476)..(825): Homolog of NCBI NO: 30679721 NR Description: expressed protein [Arabidopsis thaliana]
  misc_feature (1)..(407): Homolog of NCBI NO: 15221073 NR Description: unknown protein; protein id: At1g11670.1
  misc_feature (1)..(407): Homolog of NCBI NO: 18407368 NR Description: expressed protein; protein id: At1g61890.1, by cDNA: gi_13272458, supported by cDNA: gi_15028186, supported cDNA: gi_15081772, supported by cDNA: gi_16209723 [Arabidopsis
  misc_feature (1)..(407): Homolog of NCBI NO: 15081773 NR Description: At1g61890/F8K4_9 [Arabidopsis thaliana]
  misc_feature (1)..(407): Homolog of NCBI NO: 22655139 NR Description: unknown protein [Arabidopsis thaliana]
  misc_feature (1)..(407): Homolog of NCBI NO: 15233127 NR Description: integral membrane protein, putative; protein id: supported by cDNA: gi_20466555 [Arabidopsis thaliana] gb|AAC28507.1~gene_id:MIL23.25~strong similarity to unknown
MGISARIFAGHLGSTQLAAASIGNSSFSLVYALMLGMGSAVETLCGQAYGAHRYEMLGIYLQRATIVLALVGFPMTILYTFSYPILLLLGEPKTVSYMGSLYIAGLIPQIFAYAVYFTAQKFLQAQSVVAPSAYISAAALVLQISLTWITVYAMGQGLMAQTFYVITSVRFKDTWTGFSWKSLHGLWSFFKLSAGSAVMICLELWYTQILVLLAGLLKDPALSLDSLSICMSISALSFMVSVGFNAAVSVRTSNELGAGNPKSALFSTWTATFVSFVISVVEALVVIASRDNVSYIFTSDADVAKAVSDLCPFLAVTIILNGIQPVLSGVAVGCGWQTYVAYVNIGCYYIVGIPIGCILGFTFNFQAKGIWTGMIGGTLMQTLILLYVTYQADWDKEQNELSNEIEKTFIAFFIALRRPALSLSNSLTHPSQVSFFYHYCFRIPSGVRVSSSTFANAKLVTLRNHTVNLHIYYCSMAGTDNRRSRHDDESPKNPNKKKKGNRNPEKSLLINLHSCSKRKDLSAALALYDAAITSSDIRLNQQHFQSLLYLCSAFISDPSLQTVAIDRGFQIFDRMVSSGISPNESSVTAVARLAAAKGDGDYAFKLVKDLVAVGGVSVPRLRTYAPALLCFCDTLEAEKGYEVEDHMDASGIVLEEAEISALLKKLRECVGCVSEETSKAIEEWFYGVKASEVSDNGIGSDIELLRAAVLKNGGGWHGLGWVGEGKWIVKKGNVSSAGKCLSCDEHLACVDTNEVETEDFVNSLVTLAMERKAKMNSCEPMADFSEFQEWLEKHGDYEAILDGANIGLYQQNFADGGFSLPQILSQFSTKRLTYDISKRFFLFGWKRLNQQNQDIMNSPPPSSNDGLAKRKRGRPRKDENSTPKPDMNLVGKVVTGVIEGSFDAGYLLNVKVKDSDTQLRGLVFIRGRVTPITPENDVAPLVKMYGREDIKNNQTDHSFPTDQPMQDAAVTTTDMDISESSRALVVVPQATNGQAKEATKDEDGVIEGQADTRLVEFFPTPGTMMMTAQPNLVLVPKETEQQKTTGGSHGFDLMEEEPVRQGEKLPEELLHLELGNKTTLSVDNNISTTEAPDL

SEQ ID NO: 69775 - protein, 1061 aa, Arabidopsis thaliana
  peptide (1)..(1061): Ceres Seq. ID no. 1825706
  misc_feature: Pfam Name: MatE Pfam Description: MatE
  misc_feature (1)..(373): Homolog of NCBI NO: 18415793 NR Description: putative protein; protein id: At4g21910.1 thaliana] >gi|15809935|gb|AAL06895.1| AT4g21910/T8O5_120 thaliana] >gi|22137012|gb|AAM91351.1| At4g21910/T8O5_120
  misc_feature (1)..(373): Homolog of NCBI NO: 21553843 NR Description: unknown [Arabidopsis thaliana]
  misc_feature (1)..(344): Homolog of NCBI NO: 7487826 NR Description: hypothetical protein T8O5.120 - Arabidopsis >gi|2894569|emb|CAA17158.1| putative protein [Arabidopsis >gi|7269036|emb|CAB79146.1| putative protein [Arabidopsis
  misc_feature (443)..(794): Homolog of NCBI NO: 25370696 NR Description: hypothetical protein At2g16650 [imported] - thaliana >gi|4581132|gb|AAD24622.1| hypothetical protein
  misc_feature (443)..(792): Homolog of NCBI NO: 30679721 NR Description: expressed protein [Arabidopsis thaliana]
  misc_feature (1)..(374): Homolog of NCBI NO: 15221073 NR Description: unknown protein; protein id: At1g11670.1
  misc_feature (1)..(374): Homolog of NCBI NO: 18407368 NR Description: expressed protein; protein id: At1g61890.1, by cDNA: gi_13272458, supported by cDNA: gi_15028186, supported cDNA: gi_15081772, supported by cDNA: gi_16209723 [Arabidopsis
  misc_feature (1)..(374): Homolog of NCBI NO: 15081773 NR Description: At1g61890/F8K4_9 [Arabidopsis thaliana]
  misc_feature (1)..(374): Homolog of NCBI NO: 22655139 NR Description: unknown protein [Arabidopsis thaliana]
  misc_feature (1)..(374): Homolog of NCBI NO: 15233127 NR Description: integral membrane protein, putative; protein id: supported by cDNA: gi_20466555 [Arabidopsis thaliana] gb|AAC28507.1~gene_id:MIL23.25~strong similarity to unknown
MLGMGSAVETLCGQAYGAHRYEMLGIYLQRATIVLALVGFPMTILYTFSYPILLLLGEPKTVSYMGSLYIAGLIPQIFAYAVYFTAQKFLQAQSVVAPSAYISAAALVLQISLTWITVYAMGQGLMAQTFYVITSVRFKDTWTGFSWKSLHGLWSFFKLSAGSAVMICLELWYTQILVLLAGLLKDPALSLDSLSICMSISALSFMVSVGFNAAVSVRTSNELGAGNPKSALFSTWTATFVSFVISVVEALVVIASRDNVSYIFTSDADVAKAVSDLCPFLAVTIILNGIQPVLSGVAVGCGWQTYVAYVNIGCYYIVGIPIGCILGFTFNFQAKGIWTGMIGGTLMQTLILLYVTYQADWDKEQNELSNEIEKTFIAFFIALRRPALSLSNSLTHPSQVSFFYHYCFRIPSGVRVSSSTFANAKLVTLRNHTVNLHIYYCSMAGTDNRRSRHDDESPKNPNKKKKGNRNPEKSLLINLHSCSKRKDLSAALALYDAAITSSDIRLNQQHFQSLLYLCSAFISDPSLQTVAIDRGFQIFDRMVSSGISPNESSVTAVARLAAAKGDGDYAFKLVKDLVAVGGVSVPRLRTYAPALLCFCDTLEAEKGYEVEDHMDASGIVLEEAEISALLKKLRECVGCVSEETSKAIEEWFYGVKASEVSDNGIGSDIELLRAAVLKNGGGWHGLGWVGEGKWIVKKGNVSSAGKCLSCDEHLACVDTNEVETEDFVNSLVTLAMERKAKMNSCEPMADFSEFQEWLEKHGDYEAILDGANIGLYQQNFADGGFSLPQILSQFSTKRLTYDISKRFFLFGWKRLNQQNQDIMNSPPPSSNDGLAKRKRGRPRKDENSTPKPDMNLVGKVVTGVIEGSFDAGYLLNVKVKDSDTQLRGLVFIRGRVTPITPENDVAPLVKMYGREDIKNNQTDHSFPTDQPMQDAAVTTTDMDISESSRALVVVPQATNGQAKEATKDEDGVIEGQADTRLVEFFPTPGTMMMTAQPNLVLVPKETEQQKTTGGSHGFDLMEEEPVRQGEKLPEELLHLELGNKTTLSVDNNISTTEAPDL

SEQ ID NO: 69776 - protein, 1058 aa, Arabidopsis thaliana
  peptide (1)..(1058): Ceres Seq. ID no. 1825707
  misc_feature: Pfam Name: MatE Pfam Description: MatE
  misc_feature (1)..(370): Homolog of NCBI NO: 18415793 NR Description: putative protein; protein id: At4g21910.1 thaliana] >gi|15809935|gb|AAL06895.1| AT4g21910/T8O5_120 thaliana] >gi|22137012|gb|AAM91351.1| At4g21910/T8O5_120
  misc_feature (1)..(370): Homolog of NCBI NO: 21553843 NR Description: unknown [Arabidopsis thaliana]
  misc_feature (1)..(341): Homolog of NCBI NO: 7487826 NR Description: hypothetical protein T8O5.120 - Arabidopsis >gi|2894569|emb|CAA17158.1| putative protein [Arabidopsis >gi|7269036|emb|CAB79146.1| putative protein [Arabidopsis
  misc_feature (440)..(791): Homolog of NCBI NO: 25370696 NR Description: hypothetical protein At2g16650 [imported] - thaliana >gi|4581132|gb|AAD24622.1| hypothetical protein
  misc_feature (440)..(789): Homolog of NCBI NO: 30679721 NR Description: expressed protein [Arabidopsis thaliana]
  misc_feature (1)..(371): Homolog of NCBI NO: 15221073 NR Description: unknown protein; protein id: At1g11670.1
  misc_feature (1)..(371): Homolog of NCBI NO: 18407368 NR Description: expressed protein; protein id: At1g61890.1, by cDNA: gi_13272458, supported by cDNA: gi_15028186, supported cDNA: gi_15081772, supported by cDNA: gi_16209723 [Arabidopsis
  misc_feature (1)..(371): Homolog of NCBI NO: 15081773 NR Description: At1g61890/F8K4_9 [Arabidopsis thaliana]
  misc_feature (1)..(371): Homolog of NCBI NO: 22655139 NR Description: unknown protein [Arabidopsis thaliana]
  misc_feature (1)..(371): Homolog of NCBI NO: 15233127 NR Description: integral membrane protein, putative; protein id: supported by cDNA: gi_20466555 [Arabidopsis thaliana] gb|AAC28507.1~gene_id:MIL23.25~strong similarity to unknown
MGSAVETLCGQAYGAHRYEMLGIYLQRATIVLALVGFPMTILYTFSYPILLLLGEPKTVSYMGSLYIAGLIPQIFAYAVYFTAQKFLQAQSVVAPSAYISAAALVLQISLTWITVYAMGQGLMAQTFYVITSVRFKDTWTGFSWKSLHGLWSFFKLSAGSAVMICLELWYTQILVLLAGLLKDPALSLDSLSICMSISALSFMVSVGFNAAVSVRTSNELGAGNPKSALFSTWTATFVSFVISVVEALVVIASRDNVSYIFTSDADVAKAVSDLCPFLAVTIILNGIQPVLSGVAVGCGWQTYVAYVNIGCYYIVGIPIGCILGFTFNFQAKGIWTGMIGGTLMQTLILLYVTYQADWDKEQNELSNEIEKTFIAFFIALRRPALSLSNSLTHPSQVSFFYHYCFRIPSGVRVSSSTFANAKLVTLRNHTVNLHIYYCSMAGTDNRRSRHDDESPKNPNKKKKGNRNPEKSLLINLHSCSKRKDLSAALALYDAAITSSDIRLNQQHFQSLLYLCSAFISDPSLQTVAIDRGFQIFDRMVSSGISPNESSVTAVARLAAAKGDGDYAFKLVKDLVAVGGVSVPRLRTYAPALLCFCDTLEAEKGYEVEDHMDASGIVLEEAEISALLKKLRECVGCVSEETSKAIEEWFYGVKASEVSDNGIGSDIELLRAAVLKNGGGWHGLGWVGEGKWIVKKGNVSSAGKCLSCDEHLACVDTNEVETEDFVNSLVTLAMERKAKMNSCEPMADFSEFQEWLEKHGDYEAILDGANIGLYQQNFADGGFSLPQILSQFSTKRLTYDISKRFFLFGWKRLNQQNQDIMNSPPPSSNDGLAKRKRGRPRKDENSTPKPDMNLVGKVVTGVIEGSFDAGYLLNVKVKDSDTQLRGLVFIRGRVTPITPENDVAPLVKMYGREDIKNNQTDHSFPTDQPMQDAAVTTTDMDISESSRALVVVPQATNGQAKEATKDEDGVIEGQADTRLVEFFPTPGTMMMTAQPNLVLVPKETEQQKTTGGSHGFDLMEEEPVRQGEKLPEELLHLELGNKTTLSVDNNISTTEAPDL

SEQ ID NO: 69777 - DNA, 3222 bp, Arabidopsis thaliana
  misc_feature (1)..(3222): Ceres Seq. ID no. 1825766
  misc_feature: MA Experiment ID: 20000173 Result: Down-regulated in Transcription
  misc_feature: MA Experiment 20000173 PARAMETER Experiment Name: At_42deg_Heat_P Parameter: Age (day) Value: 14
  misc_feature: MA Experiment 20000173 PARAMETER Experiment Name: At_42deg_Heat_P Parameter: Organism Value: A. thaliana
  misc_feature: MA Experiment 20000173 PARAMETER Experiment Name: At_42deg_Heat_P Parameter: Plant Line Value: WS
  misc_feature: MA Experiment 20000173 PARAMETER Experiment Name: At_42deg_Heat_P Parameter: Temperature (deg C) Value: 42 vs. 22
  misc_feature: MA Experiment 20000173 PARAMETER Experiment Name: At_42deg_Heat_P Parameter: Timepoint (hr) Value: 6
  misc_feature: MA Experiment 20000173 PARAMETER Experiment Name: At_42deg_Heat_P Parameter: Tissue Value: Aerial
  misc_feature: MA Experiment ID: 20000496 Result: Up-regulated in Transcription
  misc_feature: MA Experiment 20000496 PARAMETER Experiment Name: At_Guard_Cells_P Parameter: Harvest Date Value: 7/19/2002
  misc_feature: MA Experiment 20000496 PARAMETER Experiment Name: At_Guard_Cells_P Parameter: Organism Value: Canola
  misc_feature: MA Experiment 20000496 PARAMETER Experiment Name: At_Guard_Cells_P Parameter: Tissue Value: Guard Cells vs. Leaves
atgcaacttgtggaggggggactagagaatgatgtagtttttgctctagttgttttctcgttgcagtatattcttgctagccatgagtattggaaatacaatcatggaaatatgcgttggaaagtgacactaaaagtcatcgagttgatgaaaacgtgtctcagattcagtaaattctccacaaagctgagggatgttctccttgatattttactgaacgatgcctctgttcacagtgctcttttcagaataatttgtacgactacgcaaaatttagagactatacaggtttgtgctgctcaagtgctgtcaaagttatttgccttggcagaatcatcacaactctatataataagcaatgcaggctttggtctagacaataaacagcctgctcttttagtggccatatttgattcagacgaagactcagattctagcaacgtaaaacagtcgcgcaaagatgcctcctcaattcctgactgggcttgtaaatctcgcttactgcacactatcctgcaatatgtagagagagcaaccgattttgtcgatagacacacagatatattactgggtttacttgatttcctgaaaaccctttggcaagaggctggccaatacgcaaatatgctggaaccgtttaaggcgtcaaaaaagttgtggcaggaattttccgacattatatcacaggcttctaagataaaagattcgacggttggaagtttaggcaaggaagaaatctcgaaattgttagtgaaatatcagtgtcaggcttctgttttggaaattatggcttgcaacatgtttttgtacaagaagttgctgtttgcggagtcacttaaaaagccatgtgtggagactaaaaagacagcaagtaatggagtatctccacccaaattaacttggacagctgattcagatcccaaggatatcttttcaaaatggtgtgacatatctgttttggatggcattatccagtcagtttcttccttagatggtgaaagtgaaataaacttccaagcaaaggcacgaaaacttgagggtcgtgatatcccaactggtcctttcaaagagcttttccagtttctagtggagacgagcttttgggagaaatataaacagaaaactaataaggatgtaaatatggctttgggggactgtttgtttgacactcagcaaatacagactgaattaggtattgatatttgggatttctctgagtggaagacatctaaaacaacggcagaggaaatgttgaactacatgcagagagcaaactcgatggttttactctcaacttcgcagctctctgttttgcatgcattgatttccgtcttgatactttatgaggataatatttcggtacatctaaatgctacaccttatgtgcagtctcttgaagaaagtgcagctgcggaaaggaaaatcccttctcgagtcactcttttaagcattgataaagtatgccgaaaattttgcaccacggttgattcacttgcctctctctgggatgcacccaagattgtgtttgatattcttacagcacaggcagacttgctatcccgcctattgaaatccgcaaagaaaaatctttcattatctgtatgtgcacttgtcctgagaaatgttgggcctggcctcaagatccttggtagtttgaggcattcaaatgctatattgaagaagacgataaacctcctgcttgaggtgctgctcctggttgtgggttttggttcagacaactcaaactcgagtgggatgggacatatggtgctagccaaagattttgcagaaatatctgatgctacaattggattattaccccttctctgcaacttcatggggaatcccgagtacttgactctctgcctgaccacagtagacttgattctcaggaattttttgacgccagagacatggttccctattatacagagtcaactccgcttgcagcatgttattctacagcttcaggataagaaatccacaacatccgtttcagcaatactaaaatttttcttaactattgctcaagttcatggcggtgctcagatgcttctaaattctggatttttctcgactttaagagctttgttaatggagtttccggatggaatgtctactttggtatctgacaatgaaaagggctcgctgctagaaaagacagaaaaaactcagcatatctggggaatcggtttggctgtggttactgccatggttcattctctaggatctgtttctgcaggggctgatattgtggagagtgtcatatcttactttttcttggagaaaggttacatgatctcatactatctcgctgcaccagatttcccttctgatgatcgtgacaaagtgaggctacgaagtcaacggacgtggacttcccttgcttatctgagagtaaccgagcatactctccttctgctgtgtgcattagctagccattggagatcatgggttaaaattatgaaggatatggattctccattaagagaaatgacaatacatctcttggcctttatcagcaaaggcgctcaacggcttagagagtctcagagccacatatctcatctgttatgccctccagtagcgaaagaagagtttgattcctgcaaaagaccgtctttcatcaataccaaacacggatggttttcgctagcacctttagtttgtgttgggaaacccaagatcactgcagtatctatctcgactgctctagttgttaggggagacacaacagaacatcctgggtctgttcctcaatcgcaattttcagactcagttgcgatacagatatatagagtggcttctctattgttgaaatttctgtgcttacaagcagagggtgttgttacgagggcagaggaagtgggatatgtcgatattgctcatttccctgagcttccagagccggagattttacatggtctacaggaccaagcgacggcgatagtcgctgagctatgtgataattacaaatccaaagagattccagatgaagtaaagaagttgtgccttatgctgatccaaacgacagagatgtcgttatacttggaactctgtgtagttcaggtttgcaggatccatcctgtatttgggcgtgtggataacttctccaaagacttgaaaaaactagtgaaagctgctgaggtgcatacctacttagaaccgtccatagattcactgaagaaaatagctgcgtttctgtatcctggatcactttag

SEQ ID NO: 69778 - protein, 1073 aa, Arabidopsis thaliana
  peptide (1)..(1073): Ceres Seq. ID no. 1825767
  misc_feature (342)..(1058): Homolog of NCBI NO: 21306600 NR Description: Hypothetical protein [Oryza sativa (japonica
  misc_feature (142)..(341): Homolog of NCBI NO: 21306600 NR Description: Hypothetical protein [Oryza sativa (japonica
  misc_feature (3)..(93): Homolog of NCBI NO: 21306600 NR Description: Hypothetical protein [Oryza sativa (japonica
  misc_feature (142)..(344): Homolog of NCBI NO: 37531198 NR Description: hypothetical protein [Oryza sativa (japonica group)] >gi|20177643|gb|AAM14698.1| Hypothetical protein [Oryza
  misc_feature (3)..(93): Homolog of NCBI NO: 37531198 NR Description: hypothetical protein [Oryza sativa (japonica group)] >gi|20177643|gb|AAM14698.1| Hypothetical protein [Oryza
MQLVEGGLENDVVFALVVFSLQYILASHEYWKYNHGNMRWKVTLKVIELMKTCLRFSKFSTKLRDVLLDILLNDASVHSALFRIICTTTQNLETIQVCAAQVLSKLFALAESSQLYIISNAGFGLDNKQPALLVAIFDSDEDSDSSNVKQSRKDASSIPDWACKSRLLHTILQYVERATDFVDRHTDILLGLLDFLKTLWQEAGQYANMLEPFKASKKLWQEFSDIISQASKIKDSTVGSLGKEEISKLLVKYQCQASVLEIMACNMFLYKKLLFAESLKKPCVETKKTASNGVSPPKLTWTADSDPKDIFSKWCDISVLDGIIQSVSSLDGESEINFQAKARKLEGRDIPTGPFKELFQFLVETSFWEKYKQKTNKDVNMALGDCLFDTQQIQTELGIDIWDFSEWKTSKTTAEEMLNYMQRANSMVLLSTSQLSVLHALISVLILYEDNISVHLNATPYVQSLEESAAAERKIPSRVTLLSIDKVCRKFCTTVDSLASLWDAPKIVFDILTAQADLLSRLLKSAKKNLSLSVCALVLRNVGPGLKILGSLRHSNAILKKTINLLLEVLLLVVGFGSDNSNSSGMGHMVLAKDFAEISDATIGLLPLLCNFMGNPEYLTLCLTTVDLILRNFLTPETWFPIIQSQLRLQHVILQLQDKKSTTSVSAILKFFLTIAQVHGGAQMLLNSGFFSTLRALLMEFPDGMSTLVSDNEKGSLLEKTEKTQHIWGIGLAVVTAMVHSLGSVSAGADIVESVISYFFLEKGYMISYYLAAPDFPSDDRDKVRLRSQRTWTSLAYLRVTEHTLLLLCALASHWRSWVKIMKDMDSPLREMTIHLLAFISKGAQRLRESQSHISHLLCPPVAKEEFDSCKRPSFINTKHGWFSLAPLVCVGKPKITAVSISTALVVRGDTTEHPGSVPQSQFSDSVAIQIYRVASLLLKFLCLQAEGVVTRAEEVGYVDIAHFPELPEPEILHGLQDQATAIVAELCDNYKSKEIPDEVKKLCLMLIQTTEMSLYLELCVVQVCRIHPVFGRVDNFSKDLKKLVKAAEVHTYLEPSIDSLKKIAAFLYPGSL

SEQ ID NO: 69779 - protein, 1036 aa, Arabidopsis thaliana
  peptide (1)..(1036): Ceres Seq. ID no. 1825768
  misc_feature (305)..(1021): Homolog of NCBI NO: 21306600 NR Description: Hypothetical protein [Oryza sativa (japonica
  misc_feature (105)..(304): Homolog of NCBI NO: 21306600 NR Description: Hypothetical protein [Oryza sativa (japonica
  misc_feature (1)..(56): Homolog of NCBI NO: 21306600 NR Description: Hypothetical protein [Oryza sativa (japonica
  misc_feature (105)..(307): Homolog of NCBI NO: 37531198 NR Description: hypothetical protein [Oryza sativa (japonica group)] >gi|20177643|gb|AAM14698.1| Hypothetical protein [Oryza
  misc_feature (1)..(56): Homolog of NCBI NO: 37531198 NR Description: hypothetical protein [Oryza sativa (japonica group)] >gi|20177643|gb|AAM14698.1| Hypothetical protein [Oryza
MRWKVTLKVIELMKTCLRFSKFSTKLRDVLLDILLNDASVHSALFRIICTTTQNLETIQVCAAQVLSKLFALAESSQLYIISNAGFGLDNKQPALLVAIFDSDEDSDSSNVKQSRKDASSIPDWACKSRLLHTILQYVERATDFVDRHTDILLGLLDFLKTLWQEAGQYANMLEPFKASKKLWQEFSDIISQASKIKDSTVGSLGKEEISKLLVKYQCQASVLEIMACNMFLYKKLLFAESLKKPCVETKKTASNGVSPPKLTWTADSDPKDIFSKWCDISVLDGIIQSVSSLDGESEINFQAKARKLEGRDIPTGPFKELFQFLVETSFWEKYKQKTNKDVNMALGDCLFDTQQIQTELGIDIWDFSEWKTSKTTAEEMLNYMQRANSMVLLSTSQLSVLHALISVLILYEDNISVHLNATPYVQSLEESAAAERKIPSRVTLLSIDKVCRKFCTTVDSLASLWDAPKIVFDILTAQADLLSRLLKSAKKNLSLSVCALVLRNVGPGLKILGSLRHSNAILKKTINLLLEVLLLVVGFGSDNSNSSGMGHMVLAKDFAEISDATIGLLPLLCNFMGNPEYLTLCLTTVDLILRNFLTPETWFPIIQSQLRLQHVILQLQDKKSTTSVSAILKFFLTIAQVHGGAQMLLNSGFFSTLRALLMEFPDGMSTLVSDNEKGSLLEKTEKTQHIWGIGLAVVTAMVHSLGSVSAGADIVESVISYFFLEKGYMISYYLAAPDFPSDDRDKVRLRSQRTWTSLAYLRVTEHTLLLLCALASHWRSWVKIMKDMDSPLREMTIHLLAFISKGAQRLRESQSHISHLLCPPVAKEEFDSCKRPSFINTKHGWFSLAPLVCVGKPKITAVSISTALVVRGDTTEHPGSVPQSQFSDSVAIQIYRVASLLLKFLCLQAEGVVTRAEEVGYVDIAHFPELPEPEILHGLQDQATAIVAELCDNYKSKEIPDEVKKLCLMLIQTTEMSLYLELCVVQVCRIHPVFGRVDNFSKDLKKLVKAAEVHTYLEPSIDSLKKIAAFLYPGSL

SEQ ID NO: 69780 - protein, 1024 aa, Arabidopsis thaliana
  peptide (1)..(1024): Ceres Seq. ID no. 1825769
  misc_feature (293)..(1009): Homolog of NCBI NO: 21306600 NR Description: Hypothetical protein [Oryza sativa (japonica
  misc_feature (93)..(292): Homolog of NCBI NO: 21306600 NR Description: Hypothetical protein [Oryza sativa (japonica
  misc_feature (1)..(44): Homolog of NCBI NO: 21306600 NR Description: Hypothetical protein [Oryza sativa (japonica
  misc_feature (93)..(295): Homolog of NCBI NO: 37531198 NR Description: hypothetical protein [Oryza sativa (japonica group)] >gi|20177643|gb|AAM14698.1| Hypothetical protein [Oryza
  misc_feature (1)..(44): Homolog of NCBI NO: 37531198 NR Description: hypothetical protein [Oryza sativa (japonica group)] >gi|20177643|gb|AAM14698.1| Hypothetical protein [Oryza
MKTCLRFSKFSTKLRDVLLDILLNDASVHSALFRIICTTTQNLETIQVCAAQVLSKLFALAESSQLYIISNAGFGLDNKQPALLVAIFDSDEDSDSSNVKQSRKDASSIPDWACKSRLLHTILQYVERATDFVDRHTDILLGLLDFLKTLWQEAGQYANMLEPFKASKKLWQEFSDIISQASKIKDSTVGSLGKEEISKLLVKYQCQASVLEIMACNMFLYKKLLFAESLKKPCVETKKTASNGVSPPKLTWTADSDPKDIFSKWCDISVLDGIIQSVSSLDGESEINFQAKARKLEGRDIPTGPFKELFQFLVETSFWEKYKQKTNKDVNMALGDCLFDTQQIQTELGIDIWDFSEWKTSKTTAEEMLNYMQRANSMVLLSTSQLSVLHALISVLILYEDNISVHLNATPYVQSLEESAAAERKIPSRVTLLSIDKVCRKFCTTVDSLASLWDAPKIVFDILTAQADLLSRLLKSAKKNLSLSVCALVLRNVGPGLKILGSLRHSNAILKKTINLLLEVLLLVVGFGSDNSNSSGMGHMVLAKDFAEISDATIGLLPLLCNFMGNPEYLTLCLTTVDLILRNFLTPETWFPIIQSQLRLQHVILQLQDKKSTTSVSAILKFFLTIAQVHGGAQMLLNSGFFSTLRALLMEFPDGMSTLVSDNEKGSLLEKTEKTQHIWGIGLAVVTAMVHSLGSVSAGADIVESVISYFFLEKGYMISYYLAAPDFPSDDRDKVRLRSQRTWTSLAYLRVTEHTLLLLCALASHWRSWVKIMKDMDSPLREMTIHLLAFISKGAQRLRESQSHISHLLCPPVAKEEFDSCKRPSFINTKHGWFSLAPLVCVGKPKITAVSISTALVVRGDTTEHPGSVPQSQFSDSVAIQIYRVASLLLKFLCLQAEGVVTRAEEVGYVDIAHFPELPEPEILHGLQDQATAIVAELCDNYKSKEIPDEVKKLCLMLIQTTEMSLYLELCVVQVCRIHPVFGRVDNFSKDLKKLVKAAEVHTYLEPSIDSLKKIAAFLYPGSL

SEQ ID NO: 69781 - DNA, 1638 bp, Arabidopsis thaliana
  misc_feature (1)..(1638): Ceres Seq. ID no. 1825800
  misc_feature: MA Experiment ID: 20000184 Result: Down-regulated in Transcription
  misc_feature: MA Experiment 20000184 PARAMETER Experiment Name: At_Shoots__P Parameter: Age (day) Value: 7
  misc_feature: MA Experiment 20000184 PARAMETER Experiment Name: At_Shoots__P Parameter: Tissue Value: Shoots vs. Whole Plant
atgaaaatctccaaatctctctggagtgttatgatttctattctcttctatcttacttctgctccaccatttgtgatttgctcatctcttgaagtcaccattgataaccattcaccaagcaatctcaagactaaaggatccctagaacaagataagttgagtcatcaaatgataaatagcataaagcttcatggcattctcttatgggtttccatgggctttcttatgccagtggggattctcttcattagaatggccaataaagctcatgaaaatggaataaaagttaaagtgttcttctaccttcatgtcattttccagatactggcagtagttttagcaacaataggagctatactgtctttaagaacattggagaactcttttgacaacaaccatcaaagacttggtttggctctttatgctgccatgtggctccaattcttgaccggtgtcttcaagccctcaagagggagcaaaaggaggttaagatggttcttattgcattggatacttggaacaatagtgtcaatagttggcatagtaaacatatacacaggcatacaagcttatcaaaagaagacatcattaagtagagactcaagtctttggacaatcttgttcacagttcaagtcacttgtcttgtcttcttctatctatatcaagacaaatgggaacattttcaaaagcaaagagttgttcttgacgaattggatcatcaaaataataacacaaatggaagaaataaccaaagcatccaagtggtaacgagaaatgatcatgaacaaaaggtcatggttcctcagccttgtcgcaaaagtaatgcacttatttgtagagaacgagagagagaggagaacaaaatggtaggcgaagaggagacgaagaagagagtagtcactgaatcgctaggatggttaacggaatcttcgattatgccaaagaagcatcgcgccatcgaaggtgttggtccttcctcaatcatggagcttaaagctcagctctataagtctcaggaggaagctaaacagacaaaggattttacgggatccgatgctcaataccatcgcgccaaagaaaggattgccgccaaagattctttcgccgcgaaaaactccggcgtcgaaagtcgcaatttaaaggacaagcttgagcacaaagctgtaaaagatggagcagttagttatgccgcattggagaaaaaggctcagttgtatgataaacttgctagaggagagctttctgatgaagaaggtgaagagaagtactgtgttgacttctttaggaaaggaattcaacatgaagatccaaaaccatcaagcacttacaacagttccatttcagcaccacctgaagatttcaagcaagatggtgaagatgatggttcgctttttagcaccaaatttgctggacttggacatgcaattgggacagctgatgtaggtcaacacgtgcgcatggtcagggaggttcatgaggaagtcaatcaagcgagagaaaaggcaaccgagttaaagcaaaggagacaagagcaagcaacaaatcgtcgggagaaactcaaacaagcttatcttcggaagcagctcgagaaactaaaggctcaacaacaacaacaagaagatgaacaaaaaacttga

SEQ ID NO: 69782 - protein, 545 aa, Arabidopsis thaliana
  peptide (1)..(545): Ceres Seq. ID no. 1825801
  misc_feature (1)..(545): Homolog of NCBI NO: 15236824 NR Description: unknown protein; protein id: At4g18260.1
  misc_feature (289)..(545): Homolog of NCBI NO: 26452652 NR Description: unknown protein [Arabidopsis thaliana]
  misc_feature (10)..(255): Homolog of NCBI NO: 15224584 NR Description: hypothetical protein; protein id: At2g30890.1
  misc_feature (268)..(441): Homolog of NCBI NO: 34910918 NR Description: OSJNBb0063G05.4 [Oryza sativa (japonica
  misc_feature (433)..(537): Homolog of NCBI NO: 34910918 NR Description: OSJNBb0063G05.4 [Oryza sativa (japonica
  misc_feature (313)..(544): Homolog of NCBI NO: 26333485 NR Description: unnamed protein product [Mus musculus]
  misc_feature (157)..(243): Homolog of NCBI NO: 34910922 NR Description: OSJNBb0063G05.6 [Oryza sativa (japonica
  misc_feature (313)..(544): Homolog of NCBI NO: 29835270 NR Description: RIKEN cDNA C130022K22 gene [Mus musculus]
  misc_feature (313)..(544): Homolog of NCBI NO: 34857683 NR Description: similar to RIKEN cDNA C130022K22 gene [Rattus
  misc_feature (38)..(231): Homolog of NCBI NO: 15231624 NR Description: putative protein; protein id: At3g59070.1
MKISKSLWSVMISILFYLTSAPPFVICSSLEVTIDNHSPSNLKTKGSLEQDKLSHQMINSIKLHGILLWVSMGFLMPVGILFIRMANKAHENGIKVKVFFYLHVIFQILAVVLATIGAILSLRTLENSFDNNHQRLGLALYAAMWLQFLTGVFKPSRGSKRRLRWFLLHWILGTIVSIVGIVNIYTGIQAYQKKTSLSRDSSLWTILFTVQVTCLVFFYLYQDKWEHFQKQRVVLDELDHQNNNTNGRNNQSIQVVTRNDHEQKVMVPQPCRKSNALICREREREENKMVGEEETKKRVVTESLGWLTESSIMPKKHRAIEGVGPSSIMELKAQLYKSQEEAKQTKDFTGSDAQYHRAKERIAAKDSFAAKNSGVESRNLKDKLEHKAVKDGAVSYAALEKKAQLYDKLARGELSDEEGEEKYCVDFFRKGIQHEDPKPSSTYNSSISAPPEDFKQDGEDDGSLFSTKFAGLGHAIGTADVGQHVRMVREVHEEVNQAREKATELKQRRQEQATNRREKLKQAYLRKQLEKLKAQQQQQEDEQKT

SEQ ID NO: 69783 - protein, 535 aa, Arabidopsis thaliana
  peptide (1)..(535): Ceres Seq. ID no. 1825802
  misc_feature (1)..(535): Homolog of NCBI NO: 15236824 NR Description: unknown protein; protein id: At4g18260.1
  misc_feature (279)..(535): Homolog of NCBI NO: 26452652 NR Description: unknown protein [Arabidopsis thaliana]
  misc_feature (1)..(245): Homolog of NCBI NO: 15224584 NR Description: hypothetical protein; protein id: At2g30890.1
  misc_feature (258)..(431): Homolog of NCBI NO: 34910918 NR Description: OSJNBb0063G05.4 [Oryza sativa (japonica
  misc_feature (423)..(527): Homolog of NCBI NO: 34910918 NR Description: OSJNBb0063G05.4 [Oryza sativa (japonica
  misc_feature (303)..(534): Homolog of NCBI NO: 26333485 NR Description: unnamed protein product [Mus musculus]
  misc_feature (147)..(233): Homolog of NCBI NO: 34910922 NR Description: OSJNBb0063G05.6 [Oryza sativa (japonica
  misc_feature (303)..(534): Homolog of NCBI NO: 29835270 NR Description: RIKEN cDNA C130022K22 gene [Mus musculus]
  misc_feature (303)..(534): Homolog of NCBI NO: 34857683 NR Description: similar to RIKEN cDNA C130022K22 gene [Rattus
  misc_feature (28)..(221): Homolog of NCBI NO: 15231624 NR Description: putative protein; protein id: At3g59070.1
MISILFYLTSAPPFVICSSLEVTIDNHSPSNLKTKGSLEQDKLSHQMINSIKLHGILLWVSMGFLMPVGILFIRMANKAHENGIKVKVFFYLHVIFQILAVVLATIGAILSLRTLENSFDNNHQRLGLALYAAMWLQFLTGVFKPSRGSKRRLRWFLLHWILGTIVSIVGIVNIYTGIQAYQKKTSLSRDSSLWTILFTVQVTCLVFFYLYQDKWEHFQKQRVVLDELDHQNNNTNGRNNQSIQVVTRNDHEQKVMVPQPCRKSNALICREREREENKMVGEEETKKRVVTESLGWLTESSIMPKKHRAIEGVGPSSIMELKAQLYKSQEEAKQTKDFTGSDAQYHRAKERIAAKDSFAAKNSGVESRNLKDKLEHKAVKDGAVSYAALEKKAQLYDKLARGELSDEEGEEKYCVDFFRKGIQHEDPKPSSTYNSSISAPPEDFKQDGEDDGSLFSTKFAGLGHAIGTADVGQHVRMVREVHEEVNQAREKATELKQRRQEQATNRREKLKQAYLRKQLEKLKAQQQQQEDEQKT

SEQ ID NO: 69784 - protein, 489 aa, Arabidopsis thaliana
  peptide (1)..(489): Ceres Seq. ID no. 1825803
  misc_feature (1)..(489): Homolog of NCBI NO: 15236824 NR Description: unknown protein; protein id: At4g18260.1
  misc_feature (233)..(489): Homolog of NCBI NO: 26452652 NR Description: unknown protein [Arabidopsis thaliana]
  misc_feature (1)..(199): Homolog of NCBI NO: 15224584 NR Description: hypothetical protein; protein id: At2g30890.1
  misc_feature (212)..(385): Homolog of NCBI NO: 34910918 NR Description: OSJNBb0063G05.4 [Oryza sativa (japonica
  misc_feature (377)..(481): Homolog of NCBI NO: 34910918 NR Description: OSJNBb0063G05.4 [Oryza sativa (japonica
  misc_feature (257)..(488): Homolog of NCBI NO: 26333485 NR Description: unnamed protein product [Mus musculus]
  misc_feature (101)..(187): Homolog of NCBI NO: 34910922 NR Description: OSJNBb0063G05.6 [Oryza sativa (japonica
  misc_feature (257)..(488): Homolog of NCBI NO: 29835270 NR Description: RIKEN cDNA C130022K22 gene [Mus musculus]
  misc_feature (257)..(488): Homolog of NCBI NO: 34857683 NR Description: similar to RIKEN cDNA C130022K22 gene [Rattus
  misc_feature (1)..(175): Homolog of NCBI NO: 15231624 NR Description: putative protein; protein id: At3g59070.1
MINSIKLHGILLWVSMGFLMPVGILFIRMANKAHENGIKVKVFFYLHVIFQILAVVLATIGAILSLRTLENSFDNNHQRLGLALYAAMWLQFLTGVFKPSRGSKRRLRWFLLHWILGTIVSIVGIVNIYTGIQAYQKKTSLSRDSSLWTILFTVQVTCLVFFYLYQDKWEHFQKQRVVLDELDHQNNNTNGRNNQSIQVVTRNDHEQKVMVPQPCRKSNALICREREREENKMVGEEETKKRVVTESLGWLTESSIMPKKHRAIEGVGPSSIMELKAQLYKSQEEAKQTKDFTGSDAQYHRAKERIAAKDSFAAKNSGVESRNLKDKLEHKAVKDGAVSYAALEKKAQLYDKLARGELSDEEGEEKYCVDFFRKGIQHEDPKPSSTYNSSISAPPEDFKQDGEDDGSLFSTKFAGLGHAIGTADVGQHVRMVREVHEEVNQAREKATELKQRRQEQATNRREKLKQAYLRKQLEKLKAQQQQQEDEQKT

SEQ ID NO: 69785 - DNA, 1035 bp, Arabidopsis thaliana
  misc_feature (1)..(1035): Ceres Seq. ID no. 1825816
  misc_feature: MA Experiment ID: 20000171 Result: Down-regulated in Transcription
  misc_feature: MA Experiment 20000171 PARAMETER Experiment Name: At_42deg_Heat_P Parameter: Age (day) Value: 14
  misc_feature: MA Experiment 20000171 PARAMETER Experiment Name: At_42deg_Heat_P Parameter: Organism Value: A. thaliana
  misc_feature: MA Experiment 20000171 PARAMETER Experiment Name: At_42deg_Heat_P Parameter: Plant Line Value: WS
  misc_feature: MA Experiment 20000171 PARAMETER Experiment Name: At_42deg_Heat_P Parameter: Temperature (deg C) Value: 42 vs. 22
  misc_feature: MA Experiment 20000171 PARAMETER Experiment Name: At_42deg_Heat_P Parameter: Timepoint (hr) Value: 1
  misc_feature: MA Experiment 20000171 PARAMETER Experiment Name: At_42deg_Heat_P Parameter: Tissue Value: Aerial
  misc_feature: MA Experiment ID: 20000173 Result: Down-regulated in Transcription
  misc_feature: MA Experiment 20000173 PARAMETER Experiment Name: At_42deg_Heat_P Parameter: Age (day) Value: 14
  misc_feature: MA Experiment 20000173 PARAMETER Experiment Name: At_42deg_Heat_P Parameter: Organism Value: A. thaliana
  misc_feature: MA Experiment 20000173 PARAMETER Experiment Name: At_42deg_Heat_P Parameter: Plant Line Value: WS
  misc_feature: MA Experiment 20000173 PARAMETER Experiment Name: At_42deg_Heat_P Parameter: Temperature (deg C) Value: 42 vs. 22
  misc_feature: MA Experiment 20000173 PARAMETER Experiment Name: At_42deg_Heat_P Parameter: Timepoint (hr) Value: 6
  misc_feature: MA Experiment 20000173 PARAMETER Experiment Name: At_42deg_Heat_P Parameter: Tissue Value: Aerial
  misc_feature: MA Experiment ID: 20000184 Result: Down-regulated in Transcription
  misc_feature: MA Experiment 20000184 PARAMETER Experiment Name: At_Shoots__P Parameter: Age (day) Value: 7
  misc_feature: MA Experiment 20000184 PARAMETER Experiment Name: At_Shoots__P Parameter: Tissue Value: Shoots vs. Whole Plant
  misc_feature: MA Experiment ID: 20001554 Result: Up-regulated in Transcription
  misc_feature: MA Experiment 20001554 PARAMETER Experiment Name: At_Drought_Soil_Dry_P Parameter: Age (day) Value: 21
  misc_feature: MA Experiment 20001554 PARAMETER Experiment Name: At_Drought_Soil_Dry_P Parameter: Organism Value: A. thaliana
  misc_feature: MA Experiment 20001554 PARAMETER Experiment Name: At_Drought_Soil_Dry_P Parameter: Plant Line Value: WS
  misc_feature: MA Experiment 20001554 PARAMETER Experiment Name: At_Drought_Soil_Dry_P Parameter: Post Timepoint (hr) Value: None
  misc_feature: MA Experiment 20001554 PARAMETER Experiment Name: At_Drought_Soil_Dry_P Parameter: Post-Treatment Value: None
  misc_feature: MA Experiment 20001554 PARAMETER Experiment Name: At_Drought_Soil_Dry_P Parameter: Timepoint (day) Value: 7
  misc_feature: MA Experiment 20001554 PARAMETER Experiment Name: At_Drought_Soil_Dry_P Parameter: Treatment Value: Drought vs. No Drought
  misc_feature: MA Experiment ID: 20001560 Result: Down-regulated in Transcription
  misc_feature: MA Experiment 20001560 PARAMETER Experiment Name: At_Drought_Soil_Dry_P Parameter: Age (day) Value: 28
  misc_feature: MA Experiment 20001560 PARAMETER Experiment Name: At_Drought_Soil_Dry_P Parameter: Organism Value: A. thaliana
  misc_feature: MA Experiment 20001560 PARAMETER Experiment Name: At_Drought_Soil_Dry_P Parameter: Plant Line Value: WS
  misc_feature: MA Experiment 20001560 PARAMETER Experiment Name: At_Drought_Soil_Dry_P Parameter: Post Timepoint (hr) Value: None
  misc_feature: MA Experiment 20001560 PARAMETER Experiment Name: At_Drought_Soil_Dry_P Parameter: Post-Treatment Value: None
  misc_feature: MA Experiment 20001560 PARAMETER Experiment Name: At_Drought_Soil_Dry_P Parameter: Timepoint (day) Value: 14
  misc_feature: MA Experiment 20001560 PARAMETER Experiment Name: At_Drought_Soil_Dry_P Parameter: Treatment Value: Drought vs. No Drought
atgaagggggatcaagaagtacaagtcattggccaatcagttgctacaattctgggcagactatactatgaaaatggaggaaacagcaaatggctagcaacggtagttcagcttgtaggctttcctattctacttccatatcatctcttgtcagtcaaaacacatacaacaactcagagagatggcaaattaacctcacttaggaaccgtgcattagtttacatagtgcttggacttcttgtaggagcagcttgctacctatattccattggactgctttacctacctgtttctaccctttccctgatctgtgcatcacagttagccttcaccgctttcttctcttatttactcaactcacaaaaacttactcctatcattttgaattctcttttcctcctcactatatcttccaccctccttgcatttaataacgaggaatcagattccaaaaaagttacaaaaggagagtatgtcaaaggtttcgtatgcaccgttggtgcatctgctgggtttggtctactcttatccctacaacagctagcctttcgtaaagttttaaagaagcaaactttctcagaagttataaatatgataatctacatgagtctagtggccagttgtgttagcgtggtggggctttttgctagtagcgagtggaaaactttgagcagtgaaatggaaaactacaaacttgggaaggtatcctatgtcatgaacctagtgtggacagctgttacctggcaggtattctccatcggttgcacaggactgatcttcgagctttcctccctattctcaaatgcaataagcgctttgggactccccgtggttcctatcctggctgtcatcattttccatgacaaaatgaacggcttaaaggtgatttctatgattctagctatttggggtttcgtatcctatgtctaccaacaatatcttgatgaaacaaacttgaagaaaagtaatgaaataccaacaacagaatcccctgaccgaccagaagcagaagggtcaagtgagcaatcaaaataa

SEQ ID NO: 69786 - protein, 344 aa, Arabidopsis thaliana
  peptide (1)..(344): Ceres Seq. ID no. 1825817
  misc_feature (144)..(326): Pfam Name: Domain of unknown function, DUF250 Pfam Description: Domain of unknown function, DUF250
  misc_feature (1)..(344): Homolog of NCBI NO: 15236799 NR Description: putative protein; protein id: At4g18220.1
  misc_feature (9)..(344): Homolog of NCBI NO: 30684325 NR Description: purine permease family [Arabidopsis thaliana]
  misc_feature (21)..(344): Homolog of NCBI NO: 7487849 NR Description: hypothetical protein T9A21.60 - Arabidopsis >gi|2832695|emb|CAA16793.1| putative protein [Arabidopsis >gi|7268614|emb|CAB78823.1| putative protein [Arabidopsis
  misc_feature (21)..(338): Homolog of NCBI NO: 15236796 NR Description: putative protein; protein id: At4g18200.1
  misc_feature (12)..(329): Homolog of NCBI NO: 15236796 NR Description: putative protein; protein id: At4g18200.1
  misc_feature (12)..(329): Homolog of NCBI NO: 18491221 NR Description: unknown protein [Arabidopsis thaliana]
  misc_feature (11)..(324): Homolog of NCBI NO: 15219436 NR Description: hypothetical protein; protein id: At1g44750.1, by cDNA: gi_17065411 [Arabidopsis thaliana]
  misc_feature (9)..(344): Homolog of NCBI NO: 38605752 NR Description: OSJNBb0016D16.5 [Oryza sativa (japonica
  misc_feature (11)..(332): Homolog of NCBI NO: 15236794 NR Description: putative protein; protein id: At4g18190.1
  misc_feature (9)..(323): Homolog of NCBI NO: 38344290 NR Description: OSJNBa0013K16.22 [Oryza sativa (japonica
MKGDQEVQVIGQSVATILGRLYYENGGNSKWLATVVQLVGFPILLPYHLLSVKTHTTTQRDGKLTSLRNRALVYIVLGLLVGAACYLYSIGLLYLPVSTLSLICASQLAFTAFFSYLLNSQKLTPIILNSLFLLTISSTLLAFNNEESDSKKVTKGEYVKGFVCTVGASAGFGLLLSLQQLAFRKVLKKQTFSEVINMIIYMSLVASCVSVVGLFASSEWKTLSSEMENYKLGKVSYVMNLVWTAVTWQVFSIGCTGLIFELSSLFSNAISALGLPVVPILAVIIFHDKMNGLKVISMILAIWGFVSYVYQQYLDETNLKKSNEIPTTESPDRPEAEGSSEQSK

SEQ ID NO: 69787 - DNA, 3387 bp, Arabidopsis thaliana
  misc_feature (1)..(3387): Ceres Seq. ID no. 1825820
  misc_feature: MA Experiment ID: 20000314 Result: Down-regulated in Transcription
  misc_feature: MA Experiment 20000314 PARAMETER Experiment Name: At_14day_Shoots-Roots_Sub_P Parameter: Age (day) Value: 14
  misc_feature: MA Experiment 20000314 PARAMETER Experiment Name: At_14day_Shoots-Roots_Sub_P Parameter: Organism Value: A. thaliana
  misc_feature: MA Experiment 20000314 PARAMETER Experiment Name: At_14day_Shoots-Roots_Sub_P Parameter: Plant Line Value: WS
  misc_feature: MA Experiment 20000314 PARAMETER Experiment Name: At_14day_Shoots-Roots_Sub_P Parameter: Tissue Value: Roots vs. Whole Plant
  misc_feature: MA Experiment ID: 20000315 Result: Down-regulated in Transcription
  misc_feature: MA Experiment 20000315 PARAMETER Experiment Name: At_14day_Shoots-Roots_Sub_P Parameter: Age (day) Value: 14
  misc_feature: MA Experiment 20000315 PARAMETER Experiment Name: At_14day_Shoots-Roots_Sub_P Parameter: Organism Value: A. thaliana
  misc_feature: MA Experiment 20000315 PARAMETER Experiment Name: At_14day_Shoots-Roots_Sub_P Parameter: Plant Line Value: WS
  misc_feature: MA Experiment 20000315 PARAMETER Experiment Name: At_14day_Shoots-Roots_Sub_P Parameter: Tissue Value: Shoots vs. Whole Plant
  misc_feature: MA Experiment ID: 20000328 Result: Down-regulated in Transcription
  misc_feature: MA Experiment 20000328 PARAMETER Experiment Name: At_42deg_Heat_Sub_P Parameter: Age (day) Value: 14
  misc_feature: MA Experiment 20000328 PARAMETER Experiment Name: At_42deg_Heat_Sub_P Parameter: Organism Value: A. thaliana
  misc_feature: MA Experiment 20000328 PARAMETER Experiment Name: At_42deg_Heat_Sub_P Parameter: Plant Line Value: WS
  misc_feature: MA Experiment 20000328 PARAMETER Experiment Name: At_42deg_Heat_Sub_P Parameter: Temperature (deg C) Value: 42 vs. 22
  misc_feature: MA Experiment 20000328 PARAMETER Experiment Name: At_42deg_Heat_Sub_P Parameter: Timepoint (hr) Value: 6
  misc_feature: MA Experiment 20000328 PARAMETER Experiment Name: At_42deg_Heat_Sub_P Parameter: Tissue Value: Aerial
  misc_feature: MA Experiment ID: 20000348 Result: Down-regulated in Transcription
  misc_feature: MA Experiment 20000348 PARAMETER Experiment Name: At_100uM_ABA_Sub_P Parameter: Age (day) Value: 14
  misc_feature: MA Experiment 20000348 PARAMETER Experiment Name: At_100uM_ABA_Sub_P Parameter: Organism Value: A. thaliana
  misc_feature: MA Experiment 20000348 PARAMETER Experiment Name: At_100uM_ABA_Sub_P Parameter: Plant Line Value: WS
  misc_feature: MA Experiment 20000348 PARAMETER Experiment Name: At_100uM_ABA_Sub_P Parameter: Timepoint (hr) Value: 1
  misc_feature: MA Experiment 20000348 PARAMETER Experiment Name: At_100uM_ABA_Sub_P Parameter: Tissue Value: Aerial
  misc_feature: MA Experiment 20000348 PARAMETER Experiment Name: At_100uM_ABA_Sub_P Parameter: Treatment Value: 100uM ABA vs. No Treatment
  misc_feature: MA Experiment ID: 20000355 Result: Down-regulated in Transcription
  misc_feature: MA Experiment 20000355 PARAMETER Experiment Name: At_Siliques_Sub_P Parameter: Age (day) Value: 21
  misc_feature: MA Experiment 20000355 PARAMETER Experiment Name: At_Siliques_Sub_P Parameter: Organism Value: A. thaliana
  misc_feature: MA Experiment 20000355 PARAMETER Experiment Name: At_Siliques_Sub_P Parameter: Plant Line Value: WS
  misc_feature: MA Experiment 20000355 PARAMETER Experiment Name: At_Siliques_Sub_P Parameter: Tissue Value: Less Than 5mm Siliques vs. Whole Plant
  misc_feature: MA Experiment ID: 20000440 Result: Down-regulated in Transcription
  misc_feature: MA Experiment 20000440 PARAMETER Experiment Name: At_Closed-Flower__Sub_P Parameter: Tissue Value: Closed Flower vs. Whole Plant
atggaaataactcaagtaatctatgtcaatggtaagcaagatgcatctcgtagtgtagattacttgattcttttcgctaacctgttgtttttgatgttttcagatcataacaacatagaagcaaacctaacaggtcaggaggaaatgaataccaccatggaaatcgaatcttcgtccgtacctcaatcgaagaactataagaaatggcttcgtatttccatttacgtagtttactatgaaaatggtgggaagagtacatggatgggaacacttgtccaactaatcggcttccctgttctgtttctcttccgcttcttttcccaaaccaaaaatcccaaaccaacagaagcagatttcagaaagttctcttccttcaccattcttggatcagtttacatcgttactggactattagtgtctgctaactcttatatgtcctctgttggtttactatacttaccagtttctactttctccctcatcttggcctcacaattggccttcactgccttcttctcatattttctaaactcgcagaagttcacacctttcattgtgaattctctgtttctccttactatttcctctgccctcctcgtggtcaacactgattcggaaaacacagcaaaagtgtctagagtaaaatatgtgatagggataatatgtaccattggtgcttctgctgggattggattgctgctatccctggtacaactgatcctcaggaaggttttaaagaagcaaacattctcaacggtcactgacttggtcgcttaccaatctctagttgcaagctgtgtggttctcataggacttttcgcaagcggggagtggaaaactttaacaagtgagatggaaaactacaaactggggaaagtgccatacgttatgactttggcctcgatagctatttcctggcaagtctacaccattggcgtcgtgggactgatctttgagtcatcttctgtgttctccaattccataactgctgtgggattgcctatagttccagttgtagcagtgattgttttccatgataaaatgaacgcgtcaaagatcttctccatcattttagctatctggggattcatttcatttgtctatcagcactacctcgacgaaaagaagttgaagactagccacacaagtcctgtaggagatcctcatctactacctgctgaggaaggtcacacaaacatacatagtgaccagaacttagaagcaaaccttatagatcatgaggtggtaactgaatcatcatcatcagctgtgcctcaaaccgagaactataaaaggtggcttcgtgtctccatatacgtaatctttgtcctcttttgccagccactagctacaattctgggtagattgtactatgaaaatggaggaaatagcacatatgtggtaacacttcttcaactcattggcttccctgtactggttctgttccgcttcttttctcgaatcaggcaacccaaatcaacagatacaaatttcagtcagtccccttccttcaccacccttgcatcggtttacttgtgcactggactgctagtgtccgcttatgcttatttgtctgcattggccttcactgcctttttctcatatttccttaactcgcaaaagttcactcctttgatagtcagttctttgcttctcctcactgtatcctctgctcttcttgtggtcaacactgattcagaaaactcaactaatgtatctagagtacagtatgtgatcgggttcatatgtaccatcggtgcttccgctgggattggactgttactatctctgatacaaatgctcttcaggaaagttttcacgaagcatacatcctcagcagtcacggacttggccatttaccagtctctagttgcgagttgtgtagttctcataggactttttgcaagtggagagtgggaaactttgccaagtgagatgagaaactacaaactcgggaaagtgtcatatgttttgactttagcctcggcagctatttcctggcaagtctacactcttggtcttgtgggattgatcttcgagtcatcctctgtgttctccaattccataacagctgtgggattgcctatagttccagttgcggcagtgatagttttccatgatagaatggacgcatcaaaaatcttctccattattttagctatctgcggcttcctttcattcgtctatcagcactacctcgacgaaaagaagttgaatactagccacacaagtgctgtaggagatcttcatctacctgttgaggaaggtcacacaaacatacaaagtgaccagaacttagaagcaaaccttctagatcatgaggaaactgaatcattttcagtacctcaaacgaagaactgtaagaggtggctccgtgtctccatatacgcaatctttgtcatcttctgccaaccacttgctacagttctgggtagactgtactatgaaaatggagggaaaagcacatatgtggtaacacttcttcaactcattggcttccctgtactgattctcttccgcttcttttctcgaatcaggcaacccaaatcaacagatacaaatttcagtcagtccccttccttcaccacccttgcatcggtttacttgtgcactggactgctagtgtctgcttatgcttatttgtctgcagttgggttgctttacttaccagtctctactttctccctcatcttggcctcacagttggccttcactgcctttttctcatatttccttaactcgcaaaagttcactcctttgatagtcaattctttgtttctccttacggtttcctctgccctcctcgtggtcaacactgattcagaaaacacaacaaatgtatctagagtacaatatgtgattgggttcatctgtaccattggtgcttccgctgggattggattggtactatctctgatacaactgctcttcaggaaagttttcacgaagcatacatcctcagcagtcctggacttggccaattaccagtctctagttgcaacttgtgtggtactcataggactgtttgcaagtggagagtggagaactctgccaagtgagatgagaaactacaaactggggaaagtgtcatatatcttgactttggcctcagcagctattttctggcaagtatacactgttggttgtgtgggattaatcttcgagtcttcttctgtgttctccaattccataactgctgtgggactgcctatagttccagttgtagcagtgatagttttccatgataagatggatgcatcaaagattttctccatcattttagctatctggggcttcctttcatttgtctatcagcactacctcgacgaaaagaagttgaagacttgccagacaaaacctgttgaggaagaaacacaaactttatga

SEQ ID NO: 69788 - protein, 1128 aa, Arabidopsis thaliana
  peptide (1)..(1128): Ceres Seq. ID no. 1825821
  misc_feature (938)..(1120): Pfam Name: Domain of unknown function, DUF250 Pfam Description: Domain of unknown function, DUF250
  misc_feature (763)..(1128): Homolog of NCBI NO: 18491221 NR Description: unknown protein [Arabidopsis thaliana]
  misc_feature (396)..(1127): Homolog of NCBI NO: 38605752 NR Description: OSJNBb0016D16.5 [Oryza sativa (japonica
  misc_feature (78)..(746): Homolog of NCBI NO: 38605752 NR Description: OSJNBb0016D16.5 [Oryza sativa (japonica
  misc_feature (38)..(385): Homolog of NCBI NO: 18491221 NR Description: unknown protein [Arabidopsis thaliana]
  misc_feature (763)..(983): Homolog of NCBI NO: 24417310 NR Description: unknown [Arabidopsis thaliana]
  misc_feature (77)..(396): Homolog of NCBI NO: 15236799 NR Description: putative protein; protein id: At4g18220.1
  misc_feature (508)..(746): Homolog of NCBI NO: 18491221 NR Description: unknown protein [Arabidopsis thaliana]
  misc_feature (40)..(388): Homolog of NCBI NO: 30684325 NR Description: purine permease family [Arabidopsis thaliana]
  misc_feature (748)..(1114): Homolog of NCBI NO: 30684325 NR Description: purine permease family [Arabidopsis thaliana]
  misc_feature (804)..(1123): Homolog of NCBI NO: 15236799 NR Description: putative protein; protein id: At4g18220.1
MEITQVIYVNGKQDASRSVDYLILFANLLFLMFSDHNNIEANLTGQEEMNTTMEIESSSVPQSKNYKKWLRISIYVVYYENGGKSTWMGTLVQLIGFPVLFLFRFFSQTKNPKPTEADFRKFSSFTILGSVYIVTGLLVSANSYMSSVGLLYLPVSTFSLILASQLAFTAFFSYFLNSQKFTPFIVNSLFLLTISSALLVVNTDSENTAKVSRVKYVIGIICTIGASAGIGLLLSLVQLILRKVLKKQTFSTVTDLVAYQSLVASCVVLIGLFASGEWKTLTSEMENYKLGKVPYVMTLASIAISWQVYTIGVVGLIFESSSVFSNSITAVGLPIVPVVAVIVFHDKMNASKIFSIILAIWGFISFVYQHYLDEKKLKTSHTSPVGDPHLLPAEEGHTNIHSDQNLEANLIDHEVVTESSSSAVPQTENYKRWLRVSIYVIFVLFCQPLATILGRLYYENGGNSTYVVTLLQLIGFPVLVLFRFFSRIRQPKSTDTNFSQSPSFTTLASVYLCTGLLVSAYAYLSALAFTAFFSYFLNSQKFTPLIVSSLLLLTVSSALLVVNTDSENSTNVSRVQYVIGFICTIGASAGIGLLLSLIQMLFRKVFTKHTSSAVTDLAIYQSLVASCVVLIGLFASGEWETLPSEMRNYKLGKVSYVLTLASAAISWQVYTLGLVGLIFESSSVFSNSITAVGLPIVPVAAVIVFHDRMDASKIFSIILAICGFLSFVYQHYLDEKKLNTSHTSAVGDLHLPVEEGHTNIQSDQNLEANLLDHEETESFSVPQTKNCKRWLRVSIYAIFVIFCQPLATVLGRLYYENGGKSTYVVTLLQLIGFPVLILFRFFSRIRQPKSTDTNFSQSPSFTTLASVYLCTGLLVSAYAYLSAVGLLYLPVSTFSLILASQLAFTAFFSYFLNSQKFTPLIVNSLFLLTVSSALLVVNTDSENTTNVSRVQYVIGFICTIGASAGIGLVLSLIQLLFRKVFTKHTSSAVLDLANYQSLVATCVVLIGLFASGEWRTLPSEMRNYKLGKVSYILTLASAAIFWQVYTVGCVGLIFESSSVFSNSITAVGLPIVPVVAVIVFHDKMDASKIFSIILAIWGFLSFVYQHYLDEKKLKTCQTKPVEEETQTL

SEQ ID NO: 69789 - protein, 1097 aa, Arabidopsis thaliana
  peptide (1)..(1097): Ceres Seq. ID no. 1825822
  misc_feature (907)..(1089): Pfam Name: Domain of unknown function, DUF250 Pfam Description: Domain of unknown function, DUF250
  misc_feature (732)..(1097): Homolog of NCBI NO: 18491221 NR Description: unknown protein [Arabidopsis thaliana]
  misc_feature (365)..(1096): Homolog of NCBI NO: 38605752 NR Description: OSJNBb0016D16.5 [Oryza sativa (japonica
  misc_feature (47)..(715): Homolog of NCBI NO: 38605752 NR Description: OSJNBb0016D16.5 [Oryza sativa (japonica
  misc_feature (7)..(354): Homolog of NCBI NO: 18491221 NR Description: unknown protein [Arabidopsis thaliana]
  misc_feature (732)..(952): Homolog of NCBI NO: 24417310 NR Description: unknown [Arabidopsis thaliana]
  misc_feature (46)..(365): Homolog of NCBI NO: 15236799 NR Description: putative protein; protein id: At4g18220.1
  misc_feature (477)..(715): Homolog of NCBI NO: 18491221 NR Description: unknown protein [Arabidopsis thaliana]
  misc_feature (9)..(357): Homolog of NCBI NO: 30684325 NR Description: purine permease family [Arabidopsis thaliana]
  misc_feature (717)..(1083): Homolog of NCBI NO: 30684325 NR Description: purine permease family [Arabidopsis thaliana]
  misc_feature (773)..(1092): Homolog of NCBI NO: 15236799 NR Description: putative protein; protein id: At4g18220.1
MFSDHNNIEANLTGQEEMNTTMEIESSSVPQSKNYKKWLRISIYVVYYENGGKSTWMGTLVQLIGFPVLFLFRFFSQTKNPKPTEADFRKFSSFTILGSVYIVTGLLVSANSYMSSVGLLYLPVSTFSLILASQLAFTAFFSYFLNSQKFTPFIVNSLFLLTISSALLVVNTDSENTAKVSRVKYVIGIICTIGASAGIGLLLSLVQLILRKVLKKQTFSTVTDLVAYQSLVASCVVLIGLFASGEWKTLTSEMENYKLGKVPYVMTLASIAISWQVYTIGVVGLIFESSSVFSNSITAVGLPIVPVVAVIVFHDKMNASKIFSIILAIWGFISFVYQHYLDEKKLKTSHTSPVGDPHLLPAEEGHTNIHSDQNLEANLIDHEVVTESSSSAVPQTENYKRWLRVSIYVIFVLFCQPLATILGRLYYENGGNSTYVVTLLQLIGFPVLVLFRFFSRIRQPKSTDTNFSQSPSFTTLASVYLCTGLLVSAYAYLSALAFTAFFSYFLNSQKFTPLIVSSLLLLTVSSALLVVNTDSENSTNVSRVQYVIGFICTIGASAGIGLLLSLIQMLFRKVFTKHTSSAVTDLAIYQSLVASCVVLIGLFASGEWETLPSEMRNYKLGKVSYVLTLASAAISWQVYTLGLVGLIFESSSVFSNSITAVGLPIVPVAAVIVFHDRMDASKIFSIILAICGFLSFVYQHYLDEKKLNTSHTSAVGDLHLPVEEGHTNIQSDQNLEANLLDHEETESFSVPQTKNCKRWLRVSIYAIFVIFCQPLATVLGRLYYENGGKSTYVVTLLQLIGFPVLILFRFFSRIRQPKSTDTNFSQSPSFTTLASVYLCTGLLVSAYAYLSAVGLLYLPVSTFSLILASQLAFTAFFSYFLNSQKFTPLIVNSLFLLTVSSALLVVNTDSENTTNVSRVQYVIGFICTIGASAGIGLVLSLIQLLFRKVFTKHTSSAVLDLANYQSLVATCVVLIGLFASGEWRTLPSEMRNYKLGKVSYILTLASAAIFWQVYTVGCVGLIFESSSVFSNSITAVGLPIVPVVAVIVFHDKMDASKIFSIILAIWGFLSFVYQHYLDEKKLKTCQTKPVEEETQTL

SEQ ID NO: 69790 - protein, 1080 aa, Arabidopsis thaliana
  peptide (1)..(1080): Ceres Seq. ID no. 1825823
  misc_feature (890)..(1072): Pfam Name: Domain of unknown function, DUF250 Pfam Description: Domain of unknown function, DUF250
  misc_feature (715)..(1080): Homolog of NCBI NO: 18491221 NR Description: unknown protein [Arabidopsis thaliana]
  misc_feature (348)..(1079): Homolog of NCBI NO: 38605752 NR Description: OSJNBb0016D16.5 [Oryza sativa (japonica
  misc_feature (30)..(698): Homolog of NCBI NO: 38605752 NR Description: OSJNBb0016D16.5 [Oryza sativa (japonica
  misc_feature (1)..(337): Homolog of NCBI NO: 18491221 NR Description: unknown protein [Arabidopsis thaliana]
  misc_feature (715)..(935): Homolog of NCBI NO: 24417310 NR Description: unknown [Arabidopsis thaliana]
  misc_feature (29)..(348): Homolog of NCBI NO: 15236799 NR Description: putative protein; protein id: At4g18220.1
  misc_feature (460)..(698): Homolog of NCBI NO: 18491221 NR Description: unknown protein [Arabidopsis thaliana]
  misc_feature (1)..(340): Homolog of NCBI NO: 30684325 NR Description: purine permease family [Arabidopsis thaliana]
  misc_feature (700)..(1066): Homolog of NCBI NO: 30684325 NR Description: purine permease family [Arabidopsis thaliana]
  misc_feature (756)..(1075): Homolog of NCBI NO: 15236799 NR Description: putative protein; protein id: At4g18220.1
MNTTMEIESSSVPQSKNYKKWLRISIYVVYYENGGKSTWMGTLVQLIGFPVLFLFRFFSQTKNPKPTEADFRKFSSFTILGSVYIVTGLLVSANSYMSSVGLLYLPVSTFSLILASQLAFTAFFSYFLNSQKFTPFIVNSLFLLTISSALLVVNTDSENTAKVSRVKYVIGIICTIGASAGIGLLLSLVQLILRKVLKKQTFSTVTDLVAYQSLVASCVVLIGLFASGEWKTLTSEMENYKLGKVPYVMTLASIAISWQVYTIGVVGLIFESSSVFSNSITAVGLPIVPVVAVIVFHDKMNASKIFSIILAIWGFISFVYQHYLDEKKLKTSHTSPVGDPHLLPAEEGHTNIHSDQNLEANLIDHEVVTESSSSAVPQTENYKRWLRVSIYVIFVLFCQPLATILGRLYYENGGNSTYVVTLLQLIGFPVLVLFRFFSRIRQPKSTDTNFSQSPSFTTLASVYLCTGLLVSAYAYLSALAFTAFFSYFLNSQKFTPLIVSSLLLLTVSSALLVVNTDSENSTNVSRVQYVIGFICTIGASAGIGLLLSLIQMLFRKVFTKHTSSAVTDLAIYQSLVASCVVLIGLFASGEWETLPSEMRNYKLGKVSYVLTLASAAISWQVYTLGLVGLIFESSSVFSNSITAVGLPIVPVAAVIVFHDRMDASKIFSIILAICGFLSFVYQHYLDEKKLNTSHTSAVGDLHLPVEEGHTNIQSDQNLEANLLDHEETESFSVPQTKNCKRWLRVSIYAIFVIFCQPLATVLGRLYYENGGKSTYVVTLLQLIGFPVLILFRFFSRIRQPKSTDTNFSQSPSFTTLASVYLCTGLLVSAYAYLSAVGLLYLPVSTFSLILASQLAFTAFFSYFLNSQKFTPLIVNSLFLLTVSSALLVVNTDSENTTNVSRVQYVIGFICTIGASAGIGLVLSLIQLLFRKVFTKHTSSAVLDLANYQSLVATCVVLIGLFASGEWRTLPSEMRNYKLGKVSYILTLASAAIFWQVYTVGCVGLIFESSSVFSNSITAVGLPIVPVVAVIVFHDKMDASKIFSIILAIWGFLSFVYQHYLDEKKLKTCQTKPVEEETQTL

SEQ ID NO: 69791 - DNA, 921 bp, Arabidopsis thaliana
  misc_feature (1)..(921): Ceres Seq. ID no. 1825849
  misc_feature: MA Experiment ID: 20000171 Result: Up-regulated in Transcription
  misc_feature: MA Experiment 20000171 PARAMETER Experiment Name: At_42deg_Heat_P Parameter: Age (day) Value: 14
  misc_feature: MA Experiment 20000171 PARAMETER Experiment Name: At_42deg_Heat_P Parameter: Organism Value: A. thaliana
  misc_feature: MA Experiment 20000171 PARAMETER Experiment Name: At_42deg_Heat_P Parameter: Plant Line Value: WS
  misc_feature: MA Experiment 20000171 PARAMETER Experiment Name: At_42deg_Heat_P Parameter: Temperature (deg C) Value: 42 vs. 22
  misc_feature: MA Experiment 20000171 PARAMETER Experiment Name: At_42deg_Heat_P Parameter: Timepoint (hr) Value: 1
  misc_feature: MA Experiment 20000171 PARAMETER Experiment Name: At_42deg_Heat_P Parameter: Tissue Value: Aerial
  misc_feature: MA Experiment ID: 20000184 Result: Down-regulated in Transcription
  misc_feature: MA Experiment 20000184 PARAMETER Experiment Name: At_Shoots__P Parameter: Age (day) Value: 7
  misc_feature: MA Experiment 20000184 PARAMETER Experiment Name: At_Shoots__P Parameter: Tissue Value: Shoots vs. Whole Plant
  misc_feature: MA Experiment ID: 20000451 Result: Down-regulated in Transcription
  misc_feature: MA Experiment 20000451 PARAMETER Experiment Name: At_CS6879_Shoots-Roots_P Parameter: Age (day) Value: 14
  misc_feature: MA Experiment 20000451 PARAMETER Experiment Name: At_CS6879_Shoots-Roots_P Parameter: Organism Value: A. thaliana
  misc_feature: MA Experiment 20000451 PARAMETER Experiment Name: At_CS6879_Shoots-Roots_P Parameter: Plant Line Value: CS6879 vs. WS
  misc_feature: MA Experiment 20000451 PARAMETER Experiment Name: At_CS6879_Shoots-Roots_P Parameter: Tissue Value: Roots
atgtctctctcgtcggactccaccgttcctactgtttccacggtcaccatatcctactcagagctcaaggagagcaacatagatttgtctgcaaggattgaagaaggatttggacctaatggacttggaatcctctctgttaaagatgttcctggatattctgctttaagacagaatctacttcagcttgcacctaggttagctggtcttcctgaagaggtgaagagggagcttgaagatcctcatagtaggtataattttggttggagtcatggcaaggagaaacttgaatccgggaagcttgacatgctgaagggttcttactatgctaatcctctacaagatgtacctacgagtaattcatatgaaatacagcggtatccatcgtattgtggatcaaatatatggccaaggaattctttaccggaacttgaaggagctttcaaagctcttggtaaactgatgttcgaagttgggctaatggtagcttaccactgtgatcaatatggtcttactcgagcaatattttctagagattcagttgaagtaccttgcccagatcctgcttctggcttatacatacaaacacgatcaggtcagatcgttaaggttgtgtatggggaagatgaaatagcataccaaataggcgagacaacatcaattctgtctagtggttatctttgtgctacacctcattgtgttcgggtaatattcttcataccttcgcggatggcgccacaaggagaagaggcgcgtggtctagagcgatcgacattcgcgttgttcatgcaacctgactggtattattctgaaactaagataattacaatacatgaagagttatgtctctctgatgaagtcttgacgtttggagaatatacagagaaactgctcaacaaatactatgatacaaaaccttag

SEQ ID NO: 69792 - protein, 306 aa, Arabidopsis thaliana
  peptide (1)..(306): Ceres Seq. ID no. 1825850
  misc_feature (1)..(306): Homolog of NCBI NO: 15235700 NR Description: putative protein; protein id: At4g13400.1
  misc_feature (165)..(306): Homolog of NCBI NO: 22531058 NR Description: putative protein [Arabidopsis thaliana]
  misc_feature (155)..(169): Homolog of NCBI NO: 22531058 NR Description: putative protein [Arabidopsis thaliana]
  misc_feature (15)..(182): Homolog of NCBI NO: 28829713 NR Description: similar to Arabidopsis thaliana (Mouse-ear
  misc_feature (182)..(266): Homolog of NCBI NO: 28829713 NR Description: similar to Arabidopsis thaliana (Mouse-ear
  misc_feature (9)..(169): Homolog of NCBI NO: 40747370 NR Description: hypothetical protein AN0427.2 [Aspergillus
  misc_feature (182)..(266): Homolog of NCBI NO: 40747370 NR Description: hypothetical protein AN0427.2 [Aspergillus
  misc_feature (17)..(169): Homolog of NCBI NO: 32422631 NR Description: hypothetical protein [Neurospora crassa]
  misc_feature (182)..(266): Homolog of NCBI NO: 32422631 NR Description: hypothetical protein [Neurospora crassa]
  misc_feature (165)..(302): Homolog of NCBI NO: 2982272 NR Description: hypothetical protein [Picea mariana]
MSLSSDSTVPTVSTVTISYSELKESNIDLSARIEEGFGPNGLGILSVKDVPGYSALRQNLLQLAPRLAGLPEEVKRELEDPHSRYNFGWSHGKEKLESGKLDMLKGSYYANPLQDVPTSNSYEIQRYPSYCGSNIWPRNSLPELEGAFKALGKLMFEVGLMVAYHCDQYGLTRAIFSRDSVEVPCPDPASGLYIQTRSGQIVKVVYGEDEIAYQIGETTSILSSGYLCATPHCVRVIFFIPSRMAPQGEEARGLERSTFALFMQPDWYYSETKIITIHEELCLSDEVLTFGEYTEKLLNKYYDTKP

SEQ ID NO: 69793 - protein, 204 aa, Arabidopsis thaliana
  peptide (1)..(204): Ceres Seq. ID no. 1825851
  misc_feature (1)..(204): Homolog of NCBI NO: 15235700 NR Description: putative protein; protein id: At4g13400.1
  misc_feature (63)..(204): Homolog of NCBI NO: 22531058 NR Description: putative protein [Arabidopsis thaliana]
  misc_feature (53)..(67): Homolog of NCBI NO: 22531058 NR Description: putative protein [Arabidopsis thaliana]
  misc_feature (1)..(80): Homolog of NCBI NO: 28829713 NR Description: similar to Arabidopsis thaliana (Mouse-ear
  misc_feature (80)..(164): Homolog of NCBI NO: 28829713 NR Description: similar to Arabidopsis thaliana (Mouse-ear
  misc_feature (1)..(67): Homolog of NCBI NO: 40747370 NR Description: hypothetical protein AN0427.2 [Aspergillus
  misc_feature (80)..(164): Homolog of NCBI NO: 40747370 NR Description: hypothetical protein AN0427.2 [Aspergillus
  misc_feature (1)..(67): Homolog of NCBI NO: 32422631 NR Description: hypothetical protein [Neurospora crassa]
  misc_feature (80)..(164): Homolog of NCBI NO: 32422631 NR Description: hypothetical protein [Neurospora crassa]
  misc_feature (63)..(200): Homolog of NCBI NO: 2982272 NR Description: hypothetical protein [Picea mariana]
MLKGSYYANPLQDVPTSNSYEIQRYPSYCGSNIWPRNSLPELEGAFKALGKLMFEVGLMVAYHCDQYGLTRAIFSRDSVEVPCPDPASGLYIQTRSGQIVKVVYGEDEIAYQIGETTSILSSGYLCATPHCVRVIFFIPSRMAPQGEEARGLERSTFALFMQPDWYYSETKIITIHEELCLSDEVLTFGEYTEKLLNKYYDTKP

SEQ ID NO: 69794 - DNA, 558 bp, Arabidopsis thaliana
  misc_feature (1)..(558): Ceres Seq. ID no. 1826051
  misc_feature: MA Experiment ID: 20000171 Result: Up-regulated in Transcription
  misc_feature: MA Experiment 20000171 PARAMETER Experiment Name: At_42deg_Heat_P Parameter: Age (day) Value: 14
  misc_feature: MA Experiment 20000171 PARAMETER Experiment Name: At_42deg_Heat_P Parameter: Organism Value: A. thaliana
  misc_feature: MA Experiment 20000171 PARAMETER Experiment Name: At_42deg_Heat_P Parameter: Plant Line Value: WS
  misc_feature: MA Experiment 20000171 PARAMETER Experiment Name: At_42deg_Heat_P Parameter: Temperature (deg C) Value: 42 vs. 22
  misc_feature: MA Experiment 20000171 PARAMETER Experiment Name: At_42deg_Heat_P Parameter: Timepoint (hr) Value: 1
  misc_feature: MA Experiment 20000171 PARAMETER Experiment Name: At_42deg_Heat_P Parameter: Tissue Value: Aerial
  misc_feature: MA Experiment ID: 20000173 Result: Up-regulated in Transcription
  misc_feature: MA Experiment 20000173 PARAMETER Experiment Name: At_42deg_Heat_P Parameter: Age (day) Value: 14
  misc_feature: MA Experiment 20000173 PARAMETER Experiment Name: At_42deg_Heat_P Parameter: Organism Value: A. thaliana
  misc_feature: MA Experiment 20000173 PARAMETER Experiment Name: At_42deg_Heat_P Parameter: Plant Line Value: WS
  misc_feature: MA Experiment 20000173 PARAMETER Experiment Name: At_42deg_Heat_P Parameter: Temperature (deg C) Value: 42 vs. 22
  misc_feature: MA Experiment 20000173 PARAMETER Experiment Name: At_42deg_Heat_P Parameter: Timepoint (hr) Value: 6
  misc_feature: MA Experiment 20000173 PARAMETER Experiment Name: At_42deg_Heat_P Parameter: Tissue Value: Aerial
  misc_feature: MA Experiment ID: 20000495 Result: Up-regulated in Transcription
  misc_feature: MA Experiment 20000495 PARAMETER Experiment Name: At_Guard_Cells_P Parameter: Harvest Date Value: 8/2/2002
  misc_feature: MA Experiment 20000495 PARAMETER Experiment Name: At_Guard_Cells_P Parameter: Organism Value: A. thaliana
  misc_feature: MA Experiment 20000495 PARAMETER Experiment Name: At_Guard_Cells_P Parameter: Tissue Value: Guard Cells vs. Leaves
  misc_feature: MA Experiment ID: 20000496 Result: Up-regulated in Transcription
  misc_feature: MA Experiment 20000496 PARAMETER Experiment Name: At_Guard_Cells_P Parameter: Harvest Date Value: 7/19/2002
  misc_feature: MA Experiment 20000496 PARAMETER Experiment Name: At_Guard_Cells_P Parameter: Organism Value: Canola
  misc_feature: MA Experiment 20000496 PARAMETER Experiment Name: At_Guard_Cells_P Parameter: Tissue Value: Guard Cells vs. Leaves
  misc_feature: MA Experiment ID: 20001451 Result: Up-regulated in Transcription
  misc_feature: MA Experiment 20001451 PARAMETER Experiment Name: At_Far-red-induction_P Parameter: Age (day) Value: 7
  misc_feature: MA Experiment 20001451 PARAMETER Experiment Name: At_Far-red-induction_P Parameter: Light Value: Far-red vs. White
  misc_feature: MA Experiment 20001451 PARAMETER Experiment Name: At_Far-red-induction_P Parameter: Organism Value: A. thaliana
  misc_feature: MA Experiment 20001451 PARAMETER Experiment Name: At_Far-red-induction_P Parameter: Plant Line Value: Columbia
  misc_feature: MA Experiment 20001451 PARAMETER Experiment Name: At_Far-red-induction_P Parameter: Timepoint (hr) Value: 24
  misc_feature: MA Experiment 20001451 PARAMETER Experiment Name: At_Far-red-induction_P Parameter: Tissue Value: Whole Plant
atgtttccactcaattttcattacgaagatgtatcacgtcaagatccgttgctcaaaccgaatcacgccaacgttatggaagttcctggatcgtgtgaaataagagtagtaccaaaggcaccctataatttcataataaaaaatggaaaattggctatggagattccgcgcggtcagaaattcatacagacacaaaggggttcgacaggaaagtcctttcgatctaatccattcttggggtcaaataaagacaaaggatatgtaagtgacctagcacgacaaagcactctccgagggcatggaatgtctaatttttcggtcagaatctcgacagtaatgtctctattagattttccggtcgaaatacggaaaaactccattcaattctcgatggaaacggagttttgcgaattctccccggaactggaagatcatttcgagatcttcgaacatattcgggggttcaatgtgactattatcacttcggccaacacacaagatgagactttaccactgtggagcggttttttgcaaaaagatgagggggaaactcagtaa

SEQ ID NO: 69795 - protein, 185 aa, Arabidopsis thaliana
  peptide (1)..(185): Ceres Seq. ID no. 1826052
  misc_feature (24)..(76): Pfam Name: Ribosomal protein L5 Pfam Description: Ribosomal protein L5
  misc_feature (1)..(185): Homolog of NCBI NO: 13449308 NR Description: ribosomal protein L5 [Arabidopsis thaliana] hypothetical protein; protein id: At2g07725.1 [Arabidopsis >gi|402961|emb|CAA47967.1| ribosomal protein 5 large subunit
  misc_feature (1)..(185): Homolog of NCBI NO: 4164412 NR Description: ribosomal protein L5 [Pisum sativum]
  misc_feature (1)..(185): Homolog of NCBI NO: 1173079 NR Description: MITOCHONDRIAL 60S RIBOSOMAL PROTEIN L5
  misc_feature (1)..(185): Homolog of NCBI NO: 37591117 NR Description: ribosomal protein L5 [Brassica napus]
  misc_feature (1)..(185): Homolog of NCBI NO: 2507605 NR Description: MITOCHONDRIAL 60S RIBOSOMAL PROTEIN L5
  misc_feature (1)..(185): Homolog of NCBI NO: 486983 NR Description: ribosomal protein L5 - rape mitochondrion
  misc_feature (1)..(184): Homolog of NCBI NO: 421897 NR Description: ribosomal protein L5 - evening primrose >gi|14029|emb|CAA49284.1| ribosomal protein L5 [Oenothera
  misc_feature (1)..(185): Homolog of NCBI NO: 9838430 NR Description: ribosomal protein L5 [Beta vulgaris]
  misc_feature (1)..(184): Homolog of NCBI NO: 730588 NR Description: MITOCHONDRIAL 60S RIBOSOMAL PROTEIN L5
  misc_feature (1)..(185): Homolog of NCBI NO: 1710596 NR Description: MITOCHONDRIAL 60S RIBOSOMAL PROTEIN L5
MFPLNFHYEDVSRQDPLLKPNHANVMEVPGSCEIRVVPKAPYNFIIKNGKLAMEIPRGQKFIQTQRGSTGKSFRSNPFLGSNKDKGYVSDLARQSTLRGHGMSNFSVRISTVMSLLDFPVEIRKNSIQFSMETEFCEFSPELEDHFEIFEHIRGFNVTIITSANTQDETLPLWSGFLQKDEGETQ

SEQ ID NO: 69796 - protein, 160 aa, Arabidopsis thaliana
  peptide (1)..(160): Ceres Seq. ID no. 1826053
  misc_feature (1)..(51): Pfam Name: Ribosomal protein L5 Pfam Description: Ribosomal protein L5
  misc_feature (1)..(160): Homolog of NCBI NO: 13449308 NR Description: ribosomal protein L5 [Arabidopsis thaliana] hypothetical protein; protein id: At2g07725.1 [Arabidopsis >gi|402961|emb|CAA47967.1| ribosomal protein 5 large subunit
  misc_feature (1)..(160): Homolog of NCBI NO: 4164412 NR Description: ribosomal protein L5 [Pisum sativum]
  misc_feature (1)..(160): Homolog of NCBI NO: 1173079 NR Description: MITOCHONDRIAL 60S RIBOSOMAL PROTEIN L5
  misc_feature (1)..(160): Homolog of NCBI NO: 37591117 NR Description: ribosomal protein L5 [Brassica napus]
  misc_feature (1)..(160): Homolog of NCBI NO: 2507605 NR Description: MITOCHONDRIAL 60S RIBOSOMAL PROTEIN L5
  misc_feature (1)..(160): Homolog of NCBI NO: 486983 NR Description: ribosomal protein L5 - rape mitochondrion
  misc_feature (1)..(159): Homolog of NCBI NO: 421897 NR Description: ribosomal protein L5 - evening primrose >gi|14029|emb|CAA49284.1| ribosomal protein L5 [Oenothera
  misc_feature (1)..(160): Homolog of NCBI NO: 9838430 NR Description: ribosomal protein L5 [Beta vulgaris]
  misc_feature (1)..(159): Homolog of NCBI NO: 730588 NR Description: MITOCHONDRIAL 60S RIBOSOMAL PROTEIN L5
  misc_feature (1)..(160): Homolog of NCBI NO: 1710596 NR Description: MITOCHONDRIAL 60S RIBOSOMAL PROTEIN L5
MEVPGSCEIRVVPKAPYNFIIKNGKLAMEIPRGQKFIQTQRGSTGKSFRSNPFLGSNKDKGYVSDLARQSTLRGHGMSNFSVRISTVMSLLDFPVEIRKNSIQFSMETEFCEFSPELEDHFEIFEHIRGFNVTIITSANTQDETLPLWSGFLQKDEGETQ

SEQ ID NO: 69797 - protein, 133 aa, Arabidopsis thaliana
  peptide (1)..(133): Ceres Seq. ID no. 1826054
  misc_feature (42)..(123): Pfam Name: ribosomal L5P family C-terminus Pfam Description: ribosomal L5P family C-terminus
  misc_feature (1)..(133): Homolog of NCBI NO: 13449308 NR Description: ribosomal protein L5 [Arabidopsis thaliana] hypothetical protein; protein id: At2g07725.1 [Arabidopsis >gi|402961|emb|CAA47967.1| ribosomal protein 5 large subunit
  misc_feature (1)..(133): Homolog of NCBI NO: 4164412 NR Description: ribosomal protein L5 [Pisum sativum]
  misc_feature (1)..(133): Homolog of NCBI NO: 1173079 NR Description: MITOCHONDRIAL 60S RIBOSOMAL PROTEIN L5
  misc_feature (1)..(133): Homolog of NCBI NO: 37591117 NR Description: ribosomal protein L5 [Brassica napus]
  misc_feature (1)..(133): Homolog of NCBI NO: 2507605 NR Description: MITOCHONDRIAL 60S RIBOSOMAL PROTEIN L5
  misc_feature (1)..(133): Homolog of NCBI NO: 486983 NR Description: ribosomal protein L5 - rape mitochondrion
  misc_feature (1)..(132): Homolog of NCBI NO: 421897 NR Description: ribosomal protein L5 - evening primrose >gi|14029|emb|CAA49284.1| ribosomal protein L5 [Oenothera
  misc_feature (1)..(133): Homolog of NCBI NO: 9838430 NR Description: ribosomal protein L5 [Beta vulgaris]
  misc_feature (1)..(132): Homolog of NCBI NO: 730588 NR Description: MITOCHONDRIAL 60S RIBOSOMAL PROTEIN L5
  misc_feature (1)..(133): Homolog of NCBI NO: 1710596 NR Description: MITOCHONDRIAL 60S RIBOSOMAL PROTEIN L5
MEIPRGQKFIQTQRGSTGKSFRSNPFLGSNKDKGYVSDLARQSTLRGHGMSNFSVRISTVMSLLDFPVEIRKNSIQFSMETEFCEFSPELEDHFEIFEHIRGFNVTIITSANTQDETLPLWSGFLQKDEGETQ

SEQ ID NO: 69798 - DNA, 2088 bp, Arabidopsis thaliana
  misc_feature (1)..(2088): Ceres Seq. ID no. 1826426
  misc_feature: MA Experiment ID: 20001556 Result: Up-regulated in Transcription
  misc_feature: MA Experiment 20001556 PARAMETER Experiment Name: At_Drought_Soil_Dry_P Parameter: Age (day) Value: 26
  misc_feature: MA Experiment 20001556 PARAMETER Experiment Name: At_Drought_Soil_Dry_P Parameter: Organism Value: A. thaliana
  misc_feature: MA Experiment 20001556 PARAMETER Experiment Name: At_Drought_Soil_Dry_P Parameter: Plant Line Value: WS
  misc_feature: MA Experiment 20001556 PARAMETER Experiment Name: At_Drought_Soil_Dry_P Parameter: Post Timepoint (hr) Value: None
  misc_feature: MA Experiment 20001556 PARAMETER Experiment Name: At_Drought_Soil_Dry_P Parameter: Post-Treatment Value: None
  misc_feature: MA Experiment 20001556 PARAMETER Experiment Name: At_Drought_Soil_Dry_P Parameter: Timepoint (day) Value: 12
  misc_feature: MA Experiment 20001556 PARAMETER Experiment Name: At_Drought_Soil_Dry_P Parameter: Treatment Value: Drought vs. No Drought
atgattttgaagtacaatagtagttacaggttttatctttcaagtagttttctccaagctatggaagtagattgtcggcgttattacgtacgtcttcttcaatcatgcagcagcagaaatcgcgaaactttatggagacaaaccaatggattgctcttgaagaagggttttcttagttcaattgtcattgttgctaaccatctcctccaaatgtactcccggtctggtaaaatgggaattgcgcggaacttgttcgacgaaatgcctgatagaaactatttctcgtggaacactatgattgaagggtacatgaattctggggaaaagggaacgtctttgaggttttttgatatgatgccagaaagagatgggtactcttggaacgtggttgtttccgggtttgctaaagctggtgagctaagtgtcgctaggaggttattcaatgccatgccggaaaaagatgttgtgacgttgaactctctgcttcatggatatattttaaacggttatgcagaggaagctctgaggttgtttaaagaattgaattttagcgctgatgcgatcacattgacgacagttcttaaagcttgtgctgagttagaagctttgaaatgtgggaagcagatacatgctcagattctgatcggtggtgttgaatgtgactcgaaaatgaatagttctttagttaatgtgtatgcaaagtgtggtgatttgagaatggcaagctatatgctggagcagattagggaacctgatgaccattctctatctgccttaatttcaggttatgcaaattgtgggagagtgaatgagtctagaggacttttcgataggaaaagtaacagatgtgtaattctatggaactctatgatttcaggctatattgctaacaatatgaaaatggaggcattggttcttttcaatgagatgaggaatgaaacccgggaagattctcgtacgctggcagcggttataaatgcttgcatcggtttgggcttcctagagactggtaaacaaatgcattgtcatgcttgtaaatttgggttaattgatgacattgttgtagctagcactttgcttgacatgtactccaagtgtggaagcccaatggaagcttgcaaacttttcagtgaggtcgaatcctatgacactatcttacttaacagtatgatcaaggtatatttcagctgcggaagaatcgatgatgcaaaacgggtatttgagagaattgaaaataagagcttgatttcttggaactcaatgactaacggattcagtcaaaatggttgtactgttgaaactttagagtatttccatcagatgcataagctggatttgcctacagatgaggttagcctctctagtgtcattagtgcgtgtgcaagtatatcttctctcgaactcggtgagcaagtttttgcgagggcaactattgttggtcttgactctgatcaagtagtatcatcttctctcattgatctctactgcaagtgtggattcgttgagcatggcaggagagtattcgatacaatggttaaatcagatgaagtaccatggaactcaatgatatcaggttatgctacgaatggtcaaggatttgaagcgattgacttgttcaagaaaatgagtgttgctggtataagacctactcagatcacttttatggttgttctaacagcatgcaattactgtggtttagtcgaagagggacgaaaattgtttgagtcaatgaaggttgatcatggttttgttccagataaagagcatttttcatgtatggttgatcttttggctcgtgctggttatgtggaagaagctataaatcttgtagaagagatgcctttcgatgtggatggaagcatgtggtcatctattctaagaggatgtgtagcaaatggatataaagccatgggaaagaaagctgctgagaagattatagagcttgaacctgagaactcagttgcttatgtgcagttgtccgctatattcgcaacctcgggagattgggaaagctcggcgcttgtaagaaaactgatgagggagaacaatgtgacaaagaatccaggttctagttggactgattgttga

SEQ ID NO: 69799 - protein, 695 aa, Arabidopsis thaliana
  peptide (1)..(695): Ceres Seq. ID no. 1826427
  misc_feature (416)..(450): Pfam Name: PPR repeat Pfam Description: PPR repeat
  misc_feature (88)..(656): Homolog of NCBI NO: 34897444 NR Description: hypothetical protein [Oryza sativa (japonica group)] >gi|28269400|gb|AAO37943.1| hypothetical protein [Oryza
  misc_feature (97)..(694): Homolog of NCBI NO: 15227144 NR Description: hypothetical protein; protein id: At2g22070.1
  misc_feature (114)..(693): Homolog of NCBI NO: 34896896 NR Description: hypothetical protein [Oryza sativa (japonica group)] >gi|24899461|gb|AAN65031.1| hypothetical protein [Oryza
  misc_feature (128)..(692): Homolog of NCBI NO: 15225445 NR Description: hypothetical protein; protein id: At2g13600.1
  misc_feature (97)..(694): Homolog of NCBI NO: 15222566 NR Description: hypothetical protein; protein id: At1g25360.1
  misc_feature (33)..(692): Homolog of NCBI NO: 5803274 NR Description: Similar to Arabidopsis thaliana BAC T5J8 from
  misc_feature (128)..(694): Homolog of NCBI NO: 21740490 NR Description: OSJNBa0006B20.5 [Oryza sativa (japonica
  misc_feature (90)..(694): Homolog of NCBI NO: 15235498 NR Description: hypothetical protein; protein id: At4g02750.1
  misc_feature (64)..(692): Homolog of NCBI NO: 19033573 NR Description: putative DYW7 protein [Oryza sativa (japonica
  misc_feature (99)..(694): Homolog of NCBI NO: 34393605 NR Description: pentatricopeptide (PPR) repeat-containing
MILKYNSSYRFYLSSSFLQAMEVDCRRYYVRLLQSCSSRNRETLWRQTNGLLLKKGFLSSIVIVANHLLQMYSRSGKMGIARNLFDEMPDRNYFSWNTMIEGYMNSGEKGTSLRFFDMMPERDGYSWNVVVSGFAKAGELSVARRLFNAMPEKDVVTLNSLLHGYILNGYAEEALRLFKELNFSADAITLTTVLKACAELEALKCGKQIHAQILIGGVECDSKMNSSLVNVYAKCGDLRMASYMLEQIREPDDHSLSALISGYANCGRVNESRGLFDRKSNRCVILWNSMISGYIANNMKMEALVLFNEMRNETREDSRTLAAVINACIGLGFLETGKQMHCHACKFGLIDDIVVASTLLDMYSKCGSPMEACKLFSEVESYDTILLNSMIKVYFSCGRIDDAKRVFERIENKSLISWNSMTNGFSQNGCTVETLEYFHQMHKLDLPTDEVSLSSVISACASISSLELGEQVFARATIVGLDSDQVVSSSLIDLYCKCGFVEHGRRVFDTMVKSDEVPWNSMISGYATNGQGFEAIDLFKKMSVAGIRPTQITFMVVLTACNYCGLVEEGRKLFESMKVDHGFVPDKEHFSCMVDLLARAGYVEEAINLVEEMPFDVDGSMWSSILRGCVANGYKAMGKKAAEKIIELEPENSVAYVQLSAIFATSGDWESSALVRKLMRENNVTKNPGSSWTDC

SEQ ID NO: 69800 - protein, 675 aa, Arabidopsis thaliana
  peptide (1)..(675): Ceres Seq. ID no. 1826428
  misc_feature (396)..(430): Pfam Name: PPR repeat Pfam Description: PPR repeat
  misc_feature (68)..(636): Homolog of NCBI NO: 34897444 NR Description: hypothetical protein [Oryza sativa (japonica group)] >gi|28269400|gb|AAO37943.1| hypothetical protein [Oryza
  misc_feature (77)..(674): Homolog of NCBI NO: 15227144 NR Description: hypothetical protein; protein id: At2g22070.1
  misc_feature (94)..(673): Homolog of NCBI NO: 34896896 NR Description: hypothetical protein [Oryza sativa (japonica group)] >gi|24899461|gb|AAN65031.1| hypothetical protein [Oryza
  misc_feature (108)..(672): Homolog of NCBI NO: 15225445 NR Description: hypothetical protein; protein id: At2g13600.1
  misc_feature (77)..(674): Homolog of NCBI NO: 15222566 NR Description: hypothetical protein; protein id: At1g25360.1
  misc_feature (13)..(672): Homolog of NCBI NO: 5803274 NR Description: Similar to Arabidopsis thaliana BAC T5J8 from
  misc_feature (108)..(674): Homolog of NCBI NO: 21740490 NR Description: OSJNBa0006B20.5 [Oryza sativa (japonica
  misc_feature (70)..(674): Homolog of NCBI NO: 15235498 NR Description: hypothetical protein; protein id: At4g02750.1
  misc_feature (44)..(672): Homolog of NCBI NO: 19033573 NR Description: putative DYW7 protein [Oryza sativa (japonica
  misc_feature (79)..(674): Homolog of NCBI NO: 34393605 NR Description: pentatricopeptide (PPR) repeat-containing
MEVDCRRYYVRLLQSCSSRNRETLWRQTNGLLLKKGFLSSIVIVANHLLQMYSRSGKMGIARNLFDEMPDRNYFSWNTMIEGYMNSGEKGTSLRFFDMMPERDGYSWNVVVSGFAKAGELSVARRLFNAMPEKDVVTLNSLLHGYILNGYAEEALRLFKELNFSADAITLTTVLKACAELEALKCGKQIHAQILIGGVECDSKMNSSLVNVYAKCGDLRMASYMLEQIREPDDHSLSALISGYANCGRVNESRGLFDRKSNRCVILWNSMISGYIANNMKMEALVLFNEMRNETREDSRTLAAVINACIGLGFLETGKQMHCHACKFGLIDDIVVASTLLDMYSKCGSPMEACKLFSEVESYDTILLNSMIKVYFSCGRIDDAKRVFERIENKSLISWNSMTNGFSQNGCTVETLEYFHQMHKLDLPTDEVSLSSVISACASISSLELGEQVFARATIVGLDSDQVVSSSLIDLYCKCGFVEHGRRVFDTMVKSDEVPWNSMISGYATNGQGFEAIDLFKKMSVAGIRPTQITFMVVLTACNYCGLVEEGRKLFESMKVDHGFVPDKEHFSCMVDLLARAGYVEEAINLVEEMPFDVDGSMWSSILRGCVANGYKAMGKKAAEKIIELEPENSVAYVQLSAIFATSGDWESSALVRKLMRENNVTKNPGSSWTDC

SEQ ID NO: 69801 - protein, 625 aa, Arabidopsis thaliana
  peptide (1)..(625): Ceres Seq. ID no. 1826429
  misc_feature (346)..(380): Pfam Name: PPR repeat Pfam Description: PPR repeat
  misc_feature (18)..(586): Homolog of NCBI NO: 34897444 NR Description: hypothetical protein [Oryza sativa (japonica group)] >gi|28269400|gb|AAO37943.1| hypothetical protein [Oryza
  misc_feature (27)..(624): Homolog of NCBI NO: 15227144 NR Description: hypothetical protein; protein id: At2g22070.1
  misc_feature (44)..(623): Homolog of NCBI NO: 34896896 NR Description: hypothetical protein [Oryza sativa (japonica group)] >gi|24899461|gb|AAN65031.1| hypothetical protein [Oryza
  misc_feature (58)..(622): Homolog of NCBI NO: 15225445 NR Description: hypothetical protein; protein id: At2g13600.1
  misc_feature (27)..(624): Homolog of NCBI NO: 15222566 NR Description: hypothetical protein; protein id: At1g25360.1
  misc_feature (1)..(622): Homolog of NCBI NO: 5803274 NR Description: Similar to Arabidopsis thaliana BAC T5J8 from
  misc_feature (58)..(624): Homolog of NCBI NO: 21740490 NR Description: OSJNBa0006B20.5 [Oryza sativa (japonica
  misc_feature (20)..(624): Homolog of NCBI NO: 15235498 NR Description: hypothetical protein; protein id: At4g02750.1
  misc_feature (1)..(622): Homolog of NCBI NO: 19033573 NR Description: putative DYW7 protein [Oryza sativa (japonica
  misc_feature (29)..(624): Homolog of NCBI NO: 34393605 NR Description: pentatricopeptide (PPR) repeat-containing
MYSRSGKMGIARNLFDEMPDRNYFSWNTMIEGYMNSGEKGTSLRFFDMMPERDGYSWNVVVSGFAKAGELSVARRLFNAMPEKDVVTLNSLLHGYILNGYAEEALRLFKELNFSADAITLTTVLKACAELEALKCGKQIHAQILIGGVECDSKMNSSLVNVYAKCGDLRMASYMLEQIREPDDHSLSALISGYANCGRVNESRGLFDRKSNRCVILWNSMISGYIANNMKMEALVLFNEMRNETREDSRTLAAVINACIGLGFLETGKQMHCHACKFGLIDDIVVASTLLDMYSKCGSPMEACKLFSEVESYDTILLNSMIKVYFSCGRIDDAKRVFERIENKSLISWNSMTNGFSQNGCTVETLEYFHQMHKLDLPTDEVSLSSVISACASISSLELGEQVFARATIVGLDSDQVVSSSLIDLYCKCGFVEHGRRVFDTMVKSDEVPWNSMISGYATNGQGFEAIDLFKKMSVAGIRPTQITFMVVLTACNYCGLVEEGRKLFESMKVDHGFVPDKEHFSCMVDLLARAGYVEEAINLVEEMPFDVDGSMWSSILRGCVANGYKAMGKKAAEKIIELEPENSVAYVQLSAIFATSGDWESSALVRKLMRENNVTKNPGSSWTDC

SEQ ID NO: 69802 - DNA, 1449 bp, Arabidopsis thaliana
  misc_feature (1)..(1449): Ceres Seq. ID no. 1827359
  misc_feature: MA Experiment ID: 20000307 Result: Up-regulated in Transcription
  misc_feature: MA Experiment 20000307 PARAMETER Experiment Name: At_Germinating_Seeds_Sub_P Parameter: Age (hr) Value: 24 vs. 0
  misc_feature: MA Experiment 20000307 PARAMETER Experiment Name: At_Germinating_Seeds_Sub_P Parameter: Organism Value: A. thaliana
  misc_feature: MA Experiment 20000307 PARAMETER Experiment Name: At_Germinating_Seeds_Sub_P Parameter: Plant Line Value: WS
  misc_feature: MA Experiment 20000307 PARAMETER Experiment Name: At_Germinating_Seeds_Sub_P Parameter: Tissue Value: Germinating Seeds
  misc_feature: MA Experiment ID: 20000315 Result: Down-regulated in Transcription
  misc_feature: MA Experiment 20000315 PARAMETER Experiment Name: At_14day_Shoots-Roots_Sub_P Parameter: Age (day) Value: 14
  misc_feature: MA Experiment 20000315 PARAMETER Experiment Name: At_14day_Shoots-Roots_Sub_P Parameter: Organism Value: A. thaliana
  misc_feature: MA Experiment 20000315 PARAMETER Experiment Name: At_14day_Shoots-Roots_Sub_P Parameter: Plant Line Value: WS
  misc_feature: MA Experiment 20000315 PARAMETER Experiment Name: At_14day_Shoots-Roots_Sub_P Parameter: Tissue Value: Shoots vs. Whole Plant
  misc_feature: MA Experiment ID: 20000328 Result: Down-regulated in Transcription
  misc_feature: MA Experiment 20000328 PARAMETER Experiment Name: At_42deg_Heat_Sub_P Parameter: Age (day) Value: 14
  misc_feature: MA Experiment 20000328 PARAMETER Experiment Name: At_42deg_Heat_Sub_P Parameter: Organism Value: A. thaliana
  misc_feature: MA Experiment 20000328 PARAMETER Experiment Name: At_42deg_Heat_Sub_P Parameter: Plant Line Value: WS
  misc_feature: MA Experiment 20000328 PARAMETER Experiment Name: At_42deg_Heat_Sub_P Parameter: Temperature (deg C) Value: 42 vs. 22
  misc_feature: MA Experiment 20000328 PARAMETER Experiment Name: At_42deg_Heat_Sub_P Parameter: Timepoint (hr) Value: 6
  misc_feature: MA Experiment 20000328 PARAMETER Experiment Name: At_42deg_Heat_Sub_P Parameter: Tissue Value: Aerial
atggctggacttaagatctggcaagccatctttatcaccattgcactgatcatcattgtcgtactctctgttctttcattttgtctcatttggaaaaagaaatcaagaagatccaaaaccttaagtcttcccatcatacaaacccctgtggtgtcaaaggagatcaaggaagtcaggatcgagcatgttgtctcaacgagtagtaacttcgatcctcaggatgaaaacaacaatgaatctgacaaattcttgcttaatttggaaatggagaagaacagagagaatggtttgagtagtagccggtctggttcaggcaaagaaggttatttatgtgttgcaaaccggtctacttcatcattgtatgagatggctacaccatcaccatcacctctttctggtttacctgagtcacaccttggatggggtcattggtttactctgagagatcttgagatagcaacaaacagattctcaaaggaaaatgtgattggtgaaggaggctatggagttgtttaccgaggcgagttggtcaatgggagtcttgttgccgtgaaaaagatcctaaaccacttgggacaagcagagaaagagtttagagtagaggtagatgctataggtcatgtgcgtcacaagaacttggtacgtcttctaggatactgcattgaaggcacaaacaggatattggtttatgagtatatgaacaatgggaaccttgaagaatggcttcacggagcaatgaaacatcatggatatctaacttgggaagctcgaatgaaagttctcactggaacatccaaggctcttgcatatctacacgaggcaatcgaaccaaaagtggtgcatagagacatcaagtcgagcaacatcttgatcgatgatagattcaatgcaaagatttctgattttggccttgccaagttacttggagatgggaaaagccatgtgactactagagtcatgggaacatttgggtatgttgctcctgagtatgcgaataccggacttttgaatgaaaagagtgatgtgtacagctttggtgtcttggtcttagaagcaataaccggaagagatcctgtggattacgcgcggcctgctaatgaggtgaatttggttgagtggttgaagatgatggtaggatctaagagattagaagaagtcattgatccaaacatagcagttaggccagcgactagagcactgaaacgagtacttcttacagcacttagatgcattgatcctgattctgaaaagagacctaaaatgagtcaagttgtgcgtatgctggagtctgaggaatatcctgtaccaagagagaaaagtatgcagaaactgtataaacataagcaagaattcaacttacaggagcggagagtgcgcagaacgcaagaggaaaactcggataccgatagaagcagaccggtttcaagatcacagagcaagagactgtaa

SEQ ID NO: 69803 - protein, 482 aa, Arabidopsis thaliana
  peptide (1)..(482): Ceres Seq. ID no. 1827360
  misc_feature (157)..(428): Pfam Name: Protein kinase domain Pfam Description: Protein kinase domain
  misc_feature (1)..(482): Homolog of NCBI NO: 15217511 NR Description: putative ser/thr protein kinase; protein id: [Arabidopsis thaliana] >gi|25402546|pir||G86227 hypothetical
  misc_feature (3)..(481): Homolog of NCBI NO: 18405946 NR Description: expressed protein; protein id: At1g56720.1,
  misc_feature (3)..(481): Homolog of NCBI NO: 21593085 NR Description: Putative protein kinase [Arabidopsis thaliana]
  misc_feature (3)..(481): Homolog of NCBI NO: 25404144 NR Description: probable protein kinase F25P12.84 [imported] - thaliana >gi|9954741|gb|AAG09092.1|AC009323_3 Putative protein
  misc_feature (4)..(479): Homolog of NCBI NO: 34894708 NR Description: Putative protein kinase [Oryza sativa (japonica group)] >gi|12328581|dbj|BAB21240.1| Putative protein kinase
  misc_feature (1)..(480): Homolog of NCBI NO: 15231637 NR Description: receptor-like protein kinase; protein id:
  misc_feature (3)..(471): Homolog of NCBI NO: 15238840 NR Description: Ser/Thr specific protein kinase - like protein;
  misc_feature (1)..(439): Homolog of NCBI NO: 15228043 NR Description: putative protein kinase; protein id: At2g42960.1
  misc_feature (4)..(469): Homolog of NCBI NO: 22331140 NR Description: serine/threonine protein kinase, putative; id: At3g17420.1, supported by cDNA: gi_17529287, supported by gi_20465832 [Arabidopsis thaliana] >gi|11994680|dbj|BAB02918.1|
  misc_feature (133)..(439): Homolog of NCBI NO: 34897534 NR Description: OSJNBa0042L16.4 [Oryza sativa (japonica
MAGLKIWQAIFITIALIIIVVLSVLSFCLIWKKKSRRSKTLSLPIIQTPVVSKEIKEVRIEHVVSTSSNFDPQDENNNESDKFLLNLEMEKNRENGLSSSRSGSGKEGYLCVANRSTSSLYEMATPSPSPLSGLPESHLGWGHWFTLRDLEIATNRFSKENVIGEGGYGVVYRGELVNGSLVAVKKILNHLGQAEKEFRVEVDAIGHVRHKNLVRLLGYCIEGTNRILVYEYMNNGNLEEWLHGAMKHHGYLTWEARMKVLTGTSKALAYLHEAIEPKVVHRDIKSSNILIDDRFNAKISDFGLAKLLGDGKSHVTTRVMGTFGYVAPEYANTGLLNEKSDVYSFGVLVLEAITGRDPVDYARPANEVNLVEWLKMMVGSKRLEEVIDPNIAVRPATRALKRVLLTALRCIDPDSEKRPKMSQVVRMLESEEYPVPREKSMQKLYKHKQEFNLQERRVRRTQEENSDTDRSRPVSRSQSKRL

SEQ ID NO: 69804 - protein, 394 aa, Arabidopsis thaliana
  peptide (1)..(394): Ceres Seq. ID no. 1827361
  misc_feature (69)..(340): Pfam Name: Protein kinase domain Pfam Description: Protein kinase domain
  misc_feature (1)..(394): Homolog of NCBI NO: 15217511 NR Description: putative ser/thr protein kinase; protein id: [Arabidopsis thaliana] >gi|25402546|pir||G86227 hypothetical
  misc_feature (1)..(393): Homolog of NCBI NO: 18405946 NR Description: expressed protein; protein id: At1g56720.1,
  misc_feature (1)..(393): Homolog of NCBI NO: 21593085 NR Description: Putative protein kinase [Arabidopsis thaliana]
  misc_feature (1)..(393): Homolog of NCBI NO: 25404144 NR Description: probable protein kinase F25P12.84 [imported] - thaliana >gi|9954741|gb|AAG09092.1|AC009323_3 Putative protein
  misc_feature (1)..(391): Homolog of NCBI NO: 34894708 NR Description: Putative protein kinase [Oryza sativa (japonica group)] >gi|12328581|dbj|BAB21240.1| Putative protein kinase
  misc_feature (1)..(392): Homolog of NCBI NO: 15231637 NR Description: receptor-like protein kinase; protein id:
  misc_feature (1)..(383): Homolog of NCBI NO: 15238840 NR Description: Ser/Thr specific protein kinase - like protein;
  misc_feature (1)..(351): Homolog of NCBI NO: 15228043 NR Description: putative protein kinase; protein id: At2g42960.1
  misc_feature (1)..(381): Homolog of NCBI NO: 22331140 NR Description: serine/threonine protein kinase, putative; id: At3g17420.1, supported by cDNA: gi_17529287, supported by gi_20465832 [Arabidopsis thaliana] >gi|11994680|dbj|BAB02918.1|
  misc_feature (45)..(351): Homolog of NCBI NO: 34897534 NR Description: OSJNBa0042L16.4 [Oryza sativa (japonica
MEKNRENGLSSSRSGSGKEGYLCVANRSTSSLYEMATPSPSPLSGLPESHLGWGHWFTLRDLEIATNRFSKENVIGEGGYGVVYRGELVNGSLVAVKKILNHLGQAEKEFRVEVDAIGHVRHKNLVRLLGYCIEGTNRILVYEYMNNGNLEEWLHGAMKHHGYLTWEARMKVLTGTSKALAYLHEAIEPKVVHRDIKSSNILIDDRFNAKISDFGLAKLLGDGKSHVTTRVMGTFGYVAPEYANTGLLNEKSDVYSFGVLVLEAITGRDPVDYARPANEVNLVEWLKMMVGSKRLEEVIDPNIAVRPATRALKRVLLTALRCIDPDSEKRPKMSQVVRMLESEEYPVPREKSMQKLYKHKQEFNLQERRVRRTQEENSDTDRSRPVSRSQSKRL

SEQ ID NO: 69805 - protein, 360 aa, Arabidopsis thaliana
  peptide (1)..(360): Ceres Seq. ID no. 1827362
  misc_feature (35)..(306): Pfam Name: Protein kinase domain Pfam Description: Protein kinase domain
  misc_feature (1)..(360): Homolog of NCBI NO: 15217511 NR Description: putative ser/thr protein kinase; protein id: [Arabidopsis thaliana] >gi|25402546|pir||G86227 hypothetical
  misc_feature (1)..(359): Homolog of NCBI NO: 18405946 NR Description: expressed protein; protein id: At1g56720.1,
  misc_feature (1)..(359): Homolog of NCBI NO: 21593085 NR Description: Putative protein kinase [Arabidopsis thaliana]
  misc_feature (1)..(359): Homolog of NCBI NO: 25404144 NR Description: probable protein kinase F25P12.84 [imported] - thaliana >gi|9954741|gb|AAG09092.1|AC009323_3 Putative protein
  misc_feature (1)..(357): Homolog of NCBI NO: 34894708 NR Description: Putative protein kinase [Oryza sativa (japonica group)] >gi|12328581|dbj|BAB21240.1| Putative protein kinase
  misc_feature (1)..(358): Homolog of NCBI NO: 15231637 NR Description: receptor-like protein kinase; protein id:
  misc_feature (1)..(349): Homolog of NCBI NO: 15238840 NR Description: Ser/Thr specific protein kinase - like protein;
  misc_feature (1)..(317): Homolog of NCBI NO: 15228043 NR Description: putative protein kinase; protein id: At2g42960.1
  misc_feature (1)..(347): Homolog of NCBI NO: 22331140 NR Description: serine/threonine protein kinase, putative; id: At3g17420.1, supported by cDNA: gi_17529287, supported by gi_20465832 [Arabidopsis thaliana] >gi|11994680|dbj|BAB02918.1|
  misc_feature (11)..(317): Homolog of NCBI NO: 34897534 NR Description: OSJNBa0042L16.4 [Oryza sativa (japonica
MATPSPSPLSGLPESHLGWGHWFTLRDLEIATNRFSKENVIGEGGYGVVYRGELVNGSLVAVKKILNHLGQAEKEFRVEVDAIGHVRHKNLVRLLGYCIEGTNRILVYEYMNNGNLEEWLHGAMKHHGYLTWEARMKVLTGTSKALAYLHEAIEPKVVHRDIKSSNILIDDRFNAKISDFGLAKLLGDGKSHVTTRVMGTFGYVAPEYANTGLLNEKSDVYSFGVLVLEAITGRDPVDYARPANEVNLVEWLKMMVGSKRLEEVIDPNIAVRPATRALKRVLLTALRCIDPDSEKRPKMSQVVRMLESEEYPVPREKSMQKLYKHKQEFNLQERRVRRTQEENSDTDRSRPVSRSQSKRL

SEQ ID NO: 69806 - DNA, 2415 bp, Arabidopsis thaliana
  misc_feature (1)..(2415): Ceres Seq. ID no. 1827765
  misc_feature: MA Experiment ID: 20000328 Result: Down-regulated in Transcription
  misc_feature: MA Experiment 20000328 PARAMETER Experiment Name: At_42deg_Heat_Sub_P Parameter: Age (day) Value: 14
  misc_feature: MA Experiment 20000328 PARAMETER Experiment Name: At_42deg_Heat_Sub_P Parameter: Organism Value: A. thaliana
  misc_feature: MA Experiment 20000328 PARAMETER Experiment Name: At_42deg_Heat_Sub_P Parameter: Plant Line Value: WS
  misc_feature: MA Experiment 20000328 PARAMETER Experiment Name: At_42deg_Heat_Sub_P Parameter: Temperature (deg C) Value: 42 vs. 22
  misc_feature: MA Experiment 20000328 PARAMETER Experiment Name: At_42deg_Heat_Sub_P Parameter: Timepoint (hr) Value: 6
  misc_feature: MA Experiment 20000328 PARAMETER Experiment Name: At_42deg_Heat_Sub_P Parameter: Tissue Value: Aerial
  misc_feature: MA Experiment ID: 20000355 Result: Up-regulated in Transcription
  misc_feature: MA Experiment 20000355 PARAMETER Experiment Name: At_Siliques_Sub_P Parameter: Age (day) Value: 21
  misc_feature: MA Experiment 20000355 PARAMETER Experiment Name: At_Siliques_Sub_P Parameter: Organism Value: A. thaliana
  misc_feature: MA Experiment 20000355 PARAMETER Experiment Name: At_Siliques_Sub_P Parameter: Plant Line Value: WS
  misc_feature: MA Experiment 20000355 PARAMETER Experiment Name: At_Siliques_Sub_P Parameter: Tissue Value: Less Than 5mm Siliques vs. Whole Plant
  misc_feature: MA Experiment ID: 20000440 Result: Up-regulated in Transcription
  misc_feature: MA Experiment 20000440 PARAMETER Experiment Name: At_Closed-Flower__Sub_P Parameter: Tissue Value: Closed Flower vs. Whole Plant
atggggaagaagaggattgtgttctttgcttgtttgctcttgtttaccgtcctattacgttttagctatgcagggataacgacagaaagtcctttgtcagtcgaacaaacactcagctcctctaatggaatttatgaattggggtttttcagtcctaataactcccaaaatctgtatgtgggaatctggttcaagggtatcattccccgggtggttgtgtgggtggcaaatagagaaacacctactacagacacatcggcaaatcttgctatcagcagcaatggtagtcttctattgtttaatggcaaacatggtgttgtgtggtccatcggagaaaattttgcatctaatgggtctcgtgcagagcttacagacaacggaaatctagttgtcatagacaatgcttcgggaagaactttatgggaaagctttgagcactttggtgacactatgctacctttctcaagcctgatgtataatctcgccacaggtgagaagcgggtgttgacttcttggaaaactgacactgatccatcgcctggcgtatttgtgggtcagattacaccacaagtgccatcacaggtgcttattatgagaggctcgacgcgttattatagaaccggtccatgggctaaaacaaggttcacagggataccactaatggatgacacatatgcaagtccattcagccttcagcaggatgctaacgggtcaggattctttacttattttgatagaagtttcaaactttcacgtataattatatcatcagaaggatcaatgaaaaggtttcggcataatggaacggactgggaattaagctacatggctccagccaattcatgcgatatttacggtgtatgtggaccatttgggttgtgtattgtgtcagtacctttaaagtgcaaatgcttgaaaggatttgttcctcattccactgaggaatggaaaagaggaaactggactggtggttgtgcgaggcttacggaactacattgtcaaggaaactctactggcaaagatgtaaatatcttccatcctgttaccaacgtaaagcttccagacttttacgaatatgaaagttctgtggatgctgaagaatgccaccaaagttgcctccacaattgttcttgcttggcctttgcttatatccatggaatagggtgcttaatctggaaccagaacctaatggacgctgtgcaattttctgctggaggagaaattctgtccattcgtcttgcacactctgaactaggtggaaataagcgcaacaaaatcattgttgctagtactgtgagcctttctctgtttgtgatattgacttctgctgcatttggtttctggagatacagagtgaaacataaagcctatacgttaaaggatgcctggaggaatgatctgaaatcaaaggaggtcccaggtttagaattttttgagatgaataccatacaaactgccaccaataatttcagtctatcaaacaaactcggacaaggtggatttggttctgtttacaagggaaagttacaagatgggaaagaaattgctgtaaaacagctttctagcagctccggacagggaaaagaggagttcatgaatgaaatagtactgatatcaaaactccaacacagaaacttagtccgggttttgggatgttgcatcgaaggagaagagaaactactgatctatgagtttatgttgaacaaaagccttgatacttttgtctttgatgcaagaaaaaagctcgaggttgattggccaaagagatttgatatcgttcaaggtattgcacgtggacttctttatcttcaccgtgactcacgcctcaaggtaattcaccgagacctgaaggtcagcaacattcttctggatgagaaaatgaacccgaaaatatcagattttggattggctcggatgtatgagggaacccaatgtcaggacaaaactcgcagggttgtaggaactctaggatatatgtctcctgagtatgcatggaccggagtattctctgagaaatcagacatttacagcttcggagttctactgctagaaattatcatcggagagaagatctcaaggttcagctatggcgaagaaggaaaaacacttctcgcatatgcatgggaatcttggggtgaaaccaaaggaattgatcttttggaccaagatcttgctgattcatgtcgtccgttagaagttggaaggtgtgttcagattggtctgctctgtgtacaacaccaacctgcagacagaccaaacacacttgagttgctggctatgctcacgacaacatcagatcttccatcaccaaaacaacccacatttgtagtgcactctagggatgatgaatcatctctgtctaaggatttgtttaccgtcaatgagatgacacaatctatgatccttgggcgttaa

SEQ ID NO: 69807 - protein, 804 aa, Arabidopsis thaliana
  peptide (1)..(804): Ceres Seq. ID no. 1827766
  misc_feature (69)..(179): Pfam Name: D-mannose binding lectin Pfam Description: D-mannose binding lectin
  misc_feature (1)..(804): Homolog of NCBI NO: 30682149 NR Description: S-locus protein kinase, putative [Arabidopsis
  misc_feature (246)..(679): Homolog of NCBI NO: 30696575 NR Description: S-locus protein kinase, putative [Arabidopsis
  misc_feature (682)..(804): Homolog of NCBI NO: 30696575 NR Description: S-locus protein kinase, putative [Arabidopsis
  misc_feature (151)..(219): Homolog of NCBI NO: 30696575 NR Description: S-locus protein kinase, putative [Arabidopsis
  misc_feature (6)..(453): Homolog of NCBI NO: 30314606 NR Description: S receptor kinase [Brassica rapa]
  misc_feature (1)..(804): Homolog of NCBI NO: 30682152 NR Description: S-locus protein kinase, putative [Arabidopsis
  misc_feature (471)..(804): Homolog of NCBI NO: 30314606 NR Description: S receptor kinase [Brassica rapa]
  misc_feature (6)..(413): Homolog of NCBI NO: 15220351 NR Description: receptor kinase, putative; protein id:
  misc_feature (468)..(804): Homolog of NCBI NO: 15220351 NR Description: receptor kinase, putative; protein id:
  misc_feature (33)..(781): Homolog of NCBI NO: 25956275 NR Description: unnamed protein product [Lotus japonicus]
MGKKRIVFFACLLLFTVLLRFSYAGITTESPLSVEQTLSSSNGIYELGFFSPNNSQNLYVGIWFKGIIPRVVVWVANRETPTTDTSANLAISSNGSLLLFNGKHGVVWSIGENFASNGSRAELTDNGNLVVIDNASGRTLWESFEHFGDTMLPFSSLMYNLATGEKRVLTSWKTDTDPSPGVFVGQITPQVPSQVLIMRGSTRYYRTGPWAKTRFTGIPLMDDTYASPFSLQQDANGSGFFTYFDRSFKLSRIIISSEGSMKRFRHNGTDWELSYMAPANSCDIYGVCGPFGLCIVSVPLKCKCLKGFVPHSTEEWKRGNWTGGCARLTELHCQGNSTGKDVNIFHPVTNVKLPDFYEYESSVDAEECHQSCLHNCSCLAFAYIHGIGCLIWNQNLMDAVQFSAGGEILSIRLAHSELGGNKRNKIIVASTVSLSLFVILTSAAFGFWRYRVKHKAYTLKDAWRNDLKSKEVPGLEFFEMNTIQTATNNFSLSNKLGQGGFGSVYKGKLQDGKEIAVKQLSSSSGQGKEEFMNEIVLISKLQHRNLVRVLGCCIEGEEKLLIYEFMLNKSLDTFVFDARKKLEVDWPKRFDIVQGIARGLLYLHRDSRLKVIHRDLKVSNILLDEKMNPKISDFGLARMYEGTQCQDKTRRVVGTLGYMSPEYAWTGVFSEKSDIYSFGVLLLEIIIGEKISRFSYGEEGKTLLAYAWESWGETKGIDLLDQDLADSCRPLEVGRCVQIGLLCVQHQPADRPNTLELLAMLTTTSDLPSPKQPTFVVHSRDDESSLSKDLFTVNEMTQSMILGR

SEQ ID NO: 69808 - protein, 654 aa, Arabidopsis thaliana
  peptide (1)..(654): Ceres Seq. ID no. 1827767
  misc_feature (1)..(654): Homolog of NCBI NO: 30682152 NR Description: S-locus protein kinase, putative [Arabidopsis
  misc_feature (1)..(654): Homolog of NCBI NO: 30682149 NR Description: S-locus protein kinase, putative [Arabidopsis
  misc_feature (96)..(529): Homolog of NCBI NO: 30696575 NR Description: S-locus protein kinase, putative [Arabidopsis
  misc_feature (532)..(654): Homolog of NCBI NO: 30696575 NR Description: S-locus protein kinase, putative [Arabidopsis
  misc_feature (1)..(69): Homolog of NCBI NO: 30696575 NR Description: S-locus protein kinase, putative [Arabidopsis
  misc_feature (1)..(303): Homolog of NCBI NO: 30314606 NR Description: S receptor kinase [Brassica rapa]
  misc_feature (321)..(654): Homolog of NCBI NO: 30314606 NR Description: S receptor kinase [Brassica rapa]
  misc_feature (1)..(263): Homolog of NCBI NO: 15220351 NR Description: receptor kinase, putative; protein id:
  misc_feature (318)..(654): Homolog of NCBI NO: 15220351 NR Description: receptor kinase, putative; protein id:
  misc_feature (1)..(631): Homolog of NCBI NO: 25956275 NR Description: unnamed protein product [Lotus japonicus]
MLPFSSLMYNLATGEKRVLTSWKTDTDPSPGVFVGQITPQVPSQVLIMRGSTRYYRTGPWAKTRFTGIPLMDDTYASPFSLQQDANGSGFFTYFDRSFKLSRIIISSEGSMKRFRHNGTDWELSYMAPANSCDIYGVCGPFGLCIVSVPLKCKCLKGFVPHSTEEWKRGNWTGGCARLTELHCQGNSTGKDVNIFHPVTNVKLPDFYEYESSVDAEECHQSCLHNCSCLAFAYIHGIGCLIWNQNLMDAVQFSAGGEILSIRLAHSELGGNKRNKIIVASTVSLSLFVILTSAAFGFWRYRVKHKAYTLKDAWRNDLKSKEVPGLEFFEMNTIQTATNNFSLSNKLGQGGFGSVYKGKLQDGKEIAVKQLSSSSGQGKEEFMNEIVLISKLQHRNLVRVLGCCIEGEEKLLIYEFMLNKSLDTFVFDARKKLEVDWPKRFDIVQGIARGLLYLHRDSRLKVIHRDLKVSNILLDEKMNPKISDFGLARMYEGTQCQDKTRRVVGTLGYMSPEYAWTGVFSEKSDIYSFGVLLLEIIIGEKISRFSYGEEGKTLLAYAWESWGETKGIDLLDQDLADSCRPLEVGRCVQIGLLCVQHQPADRPNTLELLAMLTTTSDLPSPKQPTFVVHSRDDESSLSKDLFTVNEMTQSMILGR

SEQ ID NO: 69809 - protein, 647 aa, Arabidopsis thaliana
  peptide (1)..(647): Ceres Seq. ID no. 1827768
  misc_feature (1)..(647): Homolog of NCBI NO: 30682152 NR Description: S-locus protein kinase, putative [Arabidopsis
  misc_feature (1)..(647): Homolog of NCBI NO: 30682149 NR Description: S-locus protein kinase, putative [Arabidopsis
  misc_feature (89)..(522): Homolog of NCBI NO: 30696575 NR Description: S-locus protein kinase, putative [Arabidopsis
  misc_feature (525)..(647): Homolog of NCBI NO: 30696575 NR Description: S-locus protein kinase, putative [Arabidopsis
  misc_feature (1)..(62): Homolog of NCBI NO: 30696575 NR Description: S-locus protein kinase, putative [Arabidopsis
  misc_feature (1)..(296): Homolog of NCBI NO: 30314606 NR Description: S receptor kinase [Brassica rapa]
  misc_feature (314)..(647): Homolog of NCBI NO: 30314606 NR Description: S receptor kinase [Brassica rapa]
  misc_feature (1)..(256): Homolog of NCBI NO: 15220351 NR Description: receptor kinase, putative; protein id:
  misc_feature (311)..(647): Homolog of NCBI NO: 15220351 NR Description: receptor kinase, putative; protein id:
  misc_feature (1)..(624): Homolog of NCBI NO: 25956275 NR Description: unnamed protein product [Lotus japonicus]
MYNLATGEKRVLTSWKTDTDPSPGVFVGQITPQVPSQVLIMRGSTRYYRTGPWAKTRFTGIPLMDDTYASPFSLQQDANGSGFFTYFDRSFKLSRIIISSEGSMKRFRHNGTDWELSYMAPANSCDIYGVCGPFGLCIVSVPLKCKCLKGFVPHSTEEWKRGNWTGGCARLTELHCQGNSTGKDVNIFHPVTNVKLPDFYEYESSVDAEECHQSCLHNCSCLAFAYIHGIGCLIWNQNLMDAVQFSAGGEILSIRLAHSELGGNKRNKIIVASTVSLSLFVILTSAAFGFWRYRVKHKAYTLKDAWRNDLKSKEVPGLEFFEMNTIQTATNNFSLSNKLGQGGFGSVYKGKLQDGKEIAVKQLSSSSGQGKEEFMNEIVLISKLQHRNLVRVLGCCIEGEEKLLIYEFMLNKSLDTFVFDARKKLEVDWPKRFDIVQGIARGLLYLHRDSRLKVIHRDLKVSNILLDEKMNPKISDFGLARMYEGTQCQDKTRRVVGTLGYMSPEYAWTGVFSEKSDIYSFGVLLLEIIIGEKISRFSYGEEGKTLLAYAWESWGETKGIDLLDQDLADSCRPLEVGRCVQIGLLCVQHQPADRPNTLELLAMLTTTSDLPSPKQPTFVVHSRDDESSLSKDLFTVNEMTQSMILGR

SEQ ID NO: 69810 - DNA, 2346 bp, Arabidopsis thaliana
  misc_feature (1)..(2346): Ceres Seq. ID no. 1827781
  misc_feature: MA Experiment ID: 20000314 Result: Up-regulated in Transcription
  misc_feature: MA Experiment 20000314 PARAMETER Experiment Name: At_14day_Shoots-Roots_Sub_P Parameter: Age (day) Value: 14
  misc_feature: MA Experiment 20000314 PARAMETER Experiment Name: At_14day_Shoots-Roots_Sub_P Parameter: Organism Value: A. thaliana
  misc_feature: MA Experiment 20000314 PARAMETER Experiment Name: At_14day_Shoots-Roots_Sub_P Parameter: Plant Line Value: WS
  misc_feature: MA Experiment 20000314 PARAMETER Experiment Name: At_14day_Shoots-Roots_Sub_P Parameter: Tissue Value: Roots vs. Whole Plant
  misc_feature: MA Experiment ID: 20000348 Result: Up-regulated in Transcription
  misc_feature: MA Experiment 20000348 PARAMETER Experiment Name: At_100uM_ABA_Sub_P Parameter: Age (day) Value: 14
  misc_feature: MA Experiment 20000348 PARAMETER Experiment Name: At_100uM_ABA_Sub_P Parameter: Organism Value: A. thaliana
  misc_feature: MA Experiment 20000348 PARAMETER Experiment Name: At_100uM_ABA_Sub_P Parameter: Plant Line Value: WS
  misc_feature: MA Experiment 20000348 PARAMETER Experiment Name: At_100uM_ABA_Sub_P Parameter: Timepoint (hr) Value: 1
  misc_feature: MA Experiment 20000348 PARAMETER Experiment Name: At_100uM_ABA_Sub_P Parameter: Tissue Value: Aerial
  misc_feature: MA Experiment 20000348 PARAMETER Experiment Name: At_100uM_ABA_Sub_P Parameter: Treatment Value: 100uM ABA vs. No Treatment
atgactgatgaggtagacggtgacgcatggctttcggatttagttgacgtgtcgtttctcgctactaaaacggcagaacaatcagagatgatagaaaccggcggagataaacagagctccgtcgaggaaggatgtggtggccgtacgattcttgtcggcgtgaagcttgacgctccgagcagagagttactcacttgggctctggttaaagtcgctgagcctggtgatactgtgatcgctcttcatatccttggaaatgagattgtggatcgcgcagggaactcttcgcttctctctctggttagaactttcgactctgttcttgacgtttatgaaggtttctgcaatttgaaacaggtggatctgaagctgaagctatgtcgtggttcctctgctcgaaagattttagttagggaagcgaaatcgttttctgcaacgaaagttttagttgggatttcaaaaagtcaccacgcgattcgttcatcagcttctgtagctaagtacatagcgaagaaactatcaaaggattgttgggttattgctgtaaacaatggtaaaatcttgttccaaaaggaaggttctccatcatctaccattaatcaatctcaaggaaaggaagatgttcggaggattactttgttgaatgtgcttcagagatctgttacattgaataagactactaaagtagttagccattctgaggaagattctaactctaaggaggaggaggaggatcaagcctgtggccagaatctacggcaagtcttagcggctgctcgtttggagaattgctcggtttgtggttttgattctttgtctccgaacgatacaactactcctggaaagttgtctggagcttcagattttgataggagtgaagatgatgatgagtgcaacaaagcaatggagattgtgcctgtgaatggttcagaagattcaggcggttctgtaactatgttggttaggaaattgcctgaacctagaccaggttggcctttgcttcgtcgtgctgtttctacattaggacaatctgttactcctcataagataccggtagttcaatgggctttgaagcttcctcctagggatactaagcaacttggttatgattcttctgaagataatttgtcaaccttaaacgcacttaggttctcttcaacttgccggtttttcaagtacaaggaactcgtttcagtgacatcgaatttctccgctgataattttattgggaaaggaggcagcagccgggtttttagaggttgtttgtccaatggaagagtggttgctgtgaagattctcaagcaaaccgaagatgtcttgaatgacttcgtggctgagattgagatcatcacaacattacaccataagaatattatctccctcttaggattttgctttgaagaccataaccttttacttgtatacaattatctctcaagaggaagccttgaagagaaccttcatggaaacaagaaagatccgcttgcattttgttggagcgagaggtataaagtggctgtgggagtagcagaggcattggactatctgcataatactgcttcgcaacccgtcatccacagagatgttaagtcatcaaacatactattatctgatgattttgagccacagctttctgattttggacttgcaaggtgggcgtctatatctacgacacacataatctgctctgatgtcgcgggaacttttggatacttggctccagagtacttcatgtatggtaaggtgaatgataagatagatgtgtatgcattcggcgttgttctcctcgagttactttcgggaagaaaaccgattagcagcggatgtccaaagggacaagagagtctagtcatgtgggtatgtacaactgcaaaccaattaagtcaaaaccaagctttttctatactcttattgaaaacaagtatgtatgatgttcatatacaggccaaaccaattctagatgatggaaagtattctcagttattagacccgagtttgcgggataacaacaacaataatgatgaccaaatgcagaggatggcgttagctgctactctttgtattcgacgtagtcctcaagctagaccgaaaatgagcatcgtattaaagctacttaaaggtgatgaagacacgcttgagtgggcaatgcagcaagtgaatagttcatcagaggagtcagagatgctcaaagatgagcaatgccaaagatctaacttgcaatcacaccttaacttagcacttcttgatgttgaagatgactcaatctccatgggaagcattgagcaaggtgtctctgttgaggattatctaaaaggtaggacaagccgttcttcgagcttcgactaa

SEQ ID NO: 69811 - protein, 781 aa, Arabidopsis thaliana
  peptide (1)..(781): Ceres Seq. ID no. 1827782
  misc_feature (47)..(181): Pfam Name: Universal stress protein family Pfam Description: Universal stress protein family
  misc_feature (38)..(383): Homolog of NCBI NO: 22329713 NR Description: hypothetical protein; protein id: At1g21590.1, by cDNA: gi_18086337 [Arabidopsis thaliana] At1g21590/F24J8_9 [Arabidopsis thaliana]
  misc_feature (374)..(644): Homolog of NCBI NO: 22329713 NR Description: hypothetical protein; protein id: At1g21590.1, by cDNA: gi_18086337 [Arabidopsis thaliana] At1g21590/F24J8_9 [Arabidopsis thaliana]
  misc_feature (649)..(781): Homolog of NCBI NO: 22329713 NR Description: hypothetical protein; protein id: At1g21590.1, by cDNA: gi_18086337 [Arabidopsis thaliana] At1g21590/F24J8_9 [Arabidopsis thaliana]
  misc_feature (38)..(644): Homolog of NCBI NO: 25518708 NR Description: hypothetical protein F24J8.18 - Arabidopsis >gi|9454581|gb|AAF87904.1|AC015447_14 Similar to protein kinases
  misc_feature (649)..(781): Homolog of NCBI NO: 25518708 NR Description: hypothetical protein F24J8.18 - Arabidopsis >gi|9454581|gb|AAF87904.1|AC015447_14 Similar to protein kinases
  misc_feature (367)..(637): Homolog of NCBI NO: 15237563 NR Description: putative protein; protein id: At5g63940.1, by cDNA: gi_20260317 [Arabidopsis thaliana] contains similarity to protein kinase~gene_id:MBM17.4
  misc_feature (32)..(191): Homolog of NCBI NO: 15237563 NR Description: putative protein; protein id: At5g63940.1, by cDNA: gi_20260317 [Arabidopsis thaliana] contains similarity to protein kinase~gene_id:MBM17.4
  misc_feature (649)..(781): Homolog of NCBI NO: 15237563 NR Description: putative protein; protein id: At5g63940.1, by cDNA: gi_20260317 [Arabidopsis thaliana] contains similarity to protein kinase~gene_id:MBM17.4
  misc_feature (47)..(378): Homolog of NCBI NO: 28376688 NR Description: putative serine/threonine kinase [Oryza sativa
  misc_feature (383)..(619): Homolog of NCBI NO: 28376688 NR Description: putative serine/threonine kinase [Oryza sativa
MTDEVDGDAWLSDLVDVSFLATKTAEQSEMIETGGDKQSSVEEGCGGRTILVGVKLDAPSRELLTWALVKVAEPGDTVIALHILGNEIVDRAGNSSLLSLVRTFDSVLDVYEGFCNLKQVDLKLKLCRGSSARKILVREAKSFSATKVLVGISKSHHAIRSSASVAKYIAKKLSKDCWVIAVNNGKILFQKEGSPSSTINQSQGKEDVRRITLLNVLQRSVTLNKTTKVVSHSEEDSNSKEEEEDQACGQNLRQVLAAARLENCSVCGFDSLSPNDTTTPGKLSGASDFDRSEDDDECNKAMEIVPVNGSEDSGGSVTMLVRKLPEPRPGWPLLRRAVSTLGQSVTPHKIPVVQWALKLPPRDTKQLGYDSSEDNLSTLNALRFSSTCRFFKYKELVSVTSNFSADNFIGKGGSSRVFRGCLSNGRVVAVKILKQTEDVLNDFVAEIEIITTLHHKNIISLLGFCFEDHNLLLVYNYLSRGSLEENLHGNKKDPLAFCWSERYKVAVGVAEALDYLHNTASQPVIHRDVKSSNILLSDDFEPQLSDFGLARWASISTTHIICSDVAGTFGYLAPEYFMYGKVNDKIDVYAFGVVLLELLSGRKPISSGCPKGQESLVMWVCTTANQLSQNQAFSILLLKTSMYDVHIQAKPILDDGKYSQLLDPSLRDNNNNNDDQMQRMALAATLCIRRSPQARPKMSIVLKLLKGDEDTLEWAMQQVNSSSEESEMLKDEQCQRSNLQSHLNLALLDVEDDSISMGSIEQGVSVEDYLKGRTSRSSSFD

SEQ ID NO: 69812 - protein, 752 aa, Arabidopsis thaliana
  peptide (1)..(752): Ceres Seq. ID no. 1827783
  misc_feature (18)..(152): Pfam Name: Universal stress protein family Pfam Description: Universal stress protein family
  misc_feature (9)..(354): Homolog of NCBI NO: 22329713 NR Description: hypothetical protein; protein id: At1g21590.1, by cDNA: gi_18086337 [Arabidopsis thaliana] At1g21590/F24J8_9 [Arabidopsis thaliana]
  misc_feature (345)..(615): Homolog of NCBI NO: 22329713 NR Description: hypothetical protein; protein id: At1g21590.1, by cDNA: gi_18086337 [Arabidopsis thaliana] At1g21590/F24J8_9 [Arabidopsis thaliana]
  misc_feature (620)..(752): Homolog of NCBI NO: 22329713 NR Description: hypothetical protein; protein id: At1g21590.1, by cDNA: gi_18086337 [Arabidopsis thaliana] At1g21590/F24J8_9 [Arabidopsis thaliana]
  misc_feature (9)..(615): Homolog of NCBI NO: 25518708 NR Description: hypothetical protein F24J8.18 - Arabidopsis >gi|9454581|gb|AAF87904.1|AC015447_14 Similar to protein kinases
  misc_feature (620)..(752): Homolog of NCBI NO: 25518708 NR Description: hypothetical protein F24J8.18 - Arabidopsis >gi|9454581|gb|AAF87904.1|AC015447_14 Similar to protein kinases
  misc_feature (338)..(608): Homolog of NCBI NO: 15237563 NR Description: putative protein; protein id: At5g63940.1, by cDNA: gi_20260317 [Arabidopsis thaliana] contains similarity to protein kinase~gene_id:MBM17.4
  misc_feature (3)..(162): Homolog of NCBI NO: 15237563 NR Description: putative protein; protein id: At5g63940.1, by cDNA: gi_20260317 [Arabidopsis thaliana] contains similarity to protein kinase~gene_id:MBM17.4
  misc_feature (620)..(752): Homolog of NCBI NO: 15237563 NR Description: putative protein; protein id: At5g63940.1, by cDNA: gi_20260317 [Arabidopsis thaliana] contains similarity to protein kinase~gene_id:MBM17.4
  misc_feature (18)..(349): Homolog of NCBI NO: 28376688 NR Description: putative serine/threonine kinase [Oryza sativa
  misc_feature (354)..(590): Homolog of NCBI NO: 28376688 NR Description: putative serine/threonine kinase [Oryza sativa
MIETGGDKQSSVEEGCGGRTILVGVKLDAPSRELLTWALVKVAEPGDTVIALHILGNEIVDRAGNSSLLSLVRTFDSVLDVYEGFCNLKQVDLKLKLCRGSSARKILVREAKSFSATKVLVGISKSHHAIRSSASVAKYIAKKLSKDCWVIAVNNGKILFQKEGSPSSTINQSQGKEDVRRITLLNVLQRSVTLNKTTKVVSHSEEDSNSKEEEEDQACGQNLRQVLAAARLENCSVCGFDSLSPNDTTTPGKLSGASDFDRSEDDDECNKAMEIVPVNGSEDSGGSVTMLVRKLPEPRPGWPLLRRAVSTLGQSVTPHKIPVVQWALKLPPRDTKQLGYDSSEDNLSTLNALRFSSTCRFFKYKELVSVTSNFSADNFIGKGGSSRVFRGCLSNGRVVAVKILKQTEDVLNDFVAEIEIITTLHHKNIISLLGFCFEDHNLLLVYNYLSRGSLEENLHGNKKDPLAFCWSERYKVAVGVAEALDYLHNTASQPVIHRDVKSSNILLSDDFEPQLSDFGLARWASISTTHIICSDVAGTFGYLAPEYFMYGKVNDKIDVYAFGVVLLELLSGRKPISSGCPKGQESLVMWVCTTANQLSQNQAFSILLLKTSMYDVHIQAKPILDDGKYSQLLDPSLRDNNNNNDDQMQRMALAATLCIRRSPQARPKMSIVLKLLKGDEDTLEWAMQQVNSSSEESEMLKDEQCQRSNLQSHLNLALLDVEDDSISMGSIEQGVSVEDYLKGRTSRSSSFD

SEQ ID NO: 69813 - protein, 480 aa, Arabidopsis thaliana
  peptide (1)..(480): Ceres Seq. ID no. 1827784
  misc_feature (1)..(82): Homolog of NCBI NO: 22329713 NR Description: hypothetical protein; protein id: At1g21590.1, by cDNA: gi_18086337 [Arabidopsis thaliana] At1g21590/F24J8_9 [Arabidopsis thaliana]
  misc_feature (73)..(343): Homolog of NCBI NO: 22329713 NR Description: hypothetical protein; protein id: At1g21590.1, by cDNA: gi_18086337 [Arabidopsis thaliana] At1g21590/F24J8_9 [Arabidopsis thaliana]
  misc_feature (348)..(480): Homolog of NCBI NO: 22329713 NR Description: hypothetical protein; protein id: At1g21590.1, by cDNA: gi_18086337 [Arabidopsis thaliana] At1g21590/F24J8_9 [Arabidopsis thaliana]
  misc_feature (1)..(343): Homolog of NCBI NO: 25518708 NR Description: hypothetical protein F24J8.18 - Arabidopsis >gi|9454581|gb|AAF87904.1|AC015447_14 Similar to protein kinases
  misc_feature (348)..(480): Homolog of NCBI NO: 25518708 NR Description: hypothetical protein F24J8.18 - Arabidopsis >gi|9454581|gb|AAF87904.1|AC015447_14 Similar to protein kinases
  misc_feature (66)..(336): Homolog of NCBI NO: 15237563 NR Description: putative protein; protein id: At5g63940.1, by cDNA: gi_20260317 [Arabidopsis thaliana] contains similarity to protein kinase~gene_id:MBM17.4
  misc_feature (348)..(480): Homolog of NCBI NO: 15237563 NR Description: putative protein; protein id: At5g63940.1, by cDNA: gi_20260317 [Arabidopsis thaliana] contains similarity to protein kinase~gene_id:MBM17.4
  misc_feature (1)..(77): Homolog of NCBI NO: 28376688 NR Description: putative serine/threonine kinase [Oryza sativa
  misc_feature (82)..(318): Homolog of NCBI NO: 28376688 NR Description: putative serine/threonine kinase [Oryza sativa
  misc_feature (348)..(480): Homolog of NCBI NO: 28376688 NR Description: putative serine/threonine kinase [Oryza sativa
MEIVPVNGSEDSGGSVTMLVRKLPEPRPGWPLLRRAVSTLGQSVTPHKIPVVQWALKLPPRDTKQLGYDSSEDNLSTLNALRFSSTCRFFKYKELVSVTSNFSADNFIGKGGSSRVFRGCLSNGRVVAVKILKQTEDVLNDFVAEIEIITTLHHKNIISLLGFCFEDHNLLLVYNYLSRGSLEENLHGNKKDPLAFCWSERYKVAVGVAEALDYLHNTASQPVIHRDVKSSNILLSDDFEPQLSDFGLARWASISTTHIICSDVAGTFGYLAPEYFMYGKVNDKIDVYAFGVVLLELLSGRKPISSGCPKGQESLVMWVCTTANQLSQNQAFSILLLKTSMYDVHIQAKPILDDGKYSQLLDPSLRDNNNNNDDQMQRMALAATLCIRRSPQARPKMSIVLKLLKGDEDTLEWAMQQVNSSSEESEMLKDEQCQRSNLQSHLNLALLDVEDDSISMGSIEQGVSVEDYLKGRTSRSSSFD

SEQ ID NO: 69814 - DNA, 2265 bp, Arabidopsis thaliana
  misc_feature (1)..(2265): Ceres Seq. ID no. 1828083
  misc_feature: MA Experiment ID: 20000173 Result: Down-regulated in Transcription
  misc_feature: MA Experiment 20000173 PARAMETER Experiment Name: At_42deg_Heat_P Parameter: Age (day) Value: 14
  misc_feature: MA Experiment 20000173 PARAMETER Experiment Name: At_42deg_Heat_P Parameter: Organism Value: A. thaliana
  misc_feature: MA Experiment 20000173 PARAMETER Experiment Name: At_42deg_Heat_P Parameter: Plant Line Value: WS
  misc_feature: MA Experiment 20000173 PARAMETER Experiment Name: At_42deg_Heat_P Parameter: Temperature (deg C) Value: 42 vs. 22
  misc_feature: MA Experiment 20000173 PARAMETER Experiment Name: At_42deg_Heat_P Parameter: Timepoint (hr) Value: 6
  misc_feature: MA Experiment 20000173 PARAMETER Experiment Name: At_42deg_Heat_P Parameter: Tissue Value: Aerial
  misc_feature: MA Experiment ID: 20000264 Result: Up-regulated in Transcription
  misc_feature: MA Experiment 20000264 PARAMETER Experiment Name: At_Open_Flower_P Parameter: Age (day) Value: 21
  misc_feature: MA Experiment 20000264 PARAMETER Experiment Name: At_Open_Flower_P Parameter: Plant Line Value: WS
  misc_feature: MA Experiment 20000264 PARAMETER Experiment Name: At_Open_Flower_P Parameter: Tissue Value: Open Flower vs. Whole Plant
  misc_feature: MA Experiment ID: 20000286 Result: Up-regulated in Transcription
  misc_feature: MA Experiment 20000286 PARAMETER Experiment Name: At_Open_Flower_P Parameter: Age (day) Value: 21
  misc_feature: MA Experiment 20000286 PARAMETER Experiment Name: At_Open_Flower_P Parameter: Plant Line Value: WS
  misc_feature: MA Experiment 20000286 PARAMETER Experiment Name: At_Open_Flower_P Parameter: Tissue Value: Half Open vs. Whole Plant
  misc_feature: MA Experiment ID: 20001557 Result: Up-regulated in Transcription
  misc_feature: MA Experiment 20001557 PARAMETER Experiment Name: At_Drought_Soil_Dry_P Parameter: Age (day) Value: 27
  misc_feature: MA Experiment 20001557 PARAMETER Experiment Name: At_Drought_Soil_Dry_P Parameter: Organism Value: A. thaliana
  misc_feature: MA Experiment 20001557 PARAMETER Experiment Name: At_Drought_Soil_Dry_P Parameter: Plant Line Value: WS
  misc_feature: MA Experiment 20001557 PARAMETER Experiment Name: At_Drought_Soil_Dry_P Parameter: Post Timepoint (hr) Value: 3
  misc_feature: MA Experiment 20001557 PARAMETER Experiment Name: At_Drought_Soil_Dry_P Parameter: Post-Treatment Value: Re-Water vs. No Drought
  misc_feature: MA Experiment 20001557 PARAMETER Experiment Name: At_Drought_Soil_Dry_P Parameter: Timepoint (day) Value: 13
  misc_feature: MA Experiment 20001557 PARAMETER Experiment Name: At_Drought_Soil_Dry_P Parameter: Treatment Value: Drought vs. No Drought
  misc_feature: MA Experiment ID: 20001558 Result: Up-regulated in Transcription
  misc_feature: MA Experiment 20001558 PARAMETER Experiment Name: At_Drought_Soil_Dry_P Parameter: Age (day) Value: 27
  misc_feature: MA Experiment 20001558 PARAMETER Experiment Name: At_Drought_Soil_Dry_P Parameter: Organism Value: A. thaliana
  misc_feature: MA Experiment 20001558 PARAMETER Experiment Name: At_Drought_Soil_Dry_P Parameter: Plant Line Value: WS
  misc_feature: MA Experiment 20001558 PARAMETER Experiment Name: At_Drought_Soil_Dry_P Parameter: Post Timepoint (hr) Value: 6
  misc_feature: MA Experiment 20001558 PARAMETER Experiment Name: At_Drought_Soil_Dry_P Parameter: Post-Treatment Value: Re-Water vs. No Drought
  misc_feature: MA Experiment 20001558 PARAMETER Experiment Name: At_Drought_Soil_Dry_P Parameter: Timepoint (day) Value: 13
  misc_feature: MA Experiment 20001558 PARAMETER Experiment Name: At_Drought_Soil_Dry_P Parameter: Treatment Value: Drought vs. No Drought
  misc_feature: Pfam Name: Pkinase Pfam Description: Protein kinase domain
atggctgctaagagatctatctactgtcttcttcttcttcctctgctcttgtctttactgatctggattccttcgatctccttagctgctactaaccctgatgatgttgctgcaattaacggattattcgctgcacttggagcacctgttcttcctggttggattgcttctggtggagacccatgtggtgaagcttggcaaggcattatctgcaatgtttcagatattataagcataactgtaaatgctgcaaatttgcaaggagagcttggtgacaacttagctaagttcacttctatcaggggaatagatttcagcaacaatcgcattggaggaagcataccttctactttgccggttacattgcagcatttttttctttcagctaatcagttcaccggaagcatcccggaatctctaggaacattgagttttctgaatgacatgtctttgaacgataaccttctctctggagagctacccgacgtgtttcaaaaccttgtcgggctgattaatcttgatatatcatctaacaatataagcggcacattgcctccttctatggagaatttattaactcttacaacattaaacatagagaataacctcttctctggacccataccggacaaattactaagcattccgaaattcctacatgaaggaaacccgttcaatgccacaatgatcaattccacctcgactgcaccatcattgtctccgtctctatctccaacaaaaccagctccaacgcgaccattttctggagttccacctcctccaaatgagaggaatcgagggaaagttgctgatggaccttctgattcagaaggatcgagctctgagaattcaaagggaaagaactcttcacatactaaaaagataatccttattgcattcgctggcgtcctcgtcttcataattctggttttggcaatactcttgctgttgccaaaatgtgcaagacgtagagaacatgctaacagagttttcaaaccgcatcaagttggtgctgatagaggaagcagagagaatgctctggaaaacgggactccggtactgccaccacctggtcgatctgaaaaagttcaaagagaacccttcaagaaagctggagaggaaccaaaggtcttacatgaccttgagaggctgcggagacctgcacctatatcaagacaggaaagtcaagatattgacttttcaatgttgatgcctcctcctccaccacctccaccaccaccaccacctcctcctttggatgagaaggtcacggttatgccaatcatatcacccgaaagacccgttaagaaaacttcccctaaacgcttacccttaacttctgtgaagcactattctattgcttctcttcaacaatacacggaaagcttcgctcaggaaaatctcattggctcaggcatgctcggtagtgtttatagggcccggcttcccaatggaaagttgtttgctgtcaagaagttggacaagagggcttctgaacaacaacaggatcacgaatttatcgaactagtgaacaatatagatatgattcgccactccaatatcgttgaacttgtgggttactgtgctgagcacgatcaaagactattggtctacgaatattgcagtaacggtacgttacaagacgggttgcattcagacgatgaattcaagaagaaactttcgtggaatacccgtgtcagtatggcacttggagctgctagagcccttgagtacttgcatgaggtgtgtgaaccacctatcatacacagaaacttcaaatcagccaatgttctactcgacgatgacctgagtgttcttgtctcagattgtggtttggccccactaatatcatcaggctctgtgagtcagttatcagggcaattgctagccgcttacggatatggagctccagagttcgactctggaatctatacatggcagagtgatgtatatagttttggtgttgttatgttagaactattgacgggtagaatgtcctacgatagggaccggagtagaggagagcagttcttggtgaggtgggcaatcccacagcttcatgatatcgatgcattgggcaaaatggttgatccatctcttaatggacaataccctgcaaagtcattgtcacactttgctgatataatatcccggtgtgttcagtctgaaccagaatttagaccactgatgtcagaagttgttcaagatctactagatatgatcagaagagagcgtcatggttcgggtgattctaccgcggactag

SEQ ID NO: 69815 - protein, 754 aa, Arabidopsis thaliana
  peptide (1)..(754): Ceres Seq. ID no. 1828084
  misc_feature: Pfam Name: Pkinase Pfam Description: Protein kinase domain
  misc_feature (10)..(754): Homolog of NCBI NO: 18399502 NR Description: putative LRR receptor protein kinase; protein id: supported by cDNA: gi_15810274 [Arabidopsis thaliana] putative LRR receptor protein kinase receptor protein kinase
  misc_feature (364)..(754): Homolog of NCBI NO: 25411997 NR Description: probable LRR receptor protein kinase [imported] -
  misc_feature (10)..(215): Homolog of NCBI NO: 25411997 NR Description: probable LRR receptor protein kinase [imported] -
  misc_feature (99)..(262): Homolog of NCBI NO: 25411997 NR Description: probable LRR receptor protein kinase [imported] -
  misc_feature (72)..(140): Homolog of NCBI NO: 25411997 NR Description: probable LRR receptor protein kinase [imported] -
  misc_feature (359)..(743): Homolog of NCBI NO: 29367551 NR Description: putative leucine-rich repeat transmembrane
  misc_feature (29)..(329): Homolog of NCBI NO: 29367551 NR Description: putative leucine-rich repeat transmembrane
  misc_feature (393)..(743): Homolog of NCBI NO: 15217283 NR Description: Putative leucine-rich repeat transmembrane
  misc_feature (10)..(335): Homolog of NCBI NO: 15217283 NR Description: Putative leucine-rich repeat transmembrane
  misc_feature (394)..(743): Homolog of NCBI NO: 7489783 NR Description: leucine-rich repeat transmembrane protein kinase
MAAKRSIYCLLLLPLLLSLLIWIPSISLAATNPDDVAAINGLFAALGAPVLPGWIASGGDPCGEAWQGIICNVSDIISITVNAANLQGELGDNLAKFTSIRGIDFSNNRIGGSIPSTLPVTLQHFFLSANQFTGSIPESLGTLSFLNDMSLNDNLLSGELPDVFQNLVGLINLDISSNNISGTLPPSMENLLTLTTLNIENNLFSGPIPDKLLSIPKFLHEGNPFNATMINSTSTAPSLSPSLSPTKPAPTRPFSGVPPPPNERNRGKVADGPSDSEGSSSENSKGKNSSHTKKIILIAFAGVLVFIILVLAILLLLPKCARRREHANRVFKPHQVGADRGSRENALENGTPVLPPPGRSEKVQREPFKKAGEEPKVLHDLERLRRPAPISRQESQDIDFSMLMPPPPPPPPPPPPPPLDEKVTVMPIISPERPVKKTSPKRLPLTSVKHYSIASLQQYTESFAQENLIGSGMLGSVYRARLPNGKLFAVKKLDKRASEQQQDHEFIELVNNIDMIRHSNIVELVGYCAEHDQRLLVYEYCSNGTLQDGLHSDDEFKKKLSWNTRVSMALGAARALEYLHEVCEPPIIHRNFKSANVLLDDDLSVLVSDCGLAPLISSGSVSQLSGQLLAAYGYGAPEFDSGIYTWQSDVYSFGVVMLELLTGRMSYDRDRSRGEQFLVRWAIPQLHDIDALGKMVDPSLNGQYPAKSLSHFADIISRCVQSEPEFRPLMSEVVQDLLDMIRRERHGSGDSTAD

SEQ ID NO: 69816 - protein, 606 aa, Arabidopsis thaliana
  peptide (1)..(606): Ceres Seq. ID no. 1828085
  misc_feature: Pfam Name: Pkinase Pfam Description: Protein kinase domain
  misc_feature (1)..(606): Homolog of NCBI NO: 18399502 NR Description: putative LRR receptor protein kinase; protein id: supported by cDNA: gi_15810274 [Arabidopsis thaliana] putative LRR receptor protein kinase receptor protein kinase
  misc_feature (216)..(606): Homolog of NCBI NO: 25411997 NR Description: probable LRR receptor protein kinase [imported] -
  misc_feature (1)..(67): Homolog of NCBI NO: 25411997 NR Description: probable LRR receptor protein kinase [imported] -
  misc_feature (1)..(114): Homolog of NCBI NO: 25411997 NR Description: probable LRR receptor protein kinase [imported] -
  misc_feature (211)..(595): Homolog of NCBI NO: 29367551 NR Description: putative leucine-rich repeat transmembrane
  misc_feature (1)..(181): Homolog of NCBI NO: 29367551 NR Description: putative leucine-rich repeat transmembrane
  misc_feature (245)..(595): Homolog of NCBI NO: 15217283 NR Description: Putative leucine-rich repeat transmembrane
  misc_feature (1)..(187): Homolog of NCBI NO: 15217283 NR Description: Putative leucine-rich repeat transmembrane
  misc_feature (246)..(595): Homolog of NCBI NO: 7489783 NR Description: leucine-rich repeat transmembrane protein kinase
  misc_feature (1)..(187): Homolog of NCBI NO: 7489783 NR Description: leucine-rich repeat transmembrane protein kinase
MSLNDNLLSGELPDVFQNLVGLINLDISSNNISGTLPPSMENLLTLTTLNIENNLFSGPIPDKLLSIPKFLHEGNPFNATMINSTSTAPSLSPSLSPTKPAPTRPFSGVPPPPNERNRGKVADGPSDSEGSSSENSKGKNSSHTKKIILIAFAGVLVFIILVLAILLLLPKCARRREHANRVFKPHQVGADRGSRENALENGTPVLPPPGRSEKVQREPFKKAGEEPKVLHDLERLRRPAPISRQESQDIDFSMLMPPPPPPPPPPPPPPLDEKVTVMPIISPERPVKKTSPKRLPLTSVKHYSIASLQQYTESFAQENLIGSGMLGSVYRARLPNGKLFAVKKLDKRASEQQQDHEFIELVNNIDMIRHSNIVELVGYCAEHDQRLLVYEYCSNGTLQDGLHSDDEFKKKLSWNTRVSMALGAARALEYLHEVCEPPIIHRNFKSANVLLDDDLSVLVSDCGLAPLISSGSVSQLSGQLLAAYGYGAPEFDSGIYTWQSDVYSFGVVMLELLTGRMSYDRDRSRGEQFLVRWAIPQLHDIDALGKMVDPSLNGQYPAKSLSHFADIISRCVQSEPEFRPLMSEVVQDLLDMIRRERHGSGDSTAD

SEQ ID NO: 69817 - protein, 567 aa, Arabidopsis thaliana
  peptide (1)..(567): Ceres Seq. ID no. 1828086
  misc_feature: Pfam Name: Pkinase Pfam Description: Protein kinase domain
  misc_feature (1)..(567): Homolog of NCBI NO: 18399502 NR Description: putative LRR receptor protein kinase; protein id: supported by cDNA: gi_15810274 [Arabidopsis thaliana] putative LRR receptor protein kinase receptor protein kinase
  misc_feature (177)..(567): Homolog of NCBI NO: 25411997 NR Description: probable LRR receptor protein kinase [imported] -
  misc_feature (1)..(28): Homolog of NCBI NO: 25411997 NR Description: probable LRR receptor protein kinase [imported] -
  misc_feature (1)..(75): Homolog of NCBI NO: 25411997 NR Description: probable LRR receptor protein kinase [imported] -
  misc_feature (172)..(556): Homolog of NCBI NO: 29367551 NR Description: putative leucine-rich repeat transmembrane
  misc_feature (1)..(142): Homolog of NCBI NO: 29367551 NR Description: putative leucine-rich repeat transmembrane
  misc_feature (206)..(556): Homolog of NCBI NO: 15217283 NR Description: Putative leucine-rich repeat transmembrane
  misc_feature (1)..(148): Homolog of NCBI NO: 15217283 NR Description: Putative leucine-rich repeat transmembrane
  misc_feature (207)..(556): Homolog of NCBI NO: 7489783 NR Description: leucine-rich repeat transmembrane protein kinase
  misc_feature (1)..(148): Homolog of NCBI NO: 7489783 NR Description: leucine-rich repeat transmembrane protein kinase
MENLLTLTTLNIENNLFSGPIPDKLLSIPKFLHEGNPFNATMINSTSTAPSLSPSLSPTKPAPTRPFSGVPPPPNERNRGKVADGPSDSEGSSSENSKGKNSSHTKKIILIAFAGVLVFIILVLAILLLLPKCARRREHANRVFKPHQVGADRGSRENALENGTPVLPPPGRSEKVQREPFKKAGEEPKVLHDLERLRRPAPISRQESQDIDFSMLMPPPPPPPPPPPPPPLDEKVTVMPIISPERPVKKTSPKRLPLTSVKHYSIASLQQYTESFAQENLIGSGMLGSVYRARLPNGKLFAVKKLDKRASEQQQDHEFIELVNNIDMIRHSNIVELVGYCAEHDQRLLVYEYCSNGTLQDGLHSDDEFKKKLSWNTRVSMALGAARALEYLHEVCEPPIIHRNFKSANVLLDDDLSVLVSDCGLAPLISSGSVSQLSGQLLAAYGYGAPEFDSGIYTWQSDVYSFGVVMLELLTGRMSYDRDRSRGEQFLVRWAIPQLHDIDALGKMVDPSLNGQYPAKSLSHFADIISRCVQSEPEFRPLMSEVVQDLLDMIRRERHGSGDSTAD

SEQ ID NO: 69818 - DNA, 2559 bp, Arabidopsis thaliana
  misc_feature (1)..(2559): Ceres Seq. ID no. 1828125
  misc_feature: MA Experiment ID: 20000179 Result: Up-regulated in Transcription
  misc_feature: MA Experiment 20000179 PARAMETER Experiment Name: At_Germinating_Seeds_P Parameter: Age (hr) Value: 6 vs. 0
  misc_feature: MA Experiment 20000179 PARAMETER Experiment Name: At_Germinating_Seeds_P Parameter: Tissue Value: Germinating Seeds
  misc_feature: MA Experiment ID: 20000437 Result: Up-regulated in Transcription
  misc_feature: MA Experiment 20000437 PARAMETER Experiment Name: At_Drought_P Parameter: Age (day) Value: 8
  misc_feature: MA Experiment 20000437 PARAMETER Experiment Name: At_Drought_P Parameter: Organism Value: A. thaliana
  misc_feature: MA Experiment 20000437 PARAMETER Experiment Name: At_Drought_P Parameter: Plant Line Value: WS
  misc_feature: MA Experiment 20000437 PARAMETER Experiment Name: At_Drought_P Parameter: Timepoint (hr) Value: 24
  misc_feature: MA Experiment 20000437 PARAMETER Experiment Name: At_Drought_P Parameter: Tissue Value: Whole Plant
  misc_feature: MA Experiment 20000437 PARAMETER Experiment Name: At_Drought_P Parameter: Treatment Value: Drought vs. No Drought
  misc_feature: MA Experiment ID: 20000439 Result: Up-regulated in Transcription
  misc_feature: MA Experiment 20000439 PARAMETER Experiment Name: At_Roots__P Parameter: Age (day) Value: 14 vs. 21
  misc_feature: MA Experiment 20000439 PARAMETER Experiment Name: At_Roots__P Parameter: Organism Value: A. thaliana
  misc_feature: MA Experiment 20000439 PARAMETER Experiment Name: At_Roots__P Parameter: Tissue Value: Roots vs. Whole Plant
  misc_feature: MA Experiment ID: 20000495 Result: Up-regulated in Transcription
  misc_feature: MA Experiment 20000495 PARAMETER Experiment Name: At_Guard_Cells_P Parameter: Harvest Date Value: 8/2/2002
  misc_feature: MA Experiment 20000495 PARAMETER Experiment Name: At_Guard_Cells_P Parameter: Organism Value: A. thaliana
  misc_feature: MA Experiment 20000495 PARAMETER Experiment Name: At_Guard_Cells_P Parameter: Tissue Value: Guard Cells vs. Leaves
  misc_feature: MA Experiment ID: 20000794 Result: Up-regulated in Transcription
  misc_feature: MA Experiment 20000794 PARAMETER Experiment Name: At_Petals_P Parameter: Age (day) Value: 23-25 days
  misc_feature: MA Experiment 20000794 PARAMETER Experiment Name: At_Petals_P Parameter: Plant Line Value: WS
  misc_feature: MA Experiment 20000794 PARAMETER Experiment Name: At_Petals_P Parameter: Tissue Value: Petals vs. Whole plant
  misc_feature: MA Experiment ID: 20001906 Result: Up-regulated in Transcription
  misc_feature: MA Experiment 20001906 PARAMETER Experiment Name: At_Drought_Reproduction_P Parameter: Age (day) Value: 35
  misc_feature: MA Experiment 20001906 PARAMETER Experiment Name: At_Drought_Reproduction_P Parameter: Organism Value: A. thaliana
  misc_feature: MA Experiment 20001906 PARAMETER Experiment Name: At_Drought_Reproduction_P Parameter: Plant Line Value: WS
  misc_feature: MA Experiment 20001906 PARAMETER Experiment Name: At_Drought_Reproduction_P Parameter: Timepoint (day) Value: 5
  misc_feature: MA Experiment 20001906 PARAMETER Experiment Name: At_Drought_Reproduction_P Parameter: Tissue Value: Siliques
  misc_feature: MA Experiment 20001906 PARAMETER Experiment Name: At_Drought_Reproduction_P Parameter: Treatment Value: Drought vs. No Drought
atgattctttctgtcttcttctatatgtttttgctgcatattcgtcgattagattgttttgttgcagttcaagactccaaaacattgttcaaaggttcaacattgatcaatgacagccatggagagactcttgtttcagctggtcagagatttgagcttggcttcttcactcctaatggaagctccgacgaaagaaggtacttagggatttggttttacaatttacatccactgactgttgtctgggttgcaaatcgtgaatctccggttcttgaccgttcctgcattttcaccatctctaaagatgggaatcttgaagttattgattcaaagggaagagtgtattgggacaccggtgttaaaccttcctcagtatctgcggagagaatggtaaagctgatggataatggtaatcttgtgttgattagtgatggaaatgaagcaaatgtggtttggcagagttttcagaatcctactgatacatttctcccagggatgaggatggatgagaatatgactttatcatcatggagaagcttcaacgatccatcacatggaaatttcacctttcagatggatcaagaagaagacaaacagttcatcatttggaaaagatcaatgagatactggaaatccggaatttcgggtaaattcataggatccgacgagatgccttatgcgatttcttactttctttccaatttcacagagactgttactgttcacaatgcctctgtgcctcctctcttcacatctttgtataccaatacaaggttcaccatgagctcctctggtcaagctcagtacttcaggttagatggagaaagattctgggcacagatttgggctgaacctagagatgaatgtagtgtatacaatgcttgtggaaattttggtagctgcaacagcaagaatgaggaaatgtgtaagtgtttgccaggttttaggcctaatttcctggagaaatgggtcaagggagatttttctggtggatgttccagggagtcaaggatctgtggtaaagacggtgttgtggtgggagacatgttcttgaatctgagtgtggttgaagtaggaagtccggattcacagtttgatgcacataatgaaaaagaatgcagagcagagtgcttgaataattgccaatgccaagcttactcatatgaagaagttgatatacttcaaagcaataccaagtgctggatttggttggaggatctcaataatctcaaggaaggctatttaggtagccgcaacgttttcattcgcgtagcagttccagatataggttctcatgtagaacgaggtcgaggaagatacggggaagctaaaaccccggtggttttgatcattgtggtgacgtttacaagtgcagctattctggtcgttctgtcaagcactgcttcctatgtatttttgcaaagaagaaaagtaaacaaggaactaggaagtataccaagaggagttcatttatgtgacagtgagagacatatcaaagaattgattgaatcgggaaggtttaaacaagatgatagtcagggcatagatgttccatcttttgagctcgagaccatcctatatgcaacatccaacttctcaaatgcaaacaagctaggccaaggagggtttggaccggtttataagggaatgtttcctggagatcaagagattgctgtgaagaggctatctcgctgctcgggtcaaggactggaggaattcaagaatgaagttgttttgattgccaagctccaacaccggaatcttgttcgacttcttggctattgtgttgctggagaagagaaactgttattgtatgaatacatgccacacaaaagcttagacttcttcatcttcgaccggaagctttgccagcgattagattggaagatgcgttgtaatatcattctaggaatcgctcgtggacttctctatctgcatcaagactctagactgagaatcatccacagagatctaaaaacaagcaacattctgttagatgaagagatgaatcccaagatctctgactttggcttggctagaatatttggaggcagtgaaacatcagccaatactaatagagttgttggaacctatggatacatgtctccagagtatgctttagaaggtcttttctcattcaaatcagatgtctttagtttcggcgtggttgtgattgaaactatcagcgggaagcgtaacaccgggtttcatgaacctgagaaatctttaagccttctaggccatgcgtgggatctctggaaagcggaaagggggattgagttattggatcaggctttacaagaatcatgcgaaaccgagggattcttgaagtgcttgaacgtaggacttctctgtgtacaagaagatcctaatgatcgtcctacaatgtcaaatgttgttttcatgctcggaagcagcgaagctgctactcttcctactccaaaacaaccggcttttgttcttagacgttgcccttcatcaagcaaagcttcctcatccaccaagccagaaacttgctctgaaaatgagcttaccataactcttgaagatggaagataa

SEQ ID NO: 69819 - protein, 852 aa, Arabidopsis thaliana
  peptide (1)..(852): Ceres Seq. ID no. 1828126
  misc_feature (77)..(192): Pfam Name: D-mannose binding lectin Pfam Description: D-mannose binding lectin
  misc_feature (43)..(852): Homolog of NCBI NO: 836954 NR Description: receptor protein kinase [Ipomoea trifida]
  misc_feature (43)..(484): Homolog of NCBI NO: 34896978 NR Description: putative receptor-like kinase [Oryza sativa
  misc_feature (509)..(852): Homolog of NCBI NO: 34896978 NR Description: putative receptor-like kinase [Oryza sativa
  misc_feature (6)..(852): Homolog of NCBI NO: 15234427 NR Description: receptor-like serine/threonine protein kinase
  misc_feature (6)..(852): Homolog of NCBI NO: 913141 NR Description: ARK3 product/receptor-like serine/threonine
  misc_feature (28)..(852): Homolog of NCBI NO: 7434416 NR Description: serine/threonine kinase (EC 2.7.1.-) BRLK - wild >gi|2181190|emb|CAA73134.1| serine/threonine kinase [Brassica
  misc_feature (15)..(852): Homolog of NCBI NO: 15220348 NR Description: receptor-like protein kinase, putative; protein
  misc_feature (1)..(852): Homolog of NCBI NO: 15234429 NR Description: serine/threonine kinase - like protein; protein
  misc_feature (39)..(852): Homolog of NCBI NO: 13620929 NR Description: SRKb [Arabidopsis lyrata]
  misc_feature (41)..(431): Homolog of NCBI NO: 30682149 NR Description: S-locus protein kinase, putative [Arabidopsis
MILSVFFYMFLLHIRRLDCFVAVQDSKTLFKGSTLINDSHGETLVSAGQRFELGFFTPNGSSDERRYLGIWFYNLHPLTVVWVANRESPVLDRSCIFTISKDGNLEVIDSKGRVYWDTGVKPSSVSAERMVKLMDNGNLVLISDGNEANVVWQSFQNPTDTFLPGMRMDENMTLSSWRSFNDPSHGNFTFQMDQEEDKQFIIWKRSMRYWKSGISGKFIGSDEMPYAISYFLSNFTETVTVHNASVPPLFTSLYTNTRFTMSSSGQAQYFRLDGERFWAQIWAEPRDECSVYNACGNFGSCNSKNEEMCKCLPGFRPNFLEKWVKGDFSGGCSRESRICGKDGVVVGDMFLNLSVVEVGSPDSQFDAHNEKECRAECLNNCQCQAYSYEEVDILQSNTKCWIWLEDLNNLKEGYLGSRNVFIRVAVPDIGSHVERGRGRYGEAKTPVVLIIVVTFTSAAILVVLSSTASYVFLQRRKVNKELGSIPRGVHLCDSERHIKELIESGRFKQDDSQGIDVPSFELETILYATSNFSNANKLGQGGFGPVYKGMFPGDQEIAVKRLSRCSGQGLEEFKNEVVLIAKLQHRNLVRLLGYCVAGEEKLLLYEYMPHKSLDFFIFDRKLCQRLDWKMRCNIILGIARGLLYLHQDSRLRIIHRDLKTSNILLDEEMNPKISDFGLARIFGGSETSANTNRVVGTYGYMSPEYALEGLFSFKSDVFSFGVVVIETISGKRNTGFHEPEKSLSLLGHAWDLWKAERGIELLDQALQESCETEGFLKCLNVGLLCVQEDPNDRPTMSNVVFMLGSSEAATLPTPKQPAFVLRRCPSSSKASSSTKPETCSENELTITLEDGR

SEQ ID NO: 69820 - protein, 844 aa, Arabidopsis thaliana
  peptide (1)..(844): Ceres Seq. ID no. 1828127
  misc_feature (69)..(184): Pfam Name: D-mannose binding lectin Pfam Description: D-mannose binding lectin
  misc_feature (1)..(844): Homolog of NCBI NO: 15234429 NR Description: serine/threonine kinase - like protein; protein
  misc_feature (31)..(844): Homolog of NCBI NO: 13620929 NR Description: SRKb [Arabidopsis lyrata]
  misc_feature (35)..(476): Homolog of NCBI NO: 34896978 NR Description: putative receptor-like kinase [Oryza sativa
  misc_feature (1)..(844): Homolog of NCBI NO: 15234427 NR Description: receptor-like serine/threonine protein kinase
  misc_feature (20)..(844): Homolog of NCBI NO: 7434416 NR Description: serine/threonine kinase (EC 2.7.1.-) BRLK - wild >gi|2181190|emb|CAA73134.1| serine/threonine kinase [Brassica
  misc_feature (7)..(844): Homolog of NCBI NO: 15220348 NR Description: receptor-like protein kinase, putative; protein
  misc_feature (1)..(844): Homolog of NCBI NO: 913141 NR Description: ARK3 product/receptor-like serine/threonine
  misc_feature (501)..(844): Homolog of NCBI NO: 34896978 NR Description: putative receptor-like kinase [Oryza sativa
  misc_feature (35)..(844): Homolog of NCBI NO: 836954 NR Description: receptor protein kinase [Ipomoea trifida]
  misc_feature (33)..(423): Homolog of NCBI NO: 30682149 NR Description: S-locus protein kinase, putative [Arabidopsis
MFLLHIRRLDCFVAVQDSKTLFKGSTLINDSHGETLVSAGQRFELGFFTPNGSSDERRYLGIWFYNLHPLTVVWVANRESPVLDRSCIFTISKDGNLEVIDSKGRVYWDTGVKPSSVSAERMVKLMDNGNLVLISDGNEANVVWQSFQNPTDTFLPGMRMDENMTLSSWRSFNDPSHGNFTFQMDQEEDKQFIIWKRSMRYWKSGISGKFIGSDEMPYAISYFLSNFTETVTVHNASVPPLFTSLYTNTRFTMSSSGQAQYFRLDGERFWAQIWAEPRDECSVYNACGNFGSCNSKNEEMCKCLPGFRPNFLEKWVKGDFSGGCSRESRICGKDGVVVGDMFLNLSVVEVGSPDSQFDAHNEKECRAECLNNCQCQAYSYEEVDILQSNTKCWIWLEDLNNLKEGYLGSRNVFIRVAVPDIGSHVERGRGRYGEAKTPVVLIIVVTFTSAAILVVLSSTASYVFLQRRKVNKELGSIPRGVHLCDSERHIKELIESGRFKQDDSQGIDVPSFELETILYATSNFSNANKLGQGGFGPVYKGMFPGDQEIAVKRLSRCSGQGLEEFKNEVVLIAKLQHRNLVRLLGYCVAGEEKLLLYEYMPHKSLDFFIFDRKLCQRLDWKMRCNIILGIARGLLYLHQDSRLRIIHRDLKTSNILLDEEMNPKISDFGLARIFGGSETSANTNRVVGTYGYMSPEYALEGLFSFKSDVFSFGVVVIETISGKRNTGFHEPEKSLSLLGHAWDLWKAERGIELLDQALQESCETEGFLKCLNVGLLCVQEDPNDRPTMSNVVFMLGSSEAATLPTPKQPAFVLRRCPSSSKASSSTKPETCSENELTITLEDGR

SEQ ID NO: 69821 - protein, 723 aa, Arabidopsis thaliana
  peptide (1)..(723): Ceres Seq. ID no. 1828128
  misc_feature (1)..(63): Pfam Name: D-mannose binding lectin Pfam Description: D-mannose binding lectin
  misc_feature (1)..(723): Homolog of NCBI NO: 836954 NR Description: receptor protein kinase [Ipomoea trifida]
  misc_feature (1)..(355): Homolog of NCBI NO: 34896978 NR Description: putative receptor-like kinase [Oryza sativa
  misc_feature (380)..(723): Homolog of NCBI NO: 34896978 NR Description: putative receptor-like kinase [Oryza sativa
  misc_feature (1)..(723): Homolog of NCBI NO: 15234427 NR Description: receptor-like serine/threonine protein kinase
  misc_feature (1)..(723): Homolog of NCBI NO: 913141 NR Description: ARK3 product/receptor-like serine/threonine
  misc_feature (1)..(723): Homolog of NCBI NO: 7434416 NR Description: serine/threonine kinase (EC 2.7.1.-) BRLK - wild >gi|2181190|emb|CAA73134.1| serine/threonine kinase [Brassica
  misc_feature (1)..(723): Homolog of NCBI NO: 15220348 NR Description: receptor-like protein kinase, putative; protein
  misc_feature (1)..(723): Homolog of NCBI NO: 15234429 NR Description: serine/threonine kinase - like protein; protein
  misc_feature (1)..(723): Homolog of NCBI NO: 13620929 NR Description: SRKb [Arabidopsis lyrata]
  misc_feature (1)..(302): Homolog of NCBI NO: 30682149 NR Description: S-locus protein kinase, putative [Arabidopsis
MVKLMDNGNLVLISDGNEANVVWQSFQNPTDTFLPGMRMDENMTLSSWRSFNDPSHGNFTFQMDQEEDKQFIIWKRSMRYWKSGISGKFIGSDEMPYAISYFLSNFTETVTVHNASVPPLFTSLYTNTRFTMSSSGQAQYFRLDGERFWAQIWAEPRDECSVYNACGNFGSCNSKNEEMCKCLPGFRPNFLEKWVKGDFSGGCSRESRICGKDGVVVGDMFLNLSVVEVGSPDSQFDAHNEKECRAECLNNCQCQAYSYEEVDILQSNTKCWIWLEDLNNLKEGYLGSRNVFIRVAVPDIGSHVERGRGRYGEAKTPVVLIIVVTFTSAAILVVLSSTASYVFLQRRKVNKELGSIPRGVHLCDSERHIKELIESGRFKQDDSQGIDVPSFELETILYATSNFSNANKLGQGGFGPVYKGMFPGDQEIAVKRLSRCSGQGLEEFKNEVVLIAKLQHRNLVRLLGYCVAGEEKLLLYEYMPHKSLDFFIFDRKLCQRLDWKMRCNIILGIARGLLYLHQDSRLRIIHRDLKTSNILLDEEMNPKISDFGLARIFGGSETSANTNRVVGTYGYMSPEYALEGLFSFKSDVFSFGVVVIETISGKRNTGFHEPEKSLSLLGHAWDLWKAERGIELLDQALQESCETEGFLKCLNVGLLCVQEDPNDRPTMSNVVFMLGSSEAATLPTPKQPAFVLRRCPSSSKASSSTKPETCSENELTITLEDGR

SEQ ID NO: 69822 - DNA, 2361 bp, Arabidopsis thaliana
  misc_feature (1)..(2361): Ceres Seq. ID no. 1828458
  misc_feature: MA Experiment ID: 20000184 Result: Up-regulated in Transcription
  misc_feature: MA Experiment 20000184 PARAMETER Experiment Name: At_Shoots__P Parameter: Age (day) Value: 7
  misc_feature: MA Experiment 20000184 PARAMETER Experiment Name: At_Shoots__P Parameter: Tissue Value: Shoots vs. Whole Plant
  misc_feature: MA Experiment ID: 20000185 Result: Up-regulated in Transcription
  misc_feature: MA Experiment 20000185 PARAMETER Experiment Name: At_Roots__P Parameter: Age (day) Value: 7 vs. 21
  misc_feature: MA Experiment 20000185 PARAMETER Experiment Name: At_Roots__P Parameter: Organism Value: A. thaliana
  misc_feature: MA Experiment 20000185 PARAMETER Experiment Name: At_Roots__P Parameter: Tissue Value: Roots vs. Whole Plant
  misc_feature: MA Experiment ID: 20000227 Result: Up-regulated in Transcription
  misc_feature: MA Experiment 20000227 PARAMETER Experiment Name: At_Root-Tips-vs-Tops_P Parameter: Tissue Value: Root Tips vs. Root Tops
  misc_feature: MA Experiment ID: 20000439 Result: Up-regulated in Transcription
  misc_feature: MA Experiment 20000439 PARAMETER Experiment Name: At_Roots__P Parameter: Age (day) Value: 14 vs. 21
  misc_feature: MA Experiment 20000439 PARAMETER Experiment Name: At_Roots__P Parameter: Organism Value: A. thaliana
  misc_feature: MA Experiment 20000439 PARAMETER Experiment Name: At_Roots__P Parameter: Tissue Value: Roots vs. Whole Plant
  misc_feature: MA Experiment ID: 20001451 Result: Up-regulated in Transcription
  misc_feature: MA Experiment 20001451 PARAMETER Experiment Name: At_Far-red-induction_P Parameter: Age (day) Value: 7
  misc_feature: MA Experiment 20001451 PARAMETER Experiment Name: At_Far-red-induction_P Parameter: Light Value: Far-red vs. White
  misc_feature: MA Experiment 20001451 PARAMETER Experiment Name: At_Far-red-induction_P Parameter: Organism Value: A. thaliana
  misc_feature: MA Experiment 20001451 PARAMETER Experiment Name: At_Far-red-induction_P Parameter: Plant Line Value: Columbia
  misc_feature: MA Experiment 20001451 PARAMETER Experiment Name: At_Far-red-induction_P Parameter: Timepoint (hr) Value: 24
  misc_feature: MA Experiment 20001451 PARAMETER Experiment Name: At_Far-red-induction_P Parameter: Tissue Value: Whole Plant
atgttgttgtttccttctacttctttacgtctcttcttctttctcttcctcttgttctcctcttgtttcttacagattagaggagatgatgatgatgatgatataagcgatgataatatcaaagtcgacccgagtctcaagttcgaaaacccaagtcttcgacaagcctacattgctcttcaatcatggaaacaagctattttctctgatccttttaacttcactgctaattggaatggctctgatgtttgttcctacaacggtatcttttgtgctccttctccttctagtccgaaaactcgagttgttgcgggtattgaccttaaccatgcggacatggctggttatttacctcgtgagcttggtcttctcactgatcttgctctctttcatctcaactcaaaccgcttttgtggagaagtacctctcacgtttaaacacatgaagcttctcttcgagcttgacttaagtaacaaccgttttgttgggaagttccctaatgttgtcttgtctttaccttccctcaagttcttggatcttcggtacaacgagtttgaaggtagtatcccttcgaagctattcgataaagagctcgacgcgatattcttaaaccataaccggtttatgtttgggatacccgaaaacatgggaaactctccggtgtctgctctagttcttgcggataatgatcttggaggttgcataccgggaagtatcggtttaatgggaaagactctcaacgagatcatcctctctaacgataacttaaccggttgcttaccaccacagattgggaatctcaagaatgtgacggttttcgatatcagtttcaaccgtttaagcggtccattgccatcaagcattggaaacatgaagagtttggaacagctcaatgttgctaacaatagattcacaggagttataccaagcagcatttgtcagctctctaaccttgagaacttcacttattcttccaacttcttcaccggtgatgccccgagatgtgtggctcttttgggagacaatgtggtggttaatggctcgatgaattgtattgatggtaaagaagatcaaagatcgtctaaagagtgttcttctccagcctcacgctctgttgattgtagtaagtttgggtgtaacaactttttctctcctccaccaccgtcttttaagatgtcacccaccgttcgagtacttcctccaccgcctccgtcttccaagatgtcgcctacatttagagcaactccgccaccgccgtcttctaagatgtcaccatcttttagagcaactccgccaccgccttcttctaaaatgtcgccttcttttagagcaactccgccaccaccttcttctaagatgtcgccttccgtcaaggcgtatcctcctcctccaccaccgccagagtatgagccatctccgcctcctccttcttccgaaatgtcaccttccgttagggcataccctccaccaccaccactatcaccaccaccaccatctcctcctccaccatacatctactcatctcctccaccaccgtcaccatctcctcctccgccatacatttactcatctcctccgcccgtagttaactgtccacccacaacacaaagtcccccacctccgaaatatgagcaaactccttcaccaagggaatactatccatcaccttcaccaccttactaccaatacacgtcttctccgccaccgcctacttactacgccactcaatctccaccgccaccaccaccgcctacttactacgctgttcaatctcccccgccaccaccaccggtatactacccacctgtaacagcaagtcctcctccaccaccggtctactatacaccggttatacaatctcctcctcctccaccggtttactattcacctgttacccaaagtcctccaccaccaccaccggtttactatcccccggtaacacaaagtccaccaccatcaccggtctactatccgccagttacccaaagtccacctcccccaccagtttattatcttccagtaactcaaagccctccaccgccatcaccagtctactatccaccggtagcaaaaagccctccaccaccatcaccagtctactatccaccggtaacacaaagcccacctccaccgtcaacaccagttgagtaccatccaccggcaagcccaaaccagtctccaccaccggagtatcaatcaccaccaccaaagggatgcaacgacagtccaagtaacgaccatcactaccaaacaccaacaccaccttctctgccgcctccatattacgaagacacacctcttccgcctatccgcggtgtctcttatgcgtctcctcctccaccatcaatcccatactactaa
